United States Patent Application Publication US 2008/0114160 A1 - sequence listing, part 2

SEQ ID NO: 947 - DNA, 9715 bp, Oryza sativa
aaaccatggataaatttgttacttatggtgttgggcctattaaagtcattagacaaaatttaaaggcgagaagtccatgtatttttggtattttgggacgagggagtatatagtctaattattacacaaaacttttataaaatcattattaccttcaacccaaaatataagacacaaccttttcttttctaatgtttcataatataatgcgcacatacatgcatgtaattaattagcatctttcttctaaattcattttatttaaaatcatccacctttaagatctctaatcctattaggtgtaaacattatatttattgaagtggtaccagaatgtgataatagtattgtatttatagagggagtacaacacaaacttaaaccaacaaaattaatgacaagcataaattactaccctacctgattggtcttaattttcactggacacaaaattaaaatccattaggaggtccatttcaattcatgatttctacataaaatcaaactagctcatggccttccaaaatttatatactgtagatgagctctaattatgcactgtctataaactaaagcgcgccaaatggcgcgcctattttctagtatatttcttttttttatttcctatatctggtggttgtgtcatgcaggcttcggacatgagcaagttaaggtactctcaattgcattataagctcaatttgtgccatttagttctattgatgtaatctctaaaattttgttagtggagcacttcaagttgcttatgaggaagaccaggtagatggtagttgtaattctactttcacctaaaatcactttttaatgcttttattgatgaggatctcctcttttaataccactaagtgtatagctatttggtagaggttttggtaaaaaaaaaaagttggtccctccaatcaacaattttcgatgttgggagtttttagttcagtactctagaattctaaagttggatacacatatccatgcatactgctttagagatcatagcctctgcttggtagtatgccacaattttttccctaatgtttgttttagttcaaacgttaagtggacatgctcttatttgcagtggttttcacggatgcagagctattggaatttggaacaaactcctttgattatatgttatggacaacaataagaacttcaaaagtaggttttgtggacacatttttgggttgtactcatcattttttgcgatataattgtccaggcgttggcatcagttttttcatactacattggacggttgaattgttgatgcctcggtgcataatgtgtggctcacctgggaggttccaaggtgttctatgttctccacatccttcttttaaaggcaaacctctaaggctgtgttcgcatgcaccttttcccattccctctccttcgttttccgcgcgcacgcttttcaaactattaaacggtgtgttttttgcaaaaagtttctatacgaaagttgcttaaaaaaatcaaattaatccatttttttaaaaaaattagctaatacttaattaatcacgtgttaatggaccgctccgttttccatgcacaggagttaggttcccatctcccccatccgaactcagcctaagtgttcttctacttcttgatgaagctaccgctgatatatatagtcttgttatttctatcaataatagccctgaatttgttgtatacagtggtcatgactttatatggaatgacggaatgaccttgtgggtcttggttttttaaatcactccaacaaacgttatatgtgttgtttggttaattttatgagtgttttgagctaaggatataatctctaataacgaattccatgcgcgttctcggccagatagccccgccacgtggcgtcgtacaattgatggaattggctctcacccgcatccgttggataagaaatcaatggtatagagaaaacaatggatctaactgtaaaatattaattttcaaggggggtaaatggaaaagatggcatcccttctggagaaatcgtgtcctgttgcgatttctcgatttctcctcgcctcttcctcctctgctcctccggcaagtcacgagccatccccgacgccggccgccgccgctccgcatcagcgccgtccctcgccgcccttccgcaccagcgcctaccctcaccgatccggtgatccccatcccctagaaaccctagcccacagcgccgccctcactccacctctcctgtgcgtacgcatctcacgagccgagcgccgctgcctcctactcgccccctttccgtccgtctgcctccttcctttccggtgcgctcgacccggcgggccagcggttgagcttggcgcagcactcgagtgggatggccggccgagcgctggggttggactccgctggcatagtggtcgatcccatccgtcgccgtcaacatagctgcataatcagttgggcgatttttgtttgatgtccatagctaatcctagaattagaattgttcttcggtgattttgttcttcgttgatcctgtgagtctattaatatatgaaaaaccataagtgcggttgataaggaaccttgagaaagcttgatctgttgctcaaaaacatccaggactaccacaagcatgttctgctggtactgtacagtgtacacagaccttggctgtaggtacctacgtttttttttttagagaagggtattttttacccagcctctatattcaaccggatatatacggccattgaaatagggaacttagccccacaaacaacccaatctgaaattcgctccatagaagatttgaactcaggaccttggggtactactcaggtcactgtaaccactaggctgtaggtacctactgatctttcagtatctaatgcagaaagtgaaagtgttcccatccaaagtcatttaccatatggtcattgatttctgtagatggattatttactgccctccttattgctgccctttcttgcttctcgatattatttgttcatatcattgttttgttctatttatttctttttgcagatgttattgaaaaaattattgctgtctccatctccaatgcagcaatgatatctacaagttcatcagattttaggatgagaagattagagcctatattatccaataaaataaggtaataagtatccctatttattttaaatatttctgttagtattgcataatatttaatactttatttttttcatgtagagctcatcttcacaaatggagtcacctcaagatattcggataatgatagttgagccatgtcatttggacacaaccaacatcttaagcaaacaaacctatgaaaacaacaataatctggtacacaactgcacatatttcttttttaaatatactgacgagacaaggaaaatatccatgtaactgtagatatcttttgggaaaggtatactaacatatcatgattcctctttgcttctctattctattacagtgaacattgcagggtgtggtggtctaattatgttcagctaataagtcatggtagacttttataagtatccttaaaatttggaatattcagcgaaagaatcatatatatgacccttataactacacctttatgcaccaggtaattccacacacttactctctttgaatagttctcatatatttaatagcttgatgtttcaagcgtgagaaaaaacttggattttctggacaaaaaaaagctatatacttgtatgcattgtggttgatgttgtctttgacttactaatggcaaacatgattacatgttcttggaactaattttgagtcatgactgagcagggtaatgtatatgctgtagtaagaattgcatttattcgagatagagtatacaggtatatcctagagtaagaattgcattgctgatctaacgaaaaaaaaattatttgacacgttctttgtactttgaatcaatgatgttaagctttttttgtataccacaaatgtgccttgcatgctctctacaattatatgacagtaacaaactagagaagatgtttggggtttgcctgttgtgttcactggaatgattttgtagttgaaagtaaatttgaagctttcatatataagcaagctgtgatgattctttatataatcttagtattatgaaatttaactgtttggcacaaccttgttgtccttgagtcctgaaaactccagcaaaatattgttgtgattagaattaggtacaggcatctgattaagttattgtaaatcacatccaccatctgatttggtgaaggtatccctaaaacaaacaacatggatacaaattaatcaccttacaaaggatgattcctctatcttcacagagaatgattcctcttatctttacaaagttaaaaaaaaaatacatcacttgcagcaaaaagagtttcttctctacatagttcaaatatattatgctgaagaacattattatatagtacaatttatatactttggagtcatatattagttttgtgaaacaatgaagcaaatgtaatccatctaataaaatgttttatgataccatttacttattatttatattattgcttttctcagtatttactattataaaggatgttgattcactgtttcttaactgccttaattttctaggtttttactttagatgttccatgacaaccatataatcattcaatatattacataaatatttatactattattatcccagaaaagtagtagtgaagaagagtagaaaacactgattatcatttgattcaaacaaacagtaaataagcgctctgcctgataacatatccgataaaaactgcatacttttgttatatggattatgcacagcactaacttttggtgtatttatagcagatgcattacatgtccatcgagaaaagcgacgattcaaaacctatactcatctagctagcttaatttattagaaaattgaaatagggctttatcaaaagctttgatcatttcaggtcctgaacaatgtatgtctatataatagacagtttatatttatatattcaataatctacaatatgtctaagtactagactaaagtaatgcaaaattatggttacctactattgagatggctctcataaagttccagtttagatgttcaattatcattgattaatcaattgccggctttatctatttacatgctgaagtactccactgtactcatttcaatgactttgtcatatacatgtaacattttattacaatttgttcctggatctggaattcctgattcgattgggcactatttcatatagtgctggggctgtctcctaaatagttttaccatccataaactgaaatttctatctgttgaaaatggcgattaaacggaaaagaatcatttctgtagaacagcacgatggttaaacatggaactgagagtttttttttttcagaggggaactgaggatttcgggctttgcaatatgagcatatgccaatcagaacatgattagtgccctatttagctgatgatgatgataaggcttaataatacggtgtacactgcgttcaattgggctggcctacgtatacttccgcgcgaagcagcggttactttctagtatatgacgatttagaggtgcaatattagctttaagatctttcttaccattttgtttgtcttacataatcatccatacacatccatacagtttcaacacaagtaatttaactagttgtgtaggatctgtctatacatcactcagacagattttattattattattactagtagtagtatagtgtaacaaacaaaacaaatctttatctttacctattataaaagtttaaggtgtttttgccagtaattttcgtacgtcgtcctgttagcgcacgattttttttccgagtccgttcccgtatagcgaaccaatccagatcgctatcgcccaaatttcccatccgattcccacccagattgctccctcccagatcagttcaaacctattttgctcatatctcaatccaaacatcacaaaaactccaaacataagaacaccccatattacatccaaacaccacaagaagaacactgcatacatctattgtccgtctcactcacaaccgcttcgctcccatcccatacgcacgtacggatcaaacatgccccttgaactagatatcaaatccgatccaaataaatcacaaaatcacaaatccattgaattacaaaatcgcaaatccaacaacaatgaatcaaaatcttccaataaaaattatatcaccggtgccattgttcatcggagccgaggacgccgctgccccgaggccgtggtggcttggcggcgcgccgccgtgcgccccgaggagggtgccgccgtgaagagggtgccacttctgtgccagagaagaggattcctcggacgccacccgccagggaaagggcaccgctggctgggggggcgccgaccgccaaggggagggcgccgcccctcgggggaaaggcgccgctggcctggtggaggatgccacgtctgaggcaccgggcgccgtcggccgggaggtcgccctggctgaggggtaggaagagcggtgccgccggtggggggaggaggagggggactgggggagagggtgttggaattaatgaatgggccttagcccactcgaagattaattctttggaaaatcacaaaagcccacctcatgggatggcatgcatgtggagtttagtaccaccttgcttattctaggagagggggacctccttaaaagggaggatgccctcctagccacttgaagcatgtgtggtggagagaagaggggaaacacgcgcgcgctcgctcgcctcgccaggcagggcaggcggcgcgcgtgcacgacgtacgtgtcgaatggtccgaaaaattggctcctcacccttgcgcagatgcagcctccttttgcagttttgttttgctgcaaattcggattcgtttttgttttggaaacgttccgaaaaatccggtgcgtgcaaacggcgtggagtccggataagttacgcgcgacttatccggttcggttacgcgcagtagagatcgtgcgggcgccctgatcaaccgacccttctctatataaaccgacttgccgtcttcacgcaacacttgcgaaatcaatctagggtttgtctcctactctgtactgcgccggcgctcgtagactactccatcccgctcgccggcgtgcaccggcgattgggagagcaggtctccggaacctctgccttcgacgttctgcaccgggagaaggcggcaataaggtttttgggaagcgcttcgcgcgactgctccctgttcgttcgcgacggctcgccttcctcttcgctcgcgtgtttcgtgccttcgtagacacctgcgaaaagtttcgacctagcaaccggtctttccgtcacctcggtacgtgttcaatatgttgcgcatatttgatctgttcatgttgtactgtgtagtttacatgtatagatctaatgatgcgttcatgctagttttcatctgtaatgtcatgatttatttatggaatagattaaatcattatatgtctataatctcaacaatccaaaaaccttattataggcactgtgattttactatggctggttttgccgatgcactgaggccggataaattcaccggtgtgcattttaagagatggcagatcagggtcactctgtggctgacagctatgaaatgcttctgggtgagtactggcaaacctgaaggagttcttactgctaaacagcagaagcaattcgaggaagccactactctctttgtgggatgcattcttagcgttcttggcgatcgtctggtcgaggtgtatatgcatatgaccgacgctaaggagttgtgggatgcactgaatactaaattcggtgctactgatgctagcaatgatctgtatatcatggagcagtttcatgactacaaaatggctgacaaccgttctgtagtcgaacaggctcatgagatacaaaccatggctaaggaactcgaactccttaagtgtgtcttacccgacaaatttgtggccgggtgcattattgcaaaactacctccatcttggaggagtttcggtactgcactcaaacacaagagacaggaatactccgttgaggggttgattgcgtctcttgatgttgaggagaaagctcgggaaaaagatgccgcgtctaagggcgatggtgggcagtccagtgccaatgttgtgcacaaggcccagaacaagagcaaggggaaatacaaagctcagcaaaccaccaacttcaagaagcagaagaagaacaacaacaatcctaatcaggatgagaggacttgctttgtgtgtggccaagttggtcatctggctaggaagtgtccacagcgcaaggggatgaaggcacctgcagggcagacttctaagtctgctaatgtgaccattggcaacactggagatggaagcgggtatggtaatttacctactgttttttcagttaatcaatctactaattggtgggttgatactggggccaatgtacatgtttgtgctgacatctcattgttttcttcttatcaggtcgcacggggttccaccgtcctaatggggaatgggtcacatgcttctgttcatggtgttggcacggtagatctgaagtttacttcgggaaagatcgtgcagctgaagaacgtgcagcatgtcccttctatcgacaggaatcttgttagtggctcccgtctgactagagacggatttaagttggtttttgagtctaataaagtagtcgtgtctaaacatggatattttattggtaaaggttatgagtgcggaggcctgttccgcttttccctttctgatttctgcaataagtctgtgaaccatatttgtggcagtgtggatgatgaggctaatgtttggcattcacgtttatgtcatattaattttggcttgatgtctcggctttccagcatgtgtttaattcctaagttttccattgtcaaaggttctaagtgccatagttgtgtgcaatcgaagcaacctcgcaagcctcacaaggctgccgaggagagaaacttggcaccactagaactcctacattcagatctttgtgaaatgaatggggtgttgacgaagggtggaaaacgatatttcatgacattgattgatgatgctactagattttgctatgtgtacttgttgaaaacgaaagacgaggctctagactattttaaaatttataaggcagaagttgaaaatcaacttgacagaaagataaaaaggcttaggtctgatcgtggtggagagttttctcgaacgagtttgacttattctgtgaggaacatggcatcatacatgagaggacgcctccctattctcccgagtctaatgggattgctgaaaggaagaaccgcacactgactgacttggtgaatgccatgttggacaccgcgggactgcctaaggcatggtggggggaggcattgttgacctcaaatcatgtgttaaacagagttcctaacagaaataaggacaaaacaccatatgagatatggattggtagaaaaccatcactttgttatttgcgcacatgggggtgcttggcgaaagtcaatgtaccaataacgaagaagcgcaaacttggacctaagactgtggactgtgtttttctgggatatgctcatcatagcattgcctatagatttttaatagttaaatccgaggtacc

SEQ ID NO: 948 - DNA, 971 bp, Oryza sativa
tgcatgaaatgcactaggccaatggccatcgatttatacatgtgttcccaatttccggtgacttaggtatctctggtcttaatgcccggtgcaaattacaaatgggcacaattgatctttctttttccttgtcaaaagttaaatggccggtgaggctagctatgagaggaaaggaatctttgccttaagaagagtcattatatttcaagctatggatgtctatgactcaagaatttactattctttcttctcatagtgagagaggagtacggtttttatgatcacatctcatgagtacttttaaaagttaaatttcatgagaaaacagttttctagtgtaaagattgcctctcataaatcaatctctagtagattataacacaaataaaaatactggaagcaattacctgatggttaattttctaggggacattatgcaaaaatgattatgtcaataaaaacatcaacaaataatgtgccataaactgaataaaattatcaaacctgcatctcatcgctagttggtgcggcagcatcttgcgaagcataaatgtacctctggtatctctcaagcgtcttaagcatgctgaaatatgaattagagatagatggttaactagcacactatacagaaaatatgtttcccctaaaagaaatagtatattaataaagctgttaattatgtcttccgatcaatttgtgaatgtttcgttgtcattttcttcctcaggaaaaaaaaaatcaagcctcctttagggtacattcattggagagggttgggaactgttccctctcgcacacaaaacaaagtaacgcacgattaattaagtattagcttaaaaaaacttaaaaatagattaatatggttttttataagcaactttcttatagatttttataaaaaacgtattgtttagcaatttgggaaacgtacaaagtaaacgagataatagaagttgagaaagtgtcta

SEQ ID NO: 949 - DNA, 1497 bp, Oryza sativa
ggttgagttttttttttttaagaacggagggagtatcagtgtggcaaaatgcagttacttttttttaaacgttacagttacttgttattcacaactcctagtcagaaaatcccacttttaatttaatccaacctttgtaaattattctaattaagcttaagcaacacaacaactaagggttaagcctcgtagaacattgatcttttatcacatggatgttgggtaagccaacaaatacaaatccacatcacatattaccacatttgtatagcttcagatatagtgcatagtaagcaaaccataatatatgtaacaaagaagctagcgcaacgttacggatgaaatctgaaaattttaatcggtaagtatactacatatttatacttgaacgagtttccttgctatgttaatttacctttcttgatctgatttgcttcaaggttctgactacttgactctcaagctgctcaagttcatttgtagccagtggagctaaatcctcacctagaaggttcctgcaacattatcaccagttaaaatattttgcaaaacaaagggagcaatggagtagagccagtgttctttagactaaaatattagacccaacaaaattgaagaacacatgtacatatgagtatgaacataaagaatctattacctttgtgattgttgcagaatctcaacatgtgccttcaagttcacatattcctgatagttgttctacattataaagaaaagcgaattgaaaacaagctaaaattttaaatttagttattcttgtcatacacagcacaaaagcggcactaatgatttactgaaagtgtactgataatatacatttgtaatagtgacagcgtttgacctatattaatctacaaacagttgatctatatatatattgtattgtattattaagatagcttaaatggaagctaccacatttgctctggaggctaaaacctatattaatcggagaaaagggaaaaaaaatgtttggaccattagatcgtggggtctagctcattatagtttagattgatgaatatatctgcatataaaatgcaattgtagctatagaaaaaaaaggtagaaattgtatatgaaatccaattctattttttttaaaaaaaatatattaggtagaaaatacaattgtatcaatcgaatagagttaaagtattgcatatcaaatctaattctacttttgaaatctagcaccatgcaatttgcatgagacaatcgcctagttatattaagtataggccaagttatatttgcagtacgtataataaacaaattaaagatgtgaacatggtaattaaaactaaaatggtccctgtagagagatgcgtagagtttatgatgaatgccaataattgacggagtaactacgaagagatactatatatactctatctagtgcacccagatccccatggatatgttcaataaacatttatcacatttacatcatgtatgcgttgcccatttagctag

SEQ ID NO: 950 - DNA, 745 bp, Oryza sativa
gggcgaattcgagctcggtacccacaaatgtgacgcgccaagatgtcaatgtgagcatggcaatgtatgaggccagcctgggccgtttgaccagcacaaactatccccttgtcaatttcatcatggccactgaagcagatttcttcattggagccctgggatcaacctggtgctacctcatcgacggcatgcggaacaccgcaggaaaggtgatgtctggctatctgtcggtgaacaaggaccggttctggtaagcaattcagaagctgctaaaccttgttcattgtattttagctcctctgaatagatatgtttggcctaagtttgcttctgtacggcaatagggcatgtatatatgcaccatcctagcagataactttagcgtgtgaaacttctgagctaataggaaaacagtatcgttatatcaaatcaggtccatatattttgatctggtatccacttaatcctagatatatattatcctgaggtccagtgtacccaagaaaaaagaggatgcacttaccaaattttcagtggtactcataatgctgataagtggtacacgagagatccaattgcagaattttatagtagtatgacagtaacagctatgccatgtaaaagaaattgacacacatgttttctgtagaacatcggtttcaaaaaaaaaaagtttcctgtagaacaaccagggcattctcctctttgtcaaccatttgatttgttgaagacatgacccaaaaaa

SEQ ID NO: 951 - DNA, 718 bp, Oryza sativa
ccaaggacggcagcggcaaagggcggggcggcggcggcggcggaggcggaggcgtgctgcatctgccagcgacggtgaggatcgacatcccggcgacgagccccgggcgggcggcgctcaaggtgtgggaggagctcgtgaacgtgctccgcaaggacggcgccgaccccgccgcggcgttcgtccaccggaagaagatccagcacgccgagaagaacatccgcgacgccttcatggcgctctaccgcggcctcgagctgctcaagaaattcaggcacatcttccctcttcatctttcctttttgccatatctgacaagctaaaaccacgaagtcacggtattttagaacaagacttgccttttgcgtctatgtatattgtcttctatgccatgcatgatgcatatatatacgcatttgtaagctatttagaattctgatggccaaacctcacactaatagcatgcaactgatcgatcacactaattgcatgcacacacatgatatagatagtttggttaactgaccaactaggaaaaaaaaattaagagtgttcttcatagatgcatatctaacttattactactatgaatattagttgcagcatgagtcatggagcactgtgtgagcagcacacaactacacctgcactgaacccaagcatgcagtacagtagtagtttagtcaaatttcaacctcgttttgcatgcaagcatccg

SEQ ID NO: 952 - DNA, 606 bp, Oryza sativa
tagaggatccccgtacgtgtaggatgtgtagtatatatgtgcgtgtctgtacggtgcgtgcttaattatacaggaggagagatcggagaaggtaattaaggagaagataacgatgatcattaggtcacatgatggcgcaggcgtaggaggggtcctcctcgcagacgatcctgctcagcctttttttgtgacgtcgacccggggacaaaaaatgggtcaagtagggagaatgacagtaaacacctggcagtaattaatgaggtgattataatgtcaaacctaatctgctaatcatagttcagagatttcggagcagcctttcaaagttggggggtcgttgcacggatgggcgaagcaggcaggctgcggttggaaacctggaccatgcatgccgtgcgcccacaagccgcaagtctcgtgcaccagcacgttctctcgtgcagtacgtatatatcctagttataggttgtgtttcagcgtaaagttttaattttgattgaaattagagatgatatgactgaaaagttatatgtgtatgacaggttgatgtgatggaaaaggactgaagtttggatccaaactaggaatctaaacacaaccagggta

SEQ ID NO: 953 - DNA, 720 bp, Oryza sativa
gatattacgttatagatgtttattgcatgaaagagtaatatgatctagttaattcgttgacagatatgtcgaacaaaccaatattccaagtttaccatggaccaggaaacgtccgttacgggccaactggggtagatctgtcagattttattgtatcagaaaggggaattgagagaccggctgagaggagtgtaccttctgtaaaaggatggttaatgaggggcttgaaagttgatccacagacaagtgacataacaatcaatgttatagtaagtcgggcaactgagggtttttattgggaactaatgccagttcaaaactctcaagtgtggagatggtatgtggaaaatgcaatgcaacgtgggtggcctctagctttggtttcgtttgtgcacccgaaggatccaggtgtgcagatgaacatggatgatggcgaggaaccaagcgctgaagtaaatgagacttctgtggaggaggtcaacacaggagtggacgggggcgtagtagctccagtgggcattcaaccaggtggagtggccgacgagggggagactgtcgcagccattgtggatgaaatggagagggaggattttgacaacgagcgtgtagaggaaggtgattcgtcagatgaggagacggatattaatccagcagaatgggctagtcaggatttttctgggctgatcgtctctgaagaggatagtgtgagatgggagtaca

SEQ ID NO: 954 - DNA, 547 bp, Oryza sativa
gttcatttggacttgaaacctgctaatatattactggatgagaacaaaatgccaaaaattgctgatttcggtttgtcaagactctttggttcaacacaaacttttacgacaagaacttttattggaacagtgtaagttatgcaagttgattcattgtgaaagttccattgatttctatacccttttctaatcattaacaacatgcagtgggtacatgccgccagaatacattgagagacgccatatctcaatgaagtttgatgtattcagtttgggtgttataatcatagagataatggcaggacaatcgggccgttctacaagtgctgaaatgtctccccaacaatttattgatactgtaagaattgttttttttttctcaaactttttatcattcactttctactttctgctttattattcactttggatttgcaaggtacaagagaaatggaaaaagaggatgcaggaaatttcgagtcatacatcatcacatgaggcagatagcctagaagtcaagacatgcatcgaaatagctgtaaggtgt

SEQ ID NO: 955 - DNA, 605 bp, Oryza sativa
acttattaaattttaatcaaataaaagtatttcttcatataccttttatatcaaccaataacaaacatccccaatttaatttcatcatctactttattttcttagccaattacaactttctcccaatcatctttaataacttttttattacccatgcttaacttacaaaatgtgtacattttactgctagccttctccgacattgcacatacaacatcacccactagattggacaggaagactcttcagatgcttttaatggtcaatttgcacattgaaacaacatgttagttcttttttttttttgcacattagcacttgtttaagcttcttccaatgtactactccctccattttctaatagataacgccgttgactttttctcacatgtttgaccattcgtcttatttaaaaaaattatgtaattataatttattttgttatgagttgttttatcactaatagtactttaagtgtgatttatactttatacatttgcataaaatttttgaataagacgaatggtcaaatatgtgagaaaaagtcaacagcgtcatctattaaaaaacggaggtagtagtattttaagcttcttccaatgttt

SEQ ID NO: 956 - DNA, 941 bp, Oryza sativa
atccgcgacttggacatccacaggaggtgtagaagggcggcgagatggggagcgtcgcatcctcgtctacggcgacggcagcacgccccagggcgcgctccaagctgcgggcgcgctcatacgtcacccgcccgtcgcccatgacccggagtctccagcccaacgttggctggacgatgtggccaaattggtcatgactgcacggcagcgcctagatgctggtgggcggtcctccgccaccaaggcctctggtgctgctaccaccggctccgcgtcgtcaagacggagggcgcggcgagcggcagccgctgttcgccattcggccgccactccttcgtcaacgcctccgacccgggaagatctgcgtggggaaccggatgctcgcatcagtatcgagcgccggcgtaatggccgacgtgctccccacgcaacggagggcgcctcctcgtccggagtgtcgcatcaccacggacgcggggatcagccctccgtgcccccggttggtggtgtcggctgtagagcctttgtggcgagccttcggaatgtccgttggcccccaaggttccggcccaccatcgccgaaaaatatgacgggagcgtcaaccccgccgagtttctccaggtctacacgaccgggatcgaggccgccgggggtgacgacagggtcatggcgaatttctttcccatggccctgaaaggacaggcgcggggttggctaatgaacttgccacccgcgtctgtccactcttgggaggatttgtgccaacagttcaccatgaacttctaaggcacatatccgcgcccaggtgaggaagcggacttgcacgcagtacagcgaagggatgatgagtcacttcgctcgtacattcagcggttctgtcaagtccgcaacaccataccatgcatccctgcacacgcggtgatttacgcgctcagggggg

SEQ ID NO: 957 - DNA, 629 bp, Oryza sativa
tattaaaggtttaccaaagtcagagagattcaattgcattcttgtggtggttgacaaattttctaagtttgctcatttcattcctttagcacaccctttcactacggcaacagtagcataagctttcatgagaaatgtatatcgtttacatggcatgccaaaggtaatcatctctgatcgtgacagaattttcactagtcagttctgggagtgtttattcactatggcgggtatcaagttacatatgagttcttcatatcacccgcaatctgatggacaaaccgaaagggttaatcaatgcttggaaattttcttacgttgttttattcatgccactcctcgcaaatgggctgcatggctgtacttggcagagttttggtactattcgtcttatcagtcgactgtgcacaaaacaccctttgaagtggtctatggttatcaacctagtcattttggtataagtatggaagattgtgtagttccggatctagctgaatggctctctgacagaaaattcatgcaccatttgattcaacaacatctgcatcgtgctcagcaacagatgaaattctatgctgacaaaaaccgcagttttagggagtttcagttacaagactgggtttatctca

SEQ ID NO: 958 - DNA, 523 bp, Oryza sativa
acagtagttcatcattttttgtggggacttaccccaccttttcataaaccgacggagacttgtatggtggccgtccgaatgaccttctgatgggacggcccatacctacctccacttccgccggaagcaggcgcgacgtggaatcgtggctgtctgctgacgacatgaccggtatcagaccagtcacgtcggtcattcttgtcaccacgtgtcagcttagcaacctacatgctcgcccttcttcacacaacatcttgcctgtaatggttaggatgaagcctggcatatatctgactaggactaacgtgccatctctgggaggtaacacgctagctccagctggggatgagcgcctagaagccctcgtcctgacgggatggggcgaggcgtgcgtcagatcgcctgtcgccacctaacccgcgatctgaccggtctgtgactggtcacagaccggataaacgagtgcactgcactgcgttacatgcggcgtgacacgctcagccaaaccgcaataaatgtggtt

SEQ ID NO: 959 - DNA, 1424 bp, Oryza sativa
gtcgactctagaggatccccatgcttcccagatagtatcaaggaagtgaaacttaccagatcatggcatctagacaatgggatgccagagtcctcacccatcatgactgcttaaataagcaccagctttctgttggtgaactcctcttccctacctctctccctaattcctgtttccccgcacatggttacatttcttccctgctttagaaacccctaatggtagtcagttagggaagtgaatttgagactgatctcccatatcctcaacagcagcacctgattaaagccttcttccctggcaatacttgttgtctcagtgattggctttctgtggagtgaacagcaggacttagaccaaacctctggcattttggtaataaaatgatgctgtgcaactttcaaggatagatcacaaaaaatgatgcaacttctacgtggatccctgaaactctggactgcatgtgagaagccccactctcctgaggctgccctgctgtggaggaagccaggtcacacagagggggcacatggaggcaatccagcctacagacctgctcaggtcctagctgacagccaacatcaccctctagccatgctgatgaacatgcctccagatgattcttccctctgagtcattccttgcctttgagtcttcccaaatgaggctctagaaaatgtggagcacagacaagattttctttctataccctatccaaaattccaatactaacaatctgtgaacttaataaaatggttgctttacatcaccacatttctgggtgttcaatgcaaaaatagtagctggcatattcagttttctcatatgtaaaataaggataattttacttacctgttgtccaataaagtctctataagtatgctaaattgcattacacagtaaagtttttttaaaaagtcaaatttaggccaagcgcggtggctcatacctgtaatcccagcactttgggaggctgaggcaggtggatcacaaggtcaggagatctagaccatcctggctaacatcgtgaaaccccgtctctactaaaagtacaaaaaattagccaggcatggttgtaggtgcctgtagtcccagctacttgggaggctgaggcaggagaatggtgtgaacctggaaggcggaacttgcagtgagccaagattgcacaactgcactgcagcctgggcaacagagcaagactccgtctcaaaaaaaaggcaaatttaaggcttgttctgtgtcatgaagaatatctttgaaacactttaaaggattttgcatgtatagttgtccctcagtatgtatgaagaattggttccaggtgtccactgaggttactgaagtttgcacatgctcaagtcccttgtatgaaataacactacagctggtcctctgtatctctgggttctgcatttgtgcgggta

SEQ ID NO: 960 - DNA, 592 bp, Oryza sativa
atcacaagccacggcgtcacgttgggttgggatatgcccgtatttttttttcattccgtctacccaagggtgatgccgccttcagtttgaactttgaaccgtatcgaagcactatcgaacaaaacagtcaacttctttgcgctcacatcacaaagccaaatcaaccaaaagaattttaaaaatggcagccttttcattcgctatccatgttcgacgcttctagggatcacgtattttattttatttagataatgatcacatattccatattttaattaatagcggaatcaaacaatttaagcgcatgtgattaatcaattaacagtaaatcaaagcgtggtttgcatctgctaagctcgtacgtaccttggcgaggccgagggcgtcgaggagcgcgacgaggtcgccgacgacgtggaaggcggagtaggactcgatctccggcggcgcgtcggtgtcgccgtacccgcggaggtcgggggcgaggcaacggaatccccggccggggaggtgctccatctggtgccgccacaagtaccagaactccgggaatccgtgcaggaacagcaccggcgcgccatcgccgccctcg

SEQ ID NO: 961 - DNA, 687 bp, Oryza sativa
ggcaactccagctggtaagcaacttctccgcgtcgagcagtgatacggaagggacccacataccgaggtgcgagcttcccttttgtctgaaacctgtgcacacctcgcaatggcgtgacccgaagatacacaaaatcatccactgcgaattccagatcacggcgacggttatctgcataacttttctgccgggactgtgccacctttagattttcccgaatgattctgactttagcttcggcttctcttaggatgtcagtcccgaacacttggctttccccaacttggtcccacaatagcggtgtccggcatttgcgcccgtacaacgcttcataaggtgccatttgtatgctggcttgatagctgttattgtaggagaactcggcataggggagactcttatcccaagtcttcccgaaatctaggacacatgcgcggagcatatcttctagaatctgattcagacgctcggtctgtccatctgtctgcgggtgatatgcggtgctgaaattcaaccgagtacccagctcttcttggagcttcttccaaaagtgagaggtgaattggcttcccctatcagacacgattttcttgggaacaccgtggagactcacgatcctagcgaagtagagctccgctagtttattccctccataggtggtcttcacaggaatgaatcgagccacc

SEQ ID NO: 962 - DNA, 713 bp, Oryza sativa
aaaaccacaacaaacttatccaagtattccatgaacactttattcattaagttcatgaagaaggcaggagcattggtcaagccgaacgacatcaccgtgaattcatatagtccatatcgcgtagtgaatgcggtcttcggaatatcttcttcacgaatacgtaattggtgatatccggaacgaagatcaatcttggagaatacagtggcacctttaagctgatcgaacaaatcatctatccggggaagagggtacttgtttttgatggtgacttcattgagagctctgtagtcaacgcacatccttttcgttttgtctttcttctctacaaaaatcacaggagcaccccatggggaagtactcggacgtatataccccttttctttcaattcttccaactgtttcttaacttcggctagctcatttgctgccatacggtagggtcgcttgtgcagaggagtggttcctggagcaagatctatccggaactcaatctctcgcttgggcggcataccaggtagttcttccggaaacacgtctccgaactctctgactatggggatttctgacagacctacctgatgcagttctgaacttctgacagaggttggaggtgcaaagaaaacaaccggttgttttggtcctcggtacagggtgacagtgcgtctcgcgcaatccacgactccttggaattgtgccagccaattcatccc

SEQ ID NO: 963 - DNA, 536 bp, Oryza sativa
atggccagagtggtttgtttgcatggtgttcctaagaagatagggcagatagaggtagccagtttacttcaaagttttggcagaaattacaatcagaattggatacccgtttgaatttcagtactgcttatcaccctcaaacagatggtcagacggaaagagtaaaccaaattttagaagatatgttgagagcctgagttttagattttggtggaagttgggataagaatttgccgtacgcggaattctcatataacaatagttatcaagctagtttgcaaatgtcttcgaatgaagcattatatggtcggaagtgccgtacgccgcttctttgggatcaaaccggtgaacgtcaagtttttgggacagacatattgcgagaggcggaagaaaaagtgaagattatccaagaaaggttgcgcgttgctcagtcgcgtcagaagagctatgccgacaatcgtcgcagagatttggcttttaaagaaggagattatgtataccttcgggttacgccgttaagaggagttcatcgtttc

SEQ ID NO: 964 - DNA, 2774 bp, Oryza sativa
aatagattaaaacttcggaaaatcataactaaataaccgtagatccgttttaggtggttcaagtttctaaatttttctaaaatcaagatctacatgttaaaaatatccacatgtactgtttatgcttgtttttgtactgttttgttgatttttgtttatttgcttagtttccgacgttccggaggagagcgtttccgttgaggaaggttccgaagcgtttgcggaagcccaaggcaagtcacacagatcccaaacaaccctttgagcatgttgaacccatttaaagctattattttatttcaactatgcattattttcgaatgtcatcgggtggtgaacctttcccagttaattaatggccggagatgactttattttcctatgggttataatttgattagcatgaaccttatatattggattggttcagctaaatgccttatgtaagtttgcttatccatgcctagaaacatagctaactaaaggggttaattataaactatattatgtaattattaattagggttatattcaatggtagctcacgatggtaaatcgtgtgatgataattaattgataattaaaacctgattaaggtgggttgtgagcatatggttttgatggttgtgctcatgacaattaaggaccggttcgcgagctactgttgtgaaacatttatcgtgccaaccacaagccagcgtgggcaacggctttatcttttgtatagcgtgattcattatggtgcgccagactgagaagtggcgagaagtccatgggggtcgctggggagtccatgccttgtttataagggggtgattatgatccaggtacggtgcactgtggtgaattgtgttatgcgaggggtattgtcacgactcctttccgaggtaccgtggtggtactgaggcacatggtgacatgatgtggggttgtgtcttgtgggtacggtggtacacctctgatcagagtttaaactattcgaatagccgtacccgcggttatgggtgagttgagcaatgtttttcgtgattagtctcacactactcttcaatggtaataatgtggtaattaatttaattcctggtttggaatggctaattcctggtttggaggtttaatttgttcaactggggttggttgtacaaatgtggttgggcctatgcaacacgggtgtgttgtatggtgtttatttaatattgattaattatacaactgttttactattctcttaaatatttattaaatgctgtttgctgcaaatgaactgtattatgccatcctttgttatcctgtgcacttgcatatttgctgtgtggcttgttgagtatgttatatgctcattcttgcaatattcattcatcagaagaggagtacctcagtgaaggtgatgatctggaggattaggcttgttcttggttaagttgcctgtggagtggagtcgccatagctgttccgtagtttgttttagttttgttttccgctgcgtagaatgttatttgttttgagaggaactatctacctctgtaataattttaatttgcgaatatttgatagttaattatttgtactctattatcaaattgtcattgtgtgcctcggttgattcctggacgagggttaacacacatgtaagcgtttggaattttggatagaaattccgggcgtgacaccgtcaacttctcctggatcgtcccgtctaatcttgtatcgtagtgctttgcaaacagggcatgcttctaggttctcatactcctcaccgtgatataggatacaatcgttcggacatgcgtgaatcttatgaacttccagtcctaacgggcagactatcttcttagcctcgtacgttgtctcgggcaatttgtttccccccggaagaatgttcttgacgagtttcaataaatcgccaaatgccttgtcactaaccccattttttgccttccattgcaacaactccagagtggtatccaactttttgtgcccctgctcgcaacctgggtacaacgaagttctgtggtcctccaacatcttgtccaatttatgggcctccttttcactttcgcagtcctccctggcgtcctgcaacatctgaccaagatcatccgcaacgtcgttaccatcagcagctatttcctcctcgcccgtttgatttccttcaaatccaacatactgagcaaagtccggaatattgtcgtcttccacttcatcttcttccatttcaacaccttgctctccgtgggatgtccaacaattatagcttggcatgaaccccgactcaaacaagtggaaatgaatagtcctggatgcagaatactccttctgattcttacacttattgcatggacaacaaataaaacccctttgcctgttagcttcggccactctcaaaaaatagtgcacgccgtcaataaactctttggaacgccggtcagcgtacatccattgccgatccatctacatgagtcaaaaaaaccgcacacaaataattattcttacaataatgacagtcatacaataattataagatatctttattcatacaaaaatcataaaatattacaccaaataattcttaaaaactatttgtaaagttttaaactaattttaatgtgttttacttcttttaattttcattttagtttgttttctattatttaatattaactttcactagagttttccttctcaactattttataaaaccatgtttagcaaatgaactaaatttctatatattctttcttccccacacacattttctctctcatcaacttaca

SEQ ID NO: 965 - DNA, 4628 bp, Oryza sativa
atacttcttaacagcatatgtatctaagaaacttaaaacttctttaaatttcagtaagcatgtgcattcaaacttataaaatcttgttcaattataatataaaatcagatttttttttaaaaaaaagacgatcagacaagcgcatgcttatatgcttgattcgattttacaactttcacaaacaacagagagacaaccagagggtttctaatcagcaagtggtgcaaataagattgtacatagtgcaaacaataggggcgttaattttatgtcatgaaagtaatcaatgaatcaacttctctatcgacagggagatacagttaagaaaatcagaagataacacctcttctcaaccaatcataacattgcatggcccacctaccttcacttttcctccaaccataacactccctcatttaattgtattaattttcttaataaccgtgtccaacttaattaattaacctgaatgttacaaactatcgataaattaaaacaactaggaaggtagcccgcgcgatgcgcgggtatatgtattagtttgttaaaaatcggtctaacaaattaatttcaaattaaaagtcagatgtttttcatccgactttttctttcagtgagccaagtcaaatgatgtggtgtttttttttcaatttgagttagaatcacgcgtgctctctctcatgaacagaacatatacgtggagtatgtgcggctgaatcatggatggcatcatcaagcaatggtggacggaatcatcttgaagtttttaagtaggttaagattaagattagatctaatgattgaaaatattggaaaagcggtggttagatttttttaatataatttctgtgaattttacacgtgatcataattaaacgtgattataattacatgtcggtttaggggcattggtatgattgccacgtgatgattttaggggcatttaaaggatctaaatttaatatttgtttaatatggggcttaaaaatttgatcttaaacatttatattagaagtttgagctatgtatatggatctcgaattatgtatttaattataaatgacacaataattcaaaaaattgagaaaaaatgtaacttgatatttataatcatttagaaatctgattattagtttttgatagattgagtgttaacttaaaaaatagcaattagcttaagaaataggagagaagaggagagttaggagggtggagggagaactcaactacgtaggtgcgcacgtatggaggtggcggtgaggatgcaggtattagattttctttttagatgaagatctaatggttaagattaatgggtccatcaatttttaaaagaataatcgctaaacatttattagaatttttgtgattttttattaatctattagctagaaaattaaaagaaggaaggaaggaaagaagcaggatgtacgtaccgtgagaggaggcccgggaggaagggggcagtggagatgggttttggatttttttttaaagatagatctaatggtgtataatatttggtccatcgtattaagtgaaaatcgagggccagatgttttttttcctcataattttttttatttctctaatttattaaagcgtcatgtgaaagttaggagtgtttatagaaaatttaatggactttagctaaataataggaaggggaagaggagaggagaaccctgagcttttcggagaggaagggtcgatcgatttaaataaaaccgatgatcatatgtatttttttccctcaaaaataggtttttttaaaaaaaaattattagatgtgaaatgtgaagacatagaggtgttgtaatggacatctcatagatgatgatacgatatatgttgtcaatttttatataacgtttcattgctgtttagttatcacggaaaggatatggattcatgtctaaaattatatttatcatatatcaagaaaggcctatatggatcaaactaaaaactgaatatatttaaaaatataatcatttagctatctattatttatatataatcatttgtactatctgacgattggccaccagctatgcctgtaacaaaggaactcacatcccgtaactatatctcaaacggcttttttttgacccattagatatgagatcattgcagatgacccatcggatgcctagttctatataaaaccatattaaatagagtgaatataggacttagctcattgattaatttaattaaaaaatacaatcattcaagcgtattgtaaaatcaatgtatatattgtccgtaaaaaaaaaatattagtgcttgaacgttgcacagacagctcgatgctccatgcaaggaaagatataactatttacaataataagttatggtgcatatctcataataactaccttaattagaaaaagaagaaaaaataaagagaaaatgaggggaggataggcgcatgtacatataggtaagagggattttattttgatatgatgttttaaattactggtgactattctaaatgaaaatcaatagtttgatatttttttctcataatttctataatttattagagcgtcacatggcggctttagagcatttgtaggagtgccacgtagcggcttagaagcgtttatagaaagtttaatcgacttttagtatacaatagatagatagattttttttcaatgatactacgtaggtatgcttttttttcccctttactttatcgcttttatcacataagtctgtgcttatgtttttcttctcgtccgatgaacagtaggtaattaagcttcatcgtttttctttcaaatgtacgtaacgtacagaatacttttttttcccttttccggcccacaggaggaaagcggaggaaagcattaccttttttaaataatacattaaatctaatggtctaaaatacagggttcaccaatttaagtgaaaatcgatggtgagattaaacagtgccatgtggcgatctaggagtgtttctaggaacgccacgtggcggcttaggagcgtttgtagggagtttaatggacttttagtatataatagtatataatagatagatagatagatagattggaattctcatcacatatgcagagttaataaaaaaaattatttctacatgcttccactgtatagtaaatagattttaaattaaatttattcagatgctatgtggaaagaaatttacaaattgtatactaatcaagttatgtgaagaccttacgatttacaatgtgaacatgctacaatgagcacaccactgttggctgtcagatgaacaacattggtataaaatttgtactttggaaatggtttcattggccttgaatgatctgattgggcaagcaaatgcctcaactctttttgctatagctaatcctatcttgccaacccgaagtgtaaaatccaaggtgtttttaattattattctgtgatgaacaattgggtattggagattattggttttgttatttggaatttattcacgaagtggttttggagatgattggaatttacaggtgaatctacaggatattgctattatttcatgtgaccggtcagaccgggcagtgtgtgccggtcagaccggcggtgatcgcgcggtcggactggccagcccgcggtcttaccggccgacgctgtgtcggtttcggttttgggttgtttgtttagatatctgtgattatttcatgattatgacttctagatggatactatatgtatgtaatactgttgtttgctactaatgagtcaagttggagatagcttctcggaatatggtttctttgtttatttcatgtgtaggtgactcgatgtctcgggagggtatttgcggtgatggaccgggagtcggcttggggataagacgacgtccatggtggtcagagatcatacgggatactaaggctagagttgatgcacatggttaatggagattccatatggcatacgatggaggtattgtgtgcgtatgggatgcggagtcaaatttggaaggagtccaaatttggtacgattggttatgtaaagtttctttcttgtactagagggtttcctaaggtgtttaggactcttagtatgagtttggtttgtggctttaggcttcctacatcgggtataaatatagggggagcgtgaggcttcccggtatcgcttttgagagcaattgagttgagttttgagtttcgagtttagtcgaaatttttgtaaggagtgctgttggtgcactttgtaaacacagagagaatcaataaagtcgtcatccacttgaagagttcttcgatctgtgtttcaccgggtttcggcggtgtaaccggcgatatactggcagtcagactggcggcaagcggcggtcagaacggcggcatacgggcggtccgaccggcggcggtgacaggcgcggcaagcatctcggtggttcgaccgatcgatctacatcactcagaccggcggcatccactcggtcagaccggcagattaatctcggtcagaccgcgatccgttgaattcgagggtaacttttatttccgttaaaagttttcggtttttgggtataccaaccattcacccccctctggttgacttagttattgtgattcgatcctacaagtggtatcagagccttgttt

SEQ ID NO: 966 - DNA, 4216 bp, Oryza sativa
  unsure (1)..(4216): unsure at all n locations
cgatttagagcttctttggatttttatcgatctatagtttttgccatggctactcctgttaggttttcaactaagcctcatattttcgatggaacggatttttctcattggtgtagtaggatgcaatcttacattatggctgaagatcatgatatttggagaaaagtttctcatacttatgtgattcctgaagctattaatgctgctgctgaaaaaactgcttttgaacaaaattgcaaagctcgcaatattcttttgagtggtatttctcgttcggattatgatcgtgttgcgcattttcgaactgctcatgaaatttagaatgctttgagtaactttcatcaaggaacaaataacattaaagaacttcgtcgtgatattttcaaaaaggagtatattaaatttgagatgaaacctagagaagctttggatgactatctttctaggtttaataaaatttttagtgatcttagatctgttgattcttctcatgatgctaattatccacaatctgagatttctcgtcattttttgaatggtcttaatatgtctatttgggagatgaaagttacatctattcaggagtctgttgacatgtctactttgactttggattcactttatacaaaattgaaaacacatgagatgaatgttccttctcggaaagttgattttaagtcaagtgctttggtttcttcttcttcttctttggatgttgatgcctcttcatctaagccttcttttcttgctgtttttaatgccacatccgataatcaactcgaacaaatcgaggaggaggatttggcttttgttgctaacagaattgctcgagctatgaataatgccaagaataggaaaagaggtggtccaaatcgttgctttgaatgtggttcaattgatcatcttcgttcgcattgtcctaagcttgggagaggcaaaagagaagacaaagatggtgagaagaccaacaacaacaagccaaagggttcatcccaagggaggaagctggagaatctcaggaaggcttttcaacaagtttgcgccgccttcgagccactaagtgatgtagatggtgaaagtggagatgatgataagagaaagaacatctccgatgtttgcttcatggcacgtgttgaatctgacacagagtattaagataatgaggtagtgcttttgaggaagctattaatattttgagtgaaaaatataagaagtgtgagtagatgtatagaaaacaggaatttatcattgaatctcttaaatctgaaattgctagattaaaatatcttattcctaatgatgatgattgctcaaattgtgaggttttaatgaatgagatttcaaaaattagagatgttaatgctgcacatgatttaaatctgctggtatcatgtctaccttgaatgcatcttcttcaaaatccaatattgtgcatgcaaaacctcctgttgttgcttgtgttgctaaatcttctaatgctaccaatgtgtctaatcatcgtgaaaaatatacttgttctttttgtggcaaagatggacatattgttggtttttgtttcagattagctcataaatagaaaaaggagagagagagattgcttttacaaaatcaaagtggcaaaaattgggttttccctcgaggaaaccggttagaccgcagtgggtcccgcggtcagaccggctactgagcatcggtcagaacgggcaccggtcagaccggcggtacagaggcggtcagaccggcccccggtcagaccggccattgtacctcggtcagaccggcctcggaggaatttttctgaaaattctaaaattgattttgcacgtggatatatgcctattggatcttctggtcgtgtgtctcagtactggattcctaaatttttattatgcttgtgtgtaggctttggtgtcaaggaaggagaacgtgtggatcgtggattctggttgttcgtggcacatgaccggtgataaaaattggttctcctcactcaaaaaggcatccaagactgaatcgattatttttggtgatgcttctgcaagtgccgttctcgctacaggtttggttaaggtaaatgaaaattttgaattgaagaatgtagctttggttgaggacttaaagtacaattttctttcggtttcacaaattgttgatgaaaattntgaggttcactttaagaaaactggaagtaaagtttttgattcgtatggtgattctgtgttgaatatttctcgcttgctgattttgaaaatcctgtttcacctgtgataacatgtttggttgctaagtttgataaagatgagatgttttggcatcgtagacttggatatgttggttttgatcatctcactaggttaagtggtttggatcttgttcgtggtttgcctaaacttaagaaagatcttgatttggtttgtacaccgtgtcgtcatgctaagatggtttcttcttcacatgctcctattgtttctgtgatgacggatgcaccgggacagctattacacatggacactgttggtccagctagagtgcaatctgttggaggaaagtggtatgtgttggttattgttgacgatttttctcgatattcttgggttttctttatggcaactaaggacgaagtttttcaacactttcgtggtttgtttctgcaattggatcttgaatttcctggttctttgaaaagaattcgaagtgataatggtggtgagtttaaaaatgcctcatttgaacaattttgcaacgaaagaggtattgaacatgaattttcttctcctcgtgtttctcaacaaaacggtgttgttgaaaggaaaaatcgtgttttggttgagatggctagaacaatgttggatgaatataaaactcctagaaaattttgggctgaggctattaacactgcttgttatatttcaaatcgagttttcttgagatctaaacttggaaaaacttcttatgaacttcgatttggacatcaacccaaagtttcacatttgcgtgtttttggttgtaagtgctttgtcttgaaatctggaaatttggataagtttgaggcacgttctaccgatggattgtttcttggttaccccgcacatacttgttgctatcgtgtacttattttggaaactaacaaaatcgttgagacttgcgaagtttcttttaatgaggctagtccaggtactagacccgatattgcaggtacactatcacaggttcagggggaggatggtcgtatttttgaagacgagagcgacgacaacgacgacgacgaggtcggttcggccggtcagaccggcacaggaggtgcggttagaccggccagggtcgtcggctgagggttctgttaatgctgttcgagatggtcctctggagactacaacttcgaccagtactgatacagaacgtggatcaacttcaaaagtcgctgctcctttgcacattcaacgacgacatccgccggaacaaattattggtaatatagattttgctgagactatgcgcagggaatttgagatgagcatgatgggtgagttatcgtactttttgggattgcaaattaagcaaatacctcaaggtacttttgtgcatcaaacgaagtatacgaaggatcttttgagacggttcaagatggagaattgtaagccaatttcaacaccaattggttctacagctgtgttggatcctgatgaagatggtgaagctgttgatcaaaaagagtatagaagtatgattggatctttgttgtatctaactgcttctaggccagacatacaatttgctgtgtgtttgtgtgcacgctttcaagcttctcctcgtgcttcacatcgtcaagcggtcaagcgaataatgaggtatttgaatcatacacttgagtttggaatttggtattttacttcatcttctatatgcttaagtggatattccgatgctgattttggaggttgtagaattgataggaaaagtactagtggaacatgtcattttcttggtacattattgattgcatggtcttctaggaaacaatctagtgttgctcaatcaactgctgaatctgaatatgttgctgctgctagttgttgttcatagattctttggcttttatctactttgaaagattatggtcttacttttgagaaagtacctctcttttgtgataatactagtgcgatcaatatttctagaaatctcgttccacactcacgcacaaagcacagtgata

SEQ ID NO: 967 - DNA, 3988 bp, Oryza sativa
gatctttactcccggttgttctcaacaaccgggagtaaatatcttttcccgctatttcgaaattctttttaaacccggttagggttaagaaccgggactaaagattatagcactgcatatgattttcgcttacatatgtgtttataaaatagaagttaatgcattaacattatttaaagtacaaagattgatgacaattacttcgaaaaattatttttgtctgtaataaattaagtggataaatcgtaataagcaaatatatgacttataattaataaaaattccaatatatatatatattcttagcatatatatgaatgatattattatattggtaaaaactctaattaagatattaatgtacatactgcatgatttaaaattaataaaaattgtaatcatcatatgtacttagcgttggaattatattaaattaaatgctaacaactctaattaacatatgtaaatgccacatgcatgatttaaaccttttaaaaattcgaatagtcatatataagtagcatatgaaagatagtaaattaaattgtgaaaaactctaatatatgaatgatagttttaaaaatatattaaatttaatacttttaaaaattctccagtcaattataattagcatatgaatgatagtaaattaaatgttaaaaactctaattaacatatgaaattgccacttgcgtgatttaaaacttttaaaaatcctctagtcaattataattagcatatgaatgctagtaaattaaatgttaaaaactctaattaacatacatatgaaattgccacctgtgtgatttaaaacttttaaaaattgtaagtatcacatataactaacatatacatgatttaaacttgttgaaacctctaataatcgtgcgtaattaacatatgccatacatcaattgatttatatggataatcaatacatccaaaatagtttacatcgtgtacacaataattacggcattacatcggcggtgacggttgaccgcacgtactttctcctcactattgttccctccttgtgatcgctgcgtgagtaaggggtgtcttcatttgataggaggatgctagggtcaatcgtcaccgtgaaagggggttgcccatccaactgatcgtaatcctcgtcagtcttgtcctcaactccgacgatttttcttttgcctgggagaaccacttgacgcttaggctcatcaggccctctgcccttctttcctttgctagacatgtccttcacgaaaaagacttgcgttacatcattggcaaggacaaaaggttcgtccgagtatccaaccttgttaaggtcaacagttgtcatcccactgtcatcaatcattacgcctccaccagtcaacctaacccattggcaccggaacagaggaaccttgagaggaccatagtcaagttcccatatgtcctcgatggcaccgtaatatgtggcagttgttccatcgtgtcccatggcatcgacacgaacagcgctgttttggttcgtgctcttcatgtcctgggctctcgtgtagaatgtgtacccattgatctcatatccctagaatgtcgcgatagacccagacggtcccctcgccaggaaggcaagtgttggttgatcgactcgttacccatgagatgttgtcgtagccacgcggggaaagtatcaatgtgatgccgtgtaatccatgcaacggacttaccgatgttcctggcgcgaactagagccaagtgctcctcgatgtaaggagctaccaatgaagagtgttgcagaacagtgaaatgggctttacggaataaattgttgtctaccgtccttattgctttccttccgagagttccctttccccgtagtctcccttcatggcgtgattcaggtaccccgattgggcgaaggtcttcgataaattctacgcaaaattcgatgacctcctctgttccataacccttggcgatgcttgcctctggacgagcacggttacgaacatacttcttcagaacgcccatgtacctctcgaaaggaaacatgttgtgtaggtacataggcccgagaatacggatctctttcacaaggtgacaaagcagatgcgtcattatattgaaaaatgaaggtggaaatatcaactcaaaactgacgagacattgcaccacttcattctgaagggcttctaatctatccggatcgatgaccttctgcgaaattgtgttcatgaatgcacatagctttgttattgttgcccggacattgtctggaaggataccccttattacaactggtagcagttgtgtcatcaacacgtgacagtcatgagactttaggtttatgaacttcttctccttcgtgcttattattcgcttgatattcgtggagtatccagacggtacctttatgctctccaagcattcaaacatactttccttctctgccttgctaagagtgtagctggctggactcaagtaatggcttcctttctcctttggttccgggtgaaggtcgccgcgttgttccatatgcttcagatcattacgtgcttccagtgtatctttcgactttccgtatacacctaggaagccaagaaggtttacgcaaaggttcttagtgaggtgcatcacgttgattgcgtggcgtacgtccaagaattcccaatatggtaactcccaaaatatagagttctttttccacatcgccgcgtgaccatcttcgctctctatatgctggcttccaggcccctttccgaacactactttaagatctttaaccatagcaaacactgctttcccgctgcgatgtttaggattcgtacggtggtcggccttatgttcgaagtgcttgcctttcttccgtaccgggtggtttgctgcaaggaatcgacgatgacccatgtatacaaccttcctacagtgcttaagatacgtactttctgtttcatccatacagtgagtgcaagccttgtaccccttgttggactgtccggataggttgctaagtgcaggccaatcgttgatggttacgaacagcagcgctcgtaggttaaactcctcctgtttgtcctcgtcccacacggggacaccttccttcttccacaactgtttaagatcttcgaccagtggtcttaggtacacgtcgatgtcgttaccaggttgcttggggccttgaataataatcggcatcattatgtacttcctcttcatgcatagccaaggggggaggttgtagatacacatcgtaacgggccaagtgctatggccgctgctcatctctccaaaaggattcatgccatccgtactcaaaccaaaccgtatgtttcgtgcgtcctttccaaattctttaaattttctgtcgatgtttcgccactgcgaaccatcggcggggtgtctcagcatcccgtcctgttgacgctcttcagcgtgccatcgcaacattctagcattccccttgttcctgaacaaacgccttagccgtggtattatagggaaataccacatcaccttagcaagaattctcttctttgttagctgcccgtcaacttctcctggatcgtcccgtctaatcttgtatcgtagtgctttgcaaacagggcatgcttctaggttctcatactcctcaccgcgatataggatacaatcgttcggacatgcgtgaatcttatgaacttccagtcctaacgggcagactatcttcttagcctcgtacgttgtctcgggcaatttgtttccccccggaagaatgttcttgacgagtttcaataaatcgccaaatgccttgtcactaaccccattttttgccttccattgcaacaactccatagtggtatccaactttttgtgcccctgctcgcaacctgggtacaacgaagttctgcggtcctccaacatcttgtccaatttatgggcctacttttaactttcgcagtcttccctggcgtgctgcaacatctgaccaagatcatccgcaacgtcgttaccatcagcagctatttcctcctcg

SEQ ID NO: 968 - DNA, 758 bp, Oryza sativa
cggttatggtacgattctagattggtttctgcttggcggacgaatttaaattcgatagtagatgaataagcattgatctcggcaccaaagtcgatagtgcaacatcctgtgccgttgcaatgctgcataggagacaccatacccgtgctctctcctttaggacaggttgctgtgcagttgggagttgctttgttgattgatggacgatttaaccaataaacatcaaagtcacagccggagaaacgtagtccccacagcgtcaggtaaaaagcatcaagagaatgttcaagcaattttggagataacgaccagctcacaacggatgcatttctcatggagatggtatgagaaaagcgggtgctaacactgttatctgtgtccataaactctgtagaaacgatgttaatactaccagcaatttgggtgataccatcgtggaagaggagtctcggagggcttgtggtggagtcgcaggtgagctcgaagtcgggacttcggaagcagccggagccgatgccgaaggggtacacgaaggtcagatcgccgcatgagctctggcaaccggcgagggtggccgttgatggaaccacccggccatgcccttcttgccttcttggcgcagccaaatccttcgccgatgtcagtagcgtcgtcgtcgccagcaggaagacaagcaaaagttgcagggaattcgcggcgtgtggtgagcggatcatctcgctcttgcctcatgcctcttggggtgtttggagtagaat

SEQ ID NO: 969 - DNA, 607 bp, Oryza sativa
aaacctacccccttaaacagaatctcgtcctcgagattcggaagaactggcgaacagatgcggatgagctgacttcaattcatcttctcgttcccaagttgattcttcttccgagtgattactccattgaactttgcaaaaacggataactcgattcctggttcttctctcatttgtttccaagatacggattggtttctcaacataggtcaaatcctcttggacttctatctgttcaagattagcttcttcggtaggtacccttaaacacttcttcaactgcgacacatggaacacattatggactcctgccaaagattgaggtaactccaactgataagcaacctctcctcttctactgacaatcttataaggtcccacaaaacgcggtgccaattttcctttggtgtggaaacgatgaacccctcgaagaggcgtgacacgaagatacacataatcttcttcttcaaaactcaaatctctacggcgattgtcggcataactcttatgtcgagactgagccacacgtaatctttcttggatgatctttaccttttcttctgcttcccttaggatatccgtcccgaaaacctgacgttctcccgtt

SEQ ID NO: 970 - DNA, 705 bp, Oryza sativa
ttaaataatgctgatgtatattatttttagagaaattatggtaccgtagtacggataatccagactaaaatgaacacgctcttacacccatataagcaagcaagcaagcaagcagagagcaaaacagagcagagcaggttgtgagccagcactgcatcagcatgatgagcagtcgtcttctcaaacgcgcctgcctcctcctcctcgtctcgtcatggctatgctccctctccgacgccaagaggaagacgccaccctggccgccgccgccgccctcctcctttggcctccccgtccgggcggtgtgcctcggtggctggctcgtcacggagggctggatcctcccctccctcttggacgccatccctaacaaggacctcctggtatggccgtctcgccgccgccgccgccgccatgtccacgaatgagtccgaccatgacctctgtttcgttctttggtggtgccaccgcgccgctccggcataacgccgaacacattgattgcaggacggcgcgcagctgcagctcaagaccgtggcggcgggcgcgtacctcaccgccgccgaccagggcggcgccgcggcggtcgtcgccaaccggacgcagaaggcaccctccgcctcggagaccttcaaggttagcctcgccaccgccgccgccgccgccgccgctggctcgccggagtacggcgtgtgagtgactttt

SEQ ID NO: 971 - DNA, 2392 bp, Oryza sativa
attccagaaatattagaggatgagtggttcaaaaagggctacaaacgcccagagtttgacgaaaaatatgacacaacattggatgatgtttatgctgtcttcaatgactctgaagtgagtaaactgcaatatgcacttgaatttctgtttcacatgacatgaagataaaagcatgccagttgctaaatggtttgaccactgtgatttgacctcctccaggagcaccatgtgacagaaaagaaagaagaaccagaagctctcaatgcatttgaactgatttcaatgtcagcaggcctcaatcttgggaatttgtttgattcagagcaggtacgtgatctccctatttaatcaatattgaccaacaaccttttgaacctattctccctgtattatttttatgaacgaacctgtaacttaaagttaagcgtcattgtttttggttcaacttatacctccctaaatcaagctggaaacatgtaaactggctcactggcactttgtcaatttactcaatcatatggttggagaatgctgcatgtcacaagtcccagaatatatgtagtagttcattggtcagaatgtcttttgatttttgcacctcataattctgccataactttgttatagttttgcaacttattctgctgtactttaattttgttcacactatttcaggaattcaaaagagaaacaaggttcacatcaaaatgtccaccaaaagaaattgtccgcaagattgaggaagccgcaaaacctctaggatttgatgttcagaagaaaaattacaaggtatgctccccttgcctaacaactatctgcatgaatatccgttttaaagtaatgggttctagggacaatttatagcaaattcaaatatatattttctacgtgctgaatttttttttattgattgaccagttaaggttggaaaaggtaaaagcagggagaaaaggaaatctcaatgttgctactgaggtaatatgaagaactgctatactgcaatctggtttgtgtaagcttcttcaatctaacatttattgtgcactattattcagatactgcaggttgcaccctctcttcatatggttgaagtacgaaaagcaaaaggcgacaccctcgaatttcataaggtagatcatgccaattaaaagttgatgctcatgaattatcattggaaaattgagtcagtgctttgatgattggatcaactactcacagaattatgactatgttttttttttcttttgcaacatttggttgaatggcttgtactgaatcacttcaaacttgtaatgtgttgcagttctacaagaacctctccagaaccttaaaggatgttgtttggaaatcagatgatcttcaaaatcaactttcctagagtaacttgggagaggaggaatgggtgaactattttagcatcccattcttttgaatcagcattcccatttctagaggctggaaaagcagaaagcatgttcattgcatctgtaattagatgtgagtggccctgtaaactatgtttggtctccactagtgttgtaaatgctgctcttatttgtcagagaacccttgtgatagctcaagtgaagctgatcactcaatgggttttgtgtgtcaagttttgtatgtaaatcagaatcttgtgaggaacaagtatattaattggccagcattattcattttcatttacactgtgtagttgtttgattttcttgtttgcatagccccagaacaagtgtaaccagaaattgaggtgacaaaaaaaaaactctgaactatacaatcctcatcagaacagttgcaaacctgaaactacatctttttcagaggatggtacatgaggaattcgggccgcagcagccggatttcttgtggagttacttgaccgatggcctccacttccatgtccctccatcatattctgccttcgcctgcatatgatagcaccaaagttgttcagataaatatgattatctgatgacgaatgcactacattatgtacagttcagcagaagcaacatttgcagattaaataggaagaagaaatataatgataatctagaaaagatttgtaattccagtgctagtaataatctacatggagaaaagaaaaagaaaaagaaatcaagaaagcagaaaagaaatgaatgggaggaaggaagaagagagagactgactttgccatcatgaccttgaggaactcgttgtagttgatctggccgtcgccgtcggagtcggcctcgtggagcatgtcggcgagctcgtcgtcggagagggggtcgctgaggttggccatgacgtggcggagctcgtcgggggtgatgaagccgttctggtccttgtcgaagacgcggaaggcgtcgcggatgtcgtcctcggcgccggtgtcgcg

SEQ ID NO: 972 - DNA, 20466 bp, Oryza sativa
atacaaacttcaatacaacggcagtaaaagaacttgtcgtatttgctctccagaggaggaacatcaagtattgtgatatttatgtaacatggtgcggaaaagttctgaaaggagatgagatcttgagctccatacctatccacacgaatacgcatattcatgtgacacccagactgaggggtggagagtacgtaccgcgtaacttatctatgtatatgtattttatcacttcctactttagaggtgtaacaagtgttcatttgcaggttaattccaatggaatatgagcgtatggatgaacttattgaccgtgcggtccgtgacaataataatgaccttttctattatgtgaaccttcccccagaattgataaacccttataaggatacatgggtaacttttctaagtgatttctcgagatatatcatacaccaactattggtatgtgtttcccgtgatggtcaccagcggaacattacttggtatggtacttttgatctccgggacatactgattcaagcgggcatgttaggatcagcccccatatcgtcgaaaatacatacacccctattggtggtagacttgattatcttaagctagtttcaattctaaaggataaattcgtcgataatttacaaggttcttcctccccttgccatctgaacaatttactttctgtattgtgcactacttcccatgaaacttatggaagatccgatctattcattacattttttataaaccatccgtgcttgttatcatgtggagaaagagttgcacgataccttcaatatgatcatatgattacaaatcttgtgcaacgcgatcttcgcaaatttaagcaatatttgaatgatacttttggagatcctccttcttggatcgctgatatcagctgggttcctgacatgtggaagacatacaattatagtcctaataacaactcaacgttatggaccccacgatatactttggatctaaacagttgctcacattttgccaggaatttcttgaaccatttcggtcgtgaggttagtctttttttaattattattttaacttttctatatgaaccggtttaggcttttgtttgagcttagacttttaagcaactttttggctcatgtgatttatacaccaatattataggctcttatatctgccagttgtaaaaccaacactgatgaccatcattaattggtgctgctttgtaggtgacggctgccaatctagcacttatgctaggttagcagccaacacttagggtttatttactagtgcttttaagggtcctatcttcacttcacataaactaaaaattactataacttagcttttagcttaacaatataagagtagcttatggtttattggttttaaaaaagccaaatgaaaaaaaaaactaaaaaactgtttgtttgccttagattttttagattataagcaggcgtaagcctataaataaaaaaaacttatgacatatacaatgataattaataacgattcctagtcttgctaattaggaatatttgatgatatggaaggaagagaagtgaggagaggccaacgtcgttgctacagttaataattgcttaggaacgacttttaacctctatagaatgaaaactttactgcatgtgggtgtgaacaaggaatgaatagtaataaaaaaagttttattaatactttagagcctttgtagtctccaccattataaagacatagtttttaaataaatatgcattatctaagagtttatatggactctacctttaaacatacccatactgttctattcttgcataggtttctttgcaggcagctgaggctgccgtttctcagaatctagagtttctgcttccaaccatcatgatgctaatgcctgtgtacagtggacctcatcattggaacaatgacttcatggagatgtaagggaaagtgatcatctatttttccttgtttatatattatcttgattcttgagtactagacaatttcttgttgtagattgttaaacacaaactccgacagaagtaacgggcaaatctcctaatatcaagggataagaggccacgacaaattgtttatcagagcgagtacaataacaggctacaaattagctatatgcacatgtggagaagataagataagagagagaataaaagcggtctatagatttggagccaactgtaacatagactccaaagcgttatgtgtggtatgagaggtgggaccatattttaattgtgtagtatatatttatatataactattgtttagatgagttattaaatgggctatatatgatttgggtaatagttggccatactattaaacttgctctcaggtgcaacgagacacatgctttagtaattaatcgtttaattgcaagtacagtgatgtgagttaagcagggatgcagtcagcatcaatatgggttcattgggcatttttttctgtattgataatgcatagtgcccatattaccaaatttattacgctttgatacttgtggtgttaacagcacgtaccattttgctgctatcttgctttctgaggtggaagaggacggtaggtacaacagcattaaagagaaggccacatcatatggatctggaataaaaactttccggacaatttgtgcaagctttattgtatttttaccccccccctccgttttgtaaaaaataaatctattacacaacgtaatactcccttcgtttcatattataagtcgttttaattctttccctagtcaaacttctttacatttgaataagtttataaaaaaatatagtagcatttttaacacaaaacaaacatatattatcaaaatatattaaatgctagatttagtgaaactaatttgatttttaaaatattgctaattttgtttaaaatattgctaatgttcttattatattttccatatctatttcacctgactaacaaacacacattgcgggagaagtgctctttagtccctgtttgtaacctctttagtcccgggttgcaaatgggatgcccaatccaggactaaagattcctggcccctgacaagaatataaccgggatagttggtcaccaatcgggactaaaaattataaagtcccattgtgctaatgtgatttttgaatgacccgacaaagatcacttctacagtagtgaaaaggattttctagtggaatcttgtttgaataatttgttaacatcgtggaaatattgctttgccctctctctaaatggaagtattgctttccagcaacgtatcccgtttgcataaactatgcgtacaattttgaaggtacctttttcataccaaaggtttcatggagtccttttagacgaatccttcgtgcccctttttggtttttttttcttatatccaaatcaagaataatacttgaatgcatgggaaccctaaggttgcaaaccgcccaattcctttgtatggctgtaccttttttttatatataattaatggtgcgattgtaagagttttgacccaatttcccttgtactataggtcaaccctcccttttcacagtgaattgcaaaaactcactatctcaaagtagggatggatactgagttggtttggctcggtctagttcgttaggtaacgaggccgacggctcgagctagctcatttagcttgtaagccaatacacccatgactatctttccttaaaagattagcatcaaagatacagtagctgccaggaacatcctgtgcaattgaaaaaagaaatcaagcaactggcaaataacaaagtcttgacacgaaccttttgtacacatcaattcaaaatattgcatcatcaaaacaatcgaactctaattgaaaccaaccaaatgaaccatcaaacaaatcactaagccaaaactaacattccgatcaacttacagtatccaactgccgacgacgacgataacaagctctattaattatttgccactcttacggatggtgatagatgatttgtcactaaacccacatgtcatagatagtgagtgacaaaataattaattgtcacatcttaaaagtggcccaaagttaaatgtcccctaatatttgctccgtgatttggatcttggtggcgccggtggcggagttgcttgctcgtgctcgttccttctccatgatgatgatgcagaggcggagtggcacttgttgcggagtgagacggcaggatgacacaacgacgagagctcgtggcctcactcgccgctggtggtgatgggcatggagagaaaaagcgatgtaccatggactacgaagtggggggaatggatcgatctcttgggccttggctatcactggggagcagagctacagtcggtaggtggcggctagggttttctgatggggaggggatcgttctcgatcgattgagcgagaggagtgacgggaatgccgttttttttaacaaattgatccttttcaaaaacttattttaaaactagtccctacaaaaaacttcaaccaaaaataggccgtggactcagcgccatagacattggcgctaagttataacgtatcagcgccaacgacgttggcgctaaactctaatccgaggtggcatgaattcgctgagtcatcagatctcagcgtcaaggtatttggcgctgaggtccagacgatttaaatagctgcggcggcatttaaataagagtgagtagtcaagagaacagaaattattttgtaaaatacattaattctaaaagaatgctaggaggaagagaaaaggaaaaaaattgtaaagaataagagtgagtagtcaagagaacaaaaattattttgtaaaaattatttgtaaagaattgctagaaatgccgccgcagctatttaaatcgtctggacctcagcgccaaatacattggcgctgagatctgatgactcagcgaattcatgccacctcggattagagtttagcgccaacgacgttggcgctgatacgttatagcttagcgccaatgtccatggcgctgagtccacgacctatttttggttgaagttttttgcagggactagtttcaaaataagtttttaaaaaagaccaatttgtaaaaaaaaggggacgggaatgactatcggggacagctaactagggtcaggggatcgatcaattgagttgggtctttcccagatgagtttgggccgccaagctgctgcaatgtggcatgctaaggttgcagcttataaagctcgtgactcgctaacaagctatcagttcggctcgttagaaaaacacaacaagtcgagttgagtcaagctggtcaccagccatgagttttttcgtccagccctacctttgaggtgcttgaaaaaagcatggcctagtgggggtatccaagtttatttactgctatctcctttcagaaggaaacaaattattcttaccattctaccgagactcttctgccattgtatcgagggctgttcccaatattttggcggcctaggatcggacgaggtaaaattagaggcccttggttccaacaaaatgtaggataatatttattttattagttgcaaatatcttcaatatataaatgatacatcccatatatataatacgatatcaatctaatccttcattaggttgctctagacaaacaatatccaactagacaaaaatgaaattatcaagtagggaataggaaaaatgaatctaggagcaagaggaaacttttaaaaagctcagtcgtcgtacatcgagtgatccgagaagtggtcaactgaaaaatagatttgaggaactggtgcgaattaaaggtataatttagtaattagtagtagatcctttttaaaattttaatataaaaatatgttaatctagttaatgacatgattttataaaactttaaaataataatacttgaagtcatatataccaccttctaaaattcgtatggttttgtatcatttatatatcgtataatagagaatcataagaaatgtggttttataatataggccttgtttagttccaaactttttattcaaacttccaactttccatcacatcacatcacatccaaaaacttttctacacacataaactttcaactttccctaaacttccaaacttttccaccaactaaacacacccatatttacttaaaataattgcttacacccaaatttagtacctaggatcgaaataggaaaaattgccaaagtttggggctctgccgatttcctccagagagggccggtctgaccgctatatgtgggccggtcagaccgacaccagagggccggtcagaccggcgggagttcgagtcagacgccgtttttgtcgggtctcgggtttccttgctcgggaaggcatgtttcaggattccattggtttctagctcgagttggacgtggaggagggcctgtagagggcaagatcaacccctatttaagagacaaggccggttcaattgtaacccccgaacacataatatacttgaatcgctttttcttttatctttacttttagccatgttttttactttaccctagtttcagtctatctttgtcgatgtacgccgtaaatcatccgccgccgctgtgagagtgcgacacctctttgtaggtttgtcatgaaaaccttctgtttgcccacgagacaagtagttatcctcatatcgatctaaatcggcctagaggctgattttgatctctagatcagctctgttagccggtttagctctttttctataaaacccatcttgatttggccgtttggctagatcgaggtgattggcgactccatatcatcacaaggcgtttaggtactgcgatcgtgcttgtcgacttgttaaaaaagttgccaacacaatttttgacgactctgctggggaatcgatctattcgaccatattatgaccgaatttggtttaatttagttgtcttgagagtttcggccgaacggccgaaatcaatccatatgctgttagtctgaccgtctgtattactccggtctaaccgacgtaatcagtacggtctgacctcttgtacgacgccggtctaacctacttggtcggtccggtctgaccggagtagttgccgatctaaacggcagaaagctgcagcagttgtgcatcgggacagcaacaagcggccggcatcatcttgctgtacacggtctgaaaatcagaaatccaatcctattcagtttgctgtctatacgtgttctaaaaacaaaatcaggctattagagccgatttacctagaatagacaaaaccaaatcggtttctgttattgtgcattaggcaactgtcaccgagaaaaaaaatcatcaaagccattgcagcgcattggctgttattgtggaacatcaatttccaaaatttttgctagaaccacacaaaatttctgctattgttgtacacggaagatccgccgaccaaggctgctgatcttttggttttcggaatttgttacgtgcacacatcaagtataacaaggaaatcaagaccatatattaatctattcggtcatcgatttcggctatgagttatatggccgaaattaatcaaggagtttcttcgtcaaccataacgagcggaaacgagatcaacaaactcactaaggaggatttgaacgaggagtagcggcagtactttgaagaacaaatggcagtgttgaaggaggaatatcttgcataatacattaggaccgatcaaggtattctcaaaagaaacgtcccgctacctcaagtcatagtttcactaaaggtaacctccgattcgcccaacccatccgttgctattcaaaaagttaatgatcgttgtctagatgcatctgctacttctgttttgcttctatacaatatgcttataatgctatggaaggatcaatgggtgtttatacagccaattgcacaggaatcggctatatgcaaaatcgagctgacggtatgaccggtcgtgacaccggtcagaccgtgcccaccatggccggtcagaccgtgcccaccatggccggtcagaccgtgtattataccggtcagaccgtgccaaccatagccggtcagaccgtgccaaccatagccggtcagaccgtgcctatcctggctagatcgggcctcttttggccggtctgaccgcaccattgaccaccggtcagatcgggccataggccggtcagaccggatgcttggccggtcagaccgggctatttatagccggtcagaccggttccttggaaatttctctaggttttcataccacgactagcagtactgattttaactattattcatcacctgttaatactggtagtcatgctacttcacatatccctaatacttacaatgatcctaatagaggatatcttcatgacaccgggtatggccaatataatcatattgcgccgcaacaaccacctcttaggccactaaacccaccaccaaatccaccaaggcctgagactatggaggagttgattagtgtcattattagggataaatttggaattgaagcaaggaatcgtgctagggtttaccaaaagccgtatcctgattattatgacaatatcccatatcctcgtggttatagagttcccgaatttaccaggtttagtggtgaggatagtaggaccacataggagcatgtaggtcaatttttagcgcaatgtggtgaggctagtagttcggatacatataaattgcgcttattttctttacctttgtccggtactgcttttacatggtttacttctttaccggcaaattctattcatacttgggctcaattagaacaaagattccatgattatttctacactggtgaaactgagcttaggttgtctgatttaacatcggttaggcagaaacatgatgaatctgtcactgattatattgagaggtttagagatgctagaaaccgatgttttagtttgaatataactgacaaggatttggccgacattgcatataatggattgcttgattctattaaagagagattgaatggccagatatttcttgatgttgatcatgtgttgcatgaagctctggctcaagaaagccgagtggatgacaatagcttaaatgctagtttggatgataatgcaataaccaatatagccgaaccaagtgttggatcggattgtgttactagtttaagcaatgatggaatagccgaatcaagtgatggtttggattgtgctagtagtttagacaatgacaccgttgaaaatatagccgaactaagtgacggttcaaattgtattacaagagaaagtgaaatagtattgtcacctaaaaccgagtcacaaatcgatcatgtgaatgttggaaaagatagtgacaatgtcttgcgggatggtaatgaaatagaatccaaaatagctatgtatacatatcaaaggccatatcctgaacacatagattcggtcccatacccgcaaggatttgatgtgcccaacttcacaaaattcacaggtgaggatgctagaacaacaatggagcatatcggccattttgttgatcaatgtggtaaggctggtagtgctgatttgcttaagttaaaattctttcctctttctttgtcaaactttgcatctacatggtttagtttacttgctcctaattcaatttctacatggtcataaatggagcttgagtttcatgattattttaaaaatgcaagcttgatggagcaaagaccgattgatgattcatcggtcacttatgatactattttggttacacctattgctaagaccggaattgttagtaatccccttcctattgctcctattgattttgacaacaagaaagtagtgattcggcctagtcaagccgaatccacaaaagggaaaagtgttattattggggatcctcggtccgagacaattaggattaataatgctaaggccgaagatcataaagttgtaaaggatgagtcatctagttcccagaagactaaaaagccgaagcttacttttgagatgcttatggctaagtacaagaaaggattagccggtcaacgatttgataatcagactagtgattcaaaaagactaagatcatctcgtaggaagagaattggtcaaacgctaaagcaattggagccatcaactataccaacttcatacaaacctccggttgtgatgccatggtatccatatccaatgtcactatatggttatcttttttatgtattacatgccatggatggctcaatcacctatgccatttgatcaagaatggaggggatcacctaagtcaaaatcaagtcattcatttaactctagacaagaccattctcacaaaagaatcgatccgatggatcaaaggtgaaaaatgtgaagaaggtgtgggtgagaaaagaagccaaagcttcggaggtcgttactatcaaggaggagtctcaagatgttcgagtacctactggagatgcggtgaaaactatacaagcggagaagaccgaaggcgacatcgcgactgtcaacaatggtggtctgaccgggacatctagccggtctgaccggcggcttactgccggtccgaccgaacctcctggctggtctaaccgccagtctatggctggtctgaccgggcctagaggtggtatgaccgggggcaccaggggtgagtaggcaatctgagaacagtacaggagcttccacttcgactaaaaatataaagaatcatcatttagctcttggaacacaactacagccaaagtggataccttctggcttatcttctcaatagaagaggttacaacgtcttcgagccataggtcaaaaagaaaaggatgccgaagatgtggagaacaaaacatgtaacaatttagagcctcgaacacctaagcaagtgtggagaccgaaggaggcaaaagataagagactagtgatttcccatagtagtgataaatccaatttgataagagaagaatcatcggccattagagaaaattctcctccacatgatgctatggatgttaatacggtgttcatcttgcctttgaaatcgtgcaatcaagaaagccgattttgctcgggggggggggcaagacattaatatgctcatgaagaaatcaagaaagatgaacggcgatggatacaacatcacatctttgagccgccgttcgttagatgctaaggcaaggtatgtgtttattgtgttcatcattatattatatgcctatgccatgttagaacattgcttgctatctagcacatgtgtttgctcatcaaattgatattacatatacatgttgtaaatgccagttctgagtaatggaattggtaagttagcatataatttgtttgaagtatgatttggctcatgagtctttgatatttgtttaaagccaaatcatatgtgtttttatggatcaccatatgagatatagatttcataattattgcaccatgaaagttttacttcttagtaattcggcttatgtcgatggccaatgtgatgatttgttctaatattacctaaagttatcatgttttagaacagtggccttgttataatattttgcatacatgcttaaaccgattacttacattttattggaatcatgtgtgtgagacataagactttggtaattcattattaatcacacttcaagtggctaagtgttttgatgctttgatgattattgtttcaaaagccacttgaattagtattcatctatacatatcagtcggatgttatagtttttcatatgtctagaaggaaggaattttagtccaataatttgatacactaagcatctggctataatgtgaagaaaggagtatttttgatattagaaaagccggtgcttgattttagatctttggacgaaattggcaaagtcatagaccaggggcggtctgaccagtggtaacctgcggtctgaccggctttgcttggccggtctgatcgggcagatagggcagtctgaccggcattgcgtggccggtctgaccggcttcatacatgaggctggggggcacgttacatctgatttagaggccgaattaattgtaaattcggacatttgtgcccaggagttagaagaaaatatgagaatccctttgatagaatatttgaagtatcctagttttagggttgatcagaaaattcggcggtaagtattcaaatatactttgcttgatagagagttacatcaccgaaatatagatggagtgctattgaagtggttagacaatatgatcaatctaaagttgctaggggagaagtgcatgaagggatttgtggaattcatcaatcggcccgtaagatggattaatttcttaggagagcggggttctattggccgaaagtgattgatgattgtttcaagtactatagaggatgtgaagcttgtcaacggttcaataatgttcaattggcatccaccgctgtattgaatcctatcatcaaaccatggccgttacgaagttgggttttgaatttcattggtcaaatttatccttcatcattaaaagggcataggttcgtgctagttgcaatggattacttcactaagtgggccgaagccgtgccttcaagaatattacttacatggaggtaattgacttttattttgaagcatattgttcatagattcggtattccttaaactttgactacagatcaagaagcttcttttatgtccaaggaggtgagaagttttgtcgaatcttatgatattaagttgttgagttcttctccttattacgctcaggctaatggacaagccgagttgagtaataaaacattattgaaattagtcaaaaaggatattgaagaacaccaaaagaaatggcatgaggtgctttcagaagcattatgggctcatagaatatctaaacatggtgctgctaaagtcactccttttgagttggtttatgcagttgaggtaaatcttggctctcttcggtatatcaagcaagacgacttgtcggttgaagattacaagaccttggtgggaggcaattttgaaaacgtcatcgataagtgtttgaaagattgggtaatattttggaaaagatggagacacttcaagaacaacatttttagagagcaatcaatgagaaatacttgaagaaatacttccctagcgtttggcaagatgcttaggaagtactgtggccggtaattggattatcgccctaagacaacatgttctatgcttttagattcacgatgttcataaaaaggcagggggcatgtgtttacacccaaatttggcacctaggatcgaaataggaaaaattgtcaaagtttggggctctgccggtttcctctagagagggcccggtcagaccgccaccagagggccgttcagaccggcggcatgtggccggaccggcagagtctgaatcagacttcgttttcgtcgggtctcgggttttcttgctcgggaaggcatgtttcgggtttccattggtttctagcctgagttggacgtggaggagggcctgtagagggcaagaccaacctctatttaagggacaaggccggttcacttgtaacccccgaacacacaatatacttgaatcactttttcttttatctttacttttagccatgttttttactttaccctagtttcagtctatctttgtcgatttgcgtcgtaaatcgtctgccgccactgcgagagcgcgacacctctttgtagccaagggggaagtggtgtgacagcaggcatgtcactggcaagatccaccactgtttattcgccgagatccttatcgtctcacactcttgttttctctatcggtctctctcgagtcactctccaagccagcattgttgctcgcacggatccggtgccggtgcccctattgcgcggattcgccgtcggcggcgacaggaggggcggatccggtgacctcttcccctcccgcacggatcccgtcgtctctccgctcccctctcgcacagatctgccgccggcgcctgatcccgttgtccgcccccctctcgcgtggatccaccgtcggcggcgacaggagtggaggatccagcggcgggcgaccttttcccctcccgcacagatccctcgtctctctgccccccgctcgcgcggatccgccgctggcaacgacaagatggatggacctggcagcctcccctatggcgacgatggcaatggttgcacgtgggctgacctagcttcccccatctatggcggtggcggcgaagttgttgacgacggcatcacagttgttgacgacggcatcacatgcgactttctgctcaagctgctccgggcagggagcatggtgggcgccgacgcggctctgctacacgagctggagtccagggctgccgtggtatcctaactcaaagtttccttcttttttagaaaacaatctgggtatttgatgcaagtacagtatgatctaatttggtcagcattgttatataatgagctattctttgtaatgagttacaaagttatagatataatttctttgttaaaaccatagtatattttcatcacatcagataaatcagtgggcttttccattgcatgcaggaactaatgccggcttctttttcatcacatctggtaccgtacataaacattttgaatccttttttcgtttataggcttcacgacgctttttaagtatttcttgtttctttttgtcaggtatctctttgtcgtcttcgtgcactgggatccaagaacagggatgatgatccagatggcgtagcatcaacatctagcttggaagatgaagctgtacataatcattatcaaacaacaaaagcaggatgtatcttcttgaaaacaacggtgagaagcaaaacaaaaattgaataatattttttatttttgatccctcatagagatgatttttgccatgtttaccccactttatttgctgacactattaatatccttctggtaatggttagatttcctgttattcattcaatgttataaaatttgtgacacaagtacaaatgctagacccatcacctaaaagtctttaggtgaaattaaattgcaaaatttagtaccatagcttttcaggtgatataccaatatgacctgttcgattgcagattagagaggatgttagaactgcttgtgtctatgttgaatcattgacaaaggagttagttttcactacaaaggatgtaacgcaactgttggtgaaggtacatgcacctcaatattgtcgtctgaagattcgctgatatgtttctcatatgtttgtgctgttaacccatgcatttggtgatcgcctaaaagaagcaggaaatataaaccacttactttcacaacttgcgtatggttctgtttatacataacactaaagataaatgtttatttaacacataatatgaccatctttgtcctgatatagtctttattgattatctcatagactgttatgcttaagatcagtatttaagtaatgggttgtagtttgtcatgcatgcattgcctatatgactgatttcttttcgtgctctgttttccaacgtggtacaaatcgtggtggagccattcaagtgaatgatctagttatccagtcaagtactattaagcatctatctctatccagtacatatattcacttatcatgtctggaaccgttccactgcaatatggtattcacaattctttatactcttaaagatatccctttatcatccagatctgatgtgtgtgttgccaggtttttaaggagacaagagatgagatttgttgactttgatgggttggacttatggaatcgagatggttgccaaaaaatattcagggtaattttttttgttcaaaataagtttggttgcatggctaaattggaacctaccgtatttgctatgccccctttaatgctttggaatttttaagagctctatactgttgtccgctggttctgcatggaccataggtgtttattttttctattgctgcattaagcagtacttttgcgcactgagttcagagaaagataggggaaatagaaataataaactctgaaactggtttcctttaaagtagaatatttagtcaatattaatgatttgatttttcaaaccatgttggcatatgaatgtgatgaataaccacctacagtagtatatgcagaacaagctactgtaactcaaggcattaagggtattaagtatttccagtggttgattaagaccattaagggtattaagtattgccagtggttgattaagaccattagattgaatatatttatgtatctatcagggatattgtgtgtagtttatgcatgctttcagtttttaaatcagtggttgattaagacggttagattggatacattcctgtctctatcatattattatgttatgatttttttaaaaaaaatattcagggaattactgccaatatcatcttgttaatataattatttaataattatgcaaaataaataagttgtatttcttttctcctggtacatgcatttaataccacagagtttatactatttattgcatatcctgattataattgctcctaaagttacgcaaaaaaacaaatctaattgttaagggttaaagaatcaccttccgtcgtcataaatgcaacaaacgcagatgtatcacgtccaacagaaaattgcttgttttttaaaaaaagaagtttgggcgcatatgagtagcattgagaagattgctcaatatccacaccaaatattgggtgtataaatgagctcttctttgtgttttcagtttctttatataggttgagaagatgtttgtatcctacttggccatgtaattcttattgttagattctgtatgaatgtaattcttgtgttgtaattgtttagctatgtaactgtataagaatctatttgggattcaatcattcaaaaaaaaacagcggtgggaaaaaaccgggcccaccaaaaaaaattgtgacccaaaaccgtgccaaaaacgcacgcgaaaaaaccagttggatggaaaaaccggacaaaaaccgtgtaaaaaaagaatcggacgaaaaaaaccggtcagaaaaaccgcgcgttgaggaaaaaaaccgcgtgcggtaaaaaaaaacgacagacgaaaaaaaaagctaccagaagccttgcgtattttttaagtagatatagatatagatatagatttttaaaataccaacttgatggtgttcttttgggatacggcatgctcgtcggtcatctctgtcccgttccacggttccaccataggatggatagggatggcttcatcgtagaaaaacaattgattccccgcacaccccgaccacaagtccacgcctcaacgaagaaaatctcagatccctgttctcccctccccctcgattagccgaagaaaatcctcgcacaaggaagtctcatggattcagatccagccatggtgctgcttaatcgctccgtgctcttggtcaacgaggtaacagatgtaatgaaggaaaaaggctggtctcttgagctcgacgagaaggcaatttcagacgcatgcgacggtatcacggattggcaggagaaagagaaggcaaggcaaaaggccatacgagcagagatcaagaggtttcgagccaaccaagatgcggcggaggccattttgcgcaagcgcaaggcctccatgccccccagcacggtgaccaagttttgtactgacaccgacctccgtaaggttttggatggcatcgaactagatcctcaagtccatgatataccaggtttgtccttctttcgcctccggctgtcgtctgcacgacatcctcctgatttgcagggcacctccgtcgccggtgcggaccacaacatcctcgtcttctatgtcggcccctaccggcccggtttccctgcaccgggattttatctggtttacgacgcatgggccaactcactgtccgccatccaccagttgccatatttaggcggcggcagtattggctctgaggttgccgtgctgcgccatgctccggccagcgactatatcctcgccgagctcctcctcactggcgaactccccaaggcaagtctctggacgtggtgttcgtctggtccgtccgctcgccaatggatccacaagacagtcatcctccctcctgaagtgtgcacgcccacctacatctttcatgccgataccactttctctcttgggaagtttgcgctctgttgggtagacctcctcgttggcatcttgatgacctgcgatacccttgccccagaacctgttttccagttcatcccgttgccggaggggtgctatatggagccgcccgaccctcaagatggacgccaggtaccacaggaataccggtctatgtgttgcggcaatgacggtatcatcagattcatctccatcgacggctatcatcaagacctctctatcaacgatatgaggaatatgttcctcaggacatggtctcttactcttaaccccaaggagtggaagcaagaagcggcactatgcattggagacctctgatctgacacaacccaccagaagctgccagcactaatgccgacctggcctgtccatagcattcttcatgctgatgttgtcttcttgtacttgtccggccctaatactgggaataatactggggagacagagcggtacatggtcagcatcaacgtgcagcacagggaggctatttcaatctccaagttatctcctgatgatagttcccctcctccacgctactttcccagcagcttcaattcgtacataaacaaggtaactagctcattttgcaagcaagcagcaggaaatataggtagaaatagttcaaaaagtaagcataaaaatgtagaggctaacagagggtgttacgtacaaggaaatcccatataccaagtactttattttattagggcatgaggcattcactactacacgagcacatcagcgcccccatcataaatgccggtttgacaaaatgttaaactggcactgatgatgattttcccgccctaaccctcgaccaaattatcacaaaaaagtacatggaattaggagtgtgtggttcatggattgcaatttcggaatacttcgaccaaattatcacaaaaaagtacagatttacagtgtatcacaaaactacagatttagtaccaaatctatctatttatctattatattattaaaacaactttgaaagaaggcaccacgttcgctgtggaggctagaaattcccacattaatcggaggaaacgaaaaatatctacatcgttagatcacagtaagactatattataacggcggagatcgatcatatataaatagatattagagttgtgaagataatacatctggtccaaacataaatatttgtttcagatatgcaacgggatcaaatttctatttgaaagggattaggagtgttgtgtaaaggtctcgggcagcttgatgtatcggaataaaaaaaggaaaaagagagcgccatctagcgtttcatacaggacaataatttagaaaaaaatagccttatacaactgcacacattggtgcatgcacttcggcagcgatgcgcacatacgagatggcaggttattgcaaagttaacagtccaaaagtacgagttatctgacaaatcaatttcttaggactacatatttctagcatattatattatagagatagctcaaaagtcaactattaccttcacgatcaatcaaggattagaaaatcttatagtaattataaaaaatgattttaaccgttagatcatagcgagtttaaattataacagatcgatgggagttatatagaaaatataaattgtatcagtagagaaaaacaaaagttaaatataataagatatttcacatagaacaaaaccgagtatgactaggacatggacatgacagtaggtagcgaaatcctatatggacacggatcgaattggtgagcatgcagaacatgttttgcagtcctttacagtttcagggtagcatgtagctttaaaacagaaaagcgtagaatcctacatggattaaaatttatagcagcgaagccccttagacggctaagcgagcgaaaaaattacatcaacgcagcctcacacaaccaaacccatgcacaaatcaatatgacacaacttactcgagcattaaggctattaagcagctgtgaaaccttggcttgatgtgtaggtctgggatgccgttgatctgagattaaatacgggagcgattaggctaagcacgtacttgcacatgcattgctctctgtgtttaatcatggtaacaagcaggaaaagaaaaggctaccataaaagaggaagaaatgaatgtccatatacatctatggttcactcttttatttttttttaaaaaaaaagaatctcaacataagcataatttgtcccctgcttctggaagggttgtcccttcgtactaattaatctttgtgaacgcaaatacaactatagatcaactaaggtctacacgatgaagtaacatgcgtagatgtgtgtactatatttacatttaaatgcgacacactactcatcagtgttcatgg

SEQ ID NO: 973 - DNA, 617 bp, Oryza sativa
ctaacgaccacattactcctttaaccgctttctcatgttccatccatctttaccaaagaagtgcatgatagatgtctctaacagtttgcatccttctttcatcacatcgcgctaatcttctttaagcagcaaggaccattgtcgagcccaatacgtccccctgaaaataacctgcaagtaagagttaaaattggagccattgaagaccacatcatttctacaaatccacattacccacaacaacgccgcaatccctataaaaatttggtgctttagcctagattgcaaaccctttagccaaatcccaaacatattagcaacattgttaggcggatttatcccaaatgttataaaaagggtactccaaacaaatctagcaacatgacaatcaaagaagagatgttgtatcgtttcattgtggttacaaaaacaacacttagtgttgcccttccaatttctttttgctagattgtccttagtgagaatcactctcttttttaaagtgggggacctccacctcccccactttcccccgggggcctgcaccaccattccttccgagctagcagctccccccttctcctctccctttttccatatcatccatttttctatca

SEQ ID NO: 974 - DNA, 664 bp, Oryza sativa
ctagtaaactggcagaccgtgtgcatgccgagagatttgggaggactggggatccttgatttggaaagattttcattggctttgtgactgagatggctatggatgcgctggcatgatcacaacaggccttggaatgagatggaactacctcgcaacgcaaaagatgtacaactattctaggcttgcactgaaattgttattggaaacgaaaagaaaatcctattctggaaagacaactggctacaaggaatgtgccctaaagatatggccccaaacctctttcaacttgcaagaaggaagaacaaaaatttaataactgaacttgatcacaaccattgggtctactcattcagagaaattgacaatggtgaagtaatccaagagcttgtgcatctcggcagccttcttactcaaacacaactaacgtcagaaaatgaagactacataatctagaagagaaatagcaaaggtatatattcagcccaaagtgcatatcaattccaattcattacctgtcaacatgatcagaccttcaaagccaactggagagcccaggcattacccaagcaaaggttcttcggctggctcatcctgcacaaaagagctctaacagctgaaaatctgctaatccaccattgggaatgtgattggatatatccccttt

SEQ ID NO: 975 - DNA, 4348 bp, Oryza sativa
ctacggaggcaacgaagaaggggagctagctagctagcgtgatatgcttaattgctgattaaattaccagcagacgatgaagcagaatccggagaaggcgcgccaccggccgggggacagcgcgcggccgcagcagaagcagcgggtgaccaccatgacgacggcctgcccggcgagcagcagcagcagcgccccgatgccgtaccccgtcgccgcgtcggagctgtacacgcagtactgcctgccgctcgtgtcctcgctaaaggtggcctgcatcgttcccaaccagctccctctcgtcagacgacgacgacgacgacgacccatagtatggatttcgctagctatagctcaccgtgctccggcgcttctcggcgccgatggcgaggacgaaggcgagggcgtcgaggacgaacacgaccaccacgaggattatggacgccatggatggattcgaactaatttacgtacctcccttaattaatccaacttggactactgattcgtgcagcgagcgagccaagaggagctctcactttcctcttgttgcagaaagagaggaggattaggacaagcgagctagggaaagatgggggcgtcaaagacgagaggaaagcttagcagcaagtcgagggagatgaggcgatgcaccacgtacactgctgctttggtagccggtgaaggtgacatgtttcactctaaccattctcgcgactttggtggttctgttccactggcacctgcctccggcctctagctgaggctgacgcgtgggcccccccggctcgccaccaaagtattcggcgtggatgattggaaacggtaggccagtgggagtgggatttggatgtgctatcatatgctcatgtactcgcattttggcttttattaaagcaggtgtggaaaatatttttcccctttaatgtgggttagtaattaatttgttttgcaccaaggtcagtaaaggaagcttggtggcgcaggaggaatattttgtttttcctttaactggaccagttatttctaggcacctatgtttttttattatcgaaacctagggtttgttcgctttattaccaaattcagcctgattttattagattttagtagcgttgatgcattttcaaaatttggtagcgtttttataagataatggttttgaaactactagaatttgattatatgggggtggtgaggtagcgtttagtttattaccataccaaatttgaaaaaagtggcgataaagtgaaacggccaatagaattcgttccgatcgtatggcctgcagctgataattgctgtaaaattgcacgtccgaataattttggctgaaaagcaggtacaggaaatatttttcattccatctacgtgggcgagtaattaatttgtgtttcaccaaggtcagtaaaggtagcttagtggggaggaatatttgttttacctttacctgcgatcggacattaaccagttactcctaagcactgcctcctccgttccaaaatacttgtcgctttaagtttttgtttgtaatttttatcatttgtcttattctaaaaaatatgaaattattatttattttgtttatgatttgctttattatctaaagtactttaagtatgacttatcattttttatatttacataaatttttcaaataagacgaatggtcaaacgttacaagaaaaatgttaaagcaaccactaatttgggacggaggcagtagcattgtaggagtacgtttttttttccttaaaaaaaatcgaaaccagtactgtgtgttcgaccgtcacaacgtctaagtccctatcgtctggcttcatagttaaaacttttttatatatgctatttgcagtttaaaagccaattttaaaagataaaccatagtaaaaacctcagatcaacactaatatcaagttttaaaattcagattttaacggtggtcgaaaggcaaatgatgagcttatgctagcaaagcaaaggtagttccaactacacgcataagaaagggtgtaaccacagatgcaaagctgagcgctcctattgctaagaagggcaattaactagtagtgctttgctttcatcgggcaattaactactagtgtttgcgttcatcggccaactaacaagaggttgattgaaaccagggataacataattaaaaagttcatcaccaaaaataaagcgtaattaaagaaagtaagagcaacacagggacagctgaccgcaccggacaaccaaacatccacctcgtttcagcttttcttaccgcgaaaaaaggatgccggtggtagtgcttgctagttgctactatactttgtttccgaccgaagaaaagctcagagcataatgttataattgattgggccttctttgtagcttcttctacttaatgggccagaagagagtctatattctttagattgggctgaaaactcggcccattatctcaggaagcatctagaagatgggctgcatccaaagagccgacccgtcctctttccagtggcatcgatctcgaggtatgtttggtgcagcttcagcttcgtcgctcaaccaaacaattttaacttcatttaaaattggagcggagctgggtgaagatctatcacaaaataaaccagaggtggagctgaatttatacagtttcaaagctccacttcagacccaacttctaaagctaaatttaggagtaggagttttaccaaatgcctatttggtacagctccaactcctaaatttagctccaagagttgagtctggagtggagttctggagctgtctaaacccagctccacaactctagtatattttgtgacaaaaaaggctccaaataggccatacatattggtcttcagtatacagcactacagcacagctagtcagccactgtatacagcctacttacgtatggtcttatccaaatgtacatatatgcaaatgcaattggctttgaagcctatcatgattcagtccaagttgcactaataattggtcatctctgtgcaggttaattatgcgaaagagaatcttaatcccaggggctttggttgcagtattgcacacggaagcaattgtaccagcgcggaagaatcagatgcatccatggatgggattatggaaggagaaagtgatgctagctacttaccagcaggtgatgaagcagaagccggcgaaggcgcgccaccgccccggcgagagcgcgcggccgcagcaaaagcaccgagtcgccaccatgatcatcgcctgccctgccgccagcagcaccagcgccccgatgccgtaccccgtcgccgcgtcggagccgtagacgcagtacggccgcgcgttctggtcgacgttcacgtacgccgcctgcatcatccaatcaacacacacctcctcgatcgtcagcacgcagcagatgatcgatcggcttcgtctccggcgacggcgatggcgacgacacatgtatgcatcaacgcgttcgagagctctcaccgtgttccggcgtttctcggcgccgatggcgaggacgaaggcgaggacgtcgaggacgaacacgacggccaggatgattatggacgccatggacatcgaatcgcagcaagaatcagtcacctagctaagcttcgaatatagttcaatttgcaggttttgtggtgcaagcaaagctcactttcctgtggttaatcggcagcacaaaatgtggattaggacgagagaatcaaatgatcagagctagctggaggcgatgctgctgctactgctaagcagctatccgtgaggttgacatttgaagacgtgacatgtttcacttcaccccgttcccgcggctttgtattttgttaagttttcctcctgtggttgacgagtgggcccctccatgatgaactgatgattaaccctgcgatattcggtgtccatgattggaacttacagatggaccgacgaatactcgaatctcagctttaaaatatggaaataatttatatatcttcattgtggacgaagaatttgattcattttgattaaattgcactgggatgatgtgccatgtaacaacaaagaaaacagagcaacacagtgacatctgaccggacacaagcctgggaaatatattactgggccttgtatgggctgttcatctaccaatatgggccaacctgggaagtgggccgtgctctatactgagctgggccaacaaaccaaccaacatgtagaagtctagaagagggcgagagacatggaaggcgaattttttttatttataattttttttattaaaagttttacaaaaataattttccattttgaaaattgacggaaatagtcgcctaccgccctctgggagggcgatttttaaaaatcg

SEQ ID NO: 976 - DNA, 1841 bp, Oryza sativa
ggataatccatcgcctatagctagcactagcagatcgtctcgacgtgccttccatatgagcatatacagtcataacatactgctactgcaaattcaatcgacgaccatgaccgggattattcagagtttcagaccaatcgatatcgatacaatgccgggatttgctgagcacaaggtcttcgatccacaaaggagacaagcggcataatcgcataatctcagggaggattattggctattgcagaacgagacgagaggaagtcgtcgttcatcatgtgcgatttactccgtagccgccaacctatgaagattatcataatagtagcttttctgctcgaccacgaccatgcagattggcagatatgcagacagatcgatcctccggtcacgtcagatcgagaccaaaacaaacaagaaaaagcctactgctagtaatttagtgccaggtaaaagaaacatcccggcgtacggccgcatccatgacagtatgcacactacactattctgttctcctccatcttgccggccggccggccgcaactgccgccgttgtcgccggcagaaaaagtactgaattctgtgtaattgtaccaccctcttcttctactactacacatgtgttacctgaagggtgagtagcagcagtagattggattacttaaagggcaaagcgacaatggcttgccggattgtgcagggacaggcaaagatgcggccttccgtggcagggacagccaaggataacatcataaaccaaccctgttttttataactgaacttgagctctgaaacactgaacatagagaggatgtgagaagctttttgttgttgtgcctgacgaacggcgaggccgaaggcatgcaccgaccacatctcggtctcctggctcccgaaccgcacgcagagggctatcctgcgtctgcctcctgctcgcgtcgcggtttcgccataaacaaagctgtggtttcgccgggaggaggcaaagcatggcgagcctgaaagttcttgattccgtacgggtcgaatcgtgttgccggcagagtagtatatgttacgtttacaggtctttgtgtcgcaggatcaacacaacacgatgaagaacagatccagatcagtctctgaattatgaacagaaagtaaggaaaaaaagttaaggtacgtgcgtatgttccgtttctgaattctgacacaagaacagggaaaggattcacaaggctcacaagacaaacaacacatcgatccccaaattacacagaaaaacttcatgtcaatgtggccgatctcacacagaaacttcaggtcaggtggccgatcaattaatgaccatgaacgcactcaactagaataccaaaatacagagacatgagccacgcagttacagatatactccatatactacagatactgagcaatgagaatgaaatgtacagagtagagcaatcgaggtatcaacgcgggcgtcgaagtcaggggggatgcaaatggcaaatggattgagaaccaaggtgctgtctgtcactctgtctacatgcgggtcatgccgatgccgccgacaatgggcgggggcacggcggcggcgtggcgggccttggcgaagaagaggtagtggagctcggcgaagagcgcggtgaggaaggtgaaggcggcgccggcggcgaacacgcccttgcgcagcatcgcgcagcgcggtggcccgctaatcaccagcgtgctgtacttggtgtggtacgcgttccgcaccgaccccgccagcaggcacagctccgcgatcacgaacgtgaacctgtccataaatccacccaccatcatcagctcatcaattcaataaaagcaattttact

SEQ ID NO: 977 - DNA, 695 bp, Oryza sativa
atattgtaggtgaaaacatcaggatgatggccctcctgaaccatcacatccatgactttgagagcatggccgacatgatcattttggcagagaccattaacaaaagtgttatatgtcatctggtcaggctcaaacccatcggcaatctccagctacatatatccaagagcatccttcacccttcctagcttgcagtacccattaatcaaaacattaaccatcaccttcgtcagcgagcaccccatttccaacatcctggctttcaccctcagtgcagcctcgatgctcccctcctcaacaaatccttgcatcagggtggtaaacgtcgtctcgtcaggcgccacgcctctgctagacatttcctcgagcatgagaactgcagtcctgacctgatgtgctcggcataacgctttcatcagtgtgttgaatgtgacaacatcaggcttgatccccctagcacccatctccgagtacaccaactcaagcaatttcatctcgctcccctccacaagaacattgagaaggtggttgtacaccaccgtgtctgcttgaatgccaaacagtgggtcaagctgattcaggaccagatcgacggcatcgtcgaacagctgctgtcgcgcgtagcaatccaggaaggagtggactacgcccaatttcacctggtgcccctcccgccgcatctccgcgacaagcac

SEQ ID NO: 978 - DNA, 528 bp, Oryza sativa
gtgcaactgcactttttctggaattcgcaaactttgtgttagggacaaatgtcaagacagttggctattcagaatttgaaataggtctgcacgatttctcagcacattataactctatgcaattttttgctgttttaggtcctcaatgctctgttcaatctttgcaagatcaataaaagaagacaggaacaagcagctgaaaatgggatcatccctcacttaatgaattttgtcatgtcagactcacctctcaggcaatatgctttacctctgctgtgtgatatggctcacgcttctcgcaactctagagagcagttgagggctcatggaggattggatgtgtacttgaacttattggaggatgatgcatgggcgtgtactgcgttagattcaattgctgtttgcttgtcccatgacaatgatcacagaaaagtggaacaagcctttgtggaaaaagatgccattcagaaattagtgaaggttttttaagactgccctgaacaatattttggtcatatattggatgct

SEQ ID NO: 979 - DNA, 17910 bp, Oryza sativa
  unsure (1)..(17910): unsure at all n locations
tgcagcatcggagtaacttatggtagctctacaggaacgcccgaaccttgactgcagatatggaaatgcattttatttctaatccctggatctgtctatcctgtatttatctttttatggagatttgcgtcaggatggctatgtatcagctctcagaacattcagcttagtatcacagcaattgtactctttacttgttttcacctggtacaagtagcttcagtggatactttgtgatcataagttcagaactgaaagcgtaactgaatgatggatatcagacacgatttcttccctgtggatactctgtgatcataagttcagaactgaaagcgcaactgagtgatggattatacacgatttctctctcctgtgccatgtctacagaagctgttctgttcaattgcccccaaaattaatgtccaacaagcagcgatcttgaattgctctgacgtaaacaagtcaggatcaacctactactatttacaagatctagatgccgcaatttgcacaaggaatggaaagaaacaacacgattcacaattggcacacatctaaacgtgtgccctctatgcactgtcactcaactcaacatgcaaaggtaagacaagaaacatagacccagcatcagcatcaatcagcctggtgatgttttccttccattttcaccttgggctgatctcggacaccgtgggtggcaccaccgtgctgaacatgtcggaggtgtcggacgccgagtgcttgaacctcgagttgctggagttggtggccttggagaccgtgccattgtagtcgtggatgtagcccggcgccgtgagctcgcgctcgttgatgcggatgggcttggacagcatcgtcaccacctgcggcattgacgggcggcgcgccgccgccgcctgcgtgcagaagagggccgtcttgatgtaccggaggacctcctcttcagggtaatctcccatttctgaatccaccagctccttgagcttccctacctcatgtagctcccatgcctgttaattgtgaaagctaggctgagtttggcagcaagagttggtaactcatcccccacacgcacgtaaaacggagcgactcattagtacataattaactaactttttttttttcaaaatatggattaatatgttctttttaaaaacaacttctcttttgcaaaaaaaaaatagcgtttaacagtttaaaagacatgcgcgtggaaaacgatagagatgagttgggaaatatagctgcgtaattaacacggccttaattgatgcagaggctggaattatacttccattctctaataaaagatttagatggagagtccagcgattacggcttaattggaatgtctctagagcaaatgtctgaaggtgaaagcaaatctctgaattttggatagtaaagatgatagtaagactgaccttctctaggagaatcttatcgtcagccaggagactccttgaactactcttgccacttacgatctcaagtacaaggacgccaaaactgtatatatcggctctcttcgtcaattggccatgccatgcatattccggtgcaaggtagcctctgcattgaacaaatagatcagttcagttactgcaactgcaaggttactttctactcaaacaaactgctaaatgctgaaatactcacgtcgttccagcaacacgggtactgatgtgggtgatattatcagggaataacttggctaaaccgaagtccccgatcttggggttgtaaagcttgtcaagaagtatattgctagccttgatatctctgtgcacaatcggtgacgcaatctcttcatgcaggtatgcaagtcctttggcgattcctatgcatatagcagatcttatgctccaagtaaaatttgcaggttcgctattagaacctacagaacacaagataaaaggttaagcaacaaacgaaatcaatgcacttatatagaaaaatagtcattgtaacatatcaatattcatacccaacaatgcacggtcaaggctgctgttttctaaatactcgtataccaaaattcgattgtttccttcaacacaacagccaattaattcaacaaggttgggatgcttcacattggtaataacatcaatttctgtcaaaaattctcgaacgccctgcctggattcagcagaaagaactttcaccgcaacatctcgcccatttctaatagttccctgaaacatcaaagcattggtaagaatgcaaggactgatggcttcagatttgaaagggatataaccctcaatggactcctcccttccacatataaagaaaaacaaacattaccttgtatactgtcccaaagccacctcggccaattttattactgcggttgaagttttctgttgctgatctcaactcagaataagagaaaagccttatgtttttctcaggcggaatacctgaaagttagttacatttagttaagtaaagcatggaatcttaaaatggagcttcagtactggcattctctagcctaatatgatcgaatctgtgatagggacaatatacatgtttctatttcataaactctgttggctgctatgcaaattcagcataaattttgcaagcaaatacagttcgtaccgctaacgccatgagagtaaggattctctcctttcttggattttggaatgcaacaccaccagctcatatcctcagttgttgtggctgtcttgtacacttcaacatgcagaagaggaatcttcaggaataattattctgcaggaattcattgcgaaacaaccacttagagagttgcaaattgagttcatttgtacattttatatattttggatatatagtacagaaaagggaaaataaaaagtaggacatgactctctttagacagaagtctgcgcaaaacttcttgttagaactgataggtagatgcagatccacccacattagcctgtactagagtaggtcaggaactggagtacaattaaatctcctttttgaaaccgagtacaattagatcttaaatccatcattcctcatgattaaagcacaaaagaacctcatactggcaagctttcaatgataactgattaatcggtgccatgattgtgaacttgcgattctcatgatgaaaagaaacatgacccaaaattttggggatgccaggtgcatttggaccacatagctccaatctcaggtgaatataccagatgttccactggatccaatggccatgtatggcacatgtaaatactaggttagcacctcatccactgaacagttcacatgatttgcaaagcaaacggccagatggcatagctgccaagaacaatcaccaaagcaagctgaagtttggtgatttcttctaacaccatggtccactcgcctcaatctgtatgcttgtacatatgcatattttcatgggagtatcagcatgtcttaaaccattatcatccacttcttttccccaatcaattcaaacacctcataagtaacggatcatccaacttgtttattcagaccacaattccaagaattcttttgttcgcatcccagcggatgattcgacggcatcacttattttcagaatctctgtccgaatgatgctttgccactcaagaaaaactcttgacagatcgtcatctgatgaacacaaactcccagagcatcaccacatcacaggtcaggactccagacgcatcatcagaaatcaggtggagaaactctaggctaaaactagtgtgcgagaaagcccaagaactaggaaatcaagaacacgaggggataaaaacaacaagaggcaagaaatgcttcgagaaagcagcagaaaagtaccaaagaaaaacaaaacgttgaacactatggttacctttcttgcttggcgctctcttccgatgagatcgacggcagaggagatcgaagaggacggagaccaaggaagtttaaagggggaagagaaaggtggttggggctcaattatcagcagatatatctgtagcagctggccagttgagcgaacttgctaacgattgcagtgttgcagattggcaggttcagctcagctcagcacgagcaacagcagcagctgctgcaataaagaccaacagcgaaaatggtacgagggaagaaggagctaccagcacgccacaaaacctaaataaaaagttggaacaaaataatactactatcaagaagatgtaggtgagagatagcagccggctgggaatgaggaagaggaggaggaagaagaagaggtcttcttgctgatgctaattgctattcctacctcctactaagtaattgctactcccactgaagtccctttgataaaaaaaattaaaaaaatcactacttactccgttataaaatataataataaattattttagttttcttgttcctgaaaatattctatctatctcctaaaatataatagtttcttcatcagtattctattttcaaccagttaaagcaacttatcttttaatttcttcacctaattaattttctcaactaatcatattcttttttaagctttggtccttcttaattaattttctcaactatttttttcttttaattttgtctgttgttcacactactttttctaacctcaaattttttttatatttcgaaagagagataattctgtggagcttgcctggatgttgccacctgccgccaggcgtggagctgtcacctgtcacaagaacactcaatagctagtatcctgctaattaccagcgcgcgacgcaatcgctgccgccatcagcacagataattagcattaagccctgcccgatcattctccctaattattgcgagaccaagattattttagagtataattaggtgctactactgctggtattgtatcccaaccaacctgccggtgccagccagggacattgctcgctgccctgagcctgtattggcgcctaacctgatgaatcatatccatcagggtcgtcgcgtacgccgcccgcagttcgatagatcgcacgcgggccacttccacactggggattgtctgtggaactagggacttgtttagttaccaaaatatttttcccccaaatatcccatggactctttagacatatacatggacccttatatatatatatatatatatatatatatatatatatatatatatatatatatatatatatatatatatatatatatatatatnanctaattgcacagttaatcgtaatacaatttttttagcctaattagtctataattaactataagtgctacaataactcacctgtgctaatgatagattaattaggcttaataaattagtctcgtggttttcagacgagttatgaaattagttttttattcgtgtccgtaaaccccttctgatactgataaaacgtttgatgtggcacccaaaatttttttttcgtgaactaaaacaccctagcttgatcatctggaccagcggctgccaacgaacgaggagtcagtagaaaaaacttggtgttttcatcgctcttgtcactacgtgtagcctacgtatgttaacagtacacgaaagaggagagatatttacgtgcttgagaaataattttctacggtcctgtcgtttcgctcacgcttatagttattcttattcgtattacttgttagcaatcaaaaaataatttaagtaattattttatgtgtgtacttgatgattcagaattaaatattgtaaaataaactacgatgaacaaatcatgaaatcagcttttaaaatttaaattttgtcttataggtttcactataagtgaaatgataaggttgtacgtatcaaagctagggcatgttgtttttaaggaattgaagaatggaatgcatgagttattagacggtgtagttttcacaaagaaattttctgaaaaaaatggattaatacctgacctctaaatccaaacagttgtacacatgaaaagaaagtaaactgctttaaatttatattttaactctatgtggtcacaaaatcattcatctaacccgaacaaaaatcaagccctaattagagttaattaacgcaagttaattaatactactacatgatttaactcctcgttttaagtgagctcctgtgttttcttgctgttggcttaggtggactggtgacgagtcaacgactgacatccgctgctatttcctgttttggttttggatgattgctgccttcttgtcaaccaattatgctctgttactgttgatgttcacacgtccatctggtgtgatctgatttgttttgaaggagtctacgccacgatcatccaattgccctattgttgttgttactgtataagactaatgtgactcgtcagaagcgaagagctccatatctctgacggcatcgtataaaaatagtattatgtgttctctcctgttgtgtttttgttgtgttgtgccaaactactacttttcagcgtgacctaatcctttcgtcacaggttgtcaccagccacgagcacgaaatgataatgcatgtcattgatccttctcataaatcaatcgtatcttaaagtctgaaattaacgttttttttatttactactactcagtttaagtgagggtgatcactacctttgtcattacatccattggtacagcacgcgcgagagcgaaaacttttacaaaccctcaattaagcctcatctaaaatgaatacaatgggattttgtttatgaaatgaactaatttctataaaaatcctgtaaaattcctatgttcaaaaataactcctaaacatatgaattgttggaaatttagaatgaaaatgctagaagtattgtcaccaattgtttattaaaaaaacatttgatttctgaactgctagattacatcaaaatttggaatgaaattgctagaactctatcgccaattgttcgtcgaaaagattttctatttctagagtatcatattgcatcaaaatttgttcagggagaaggggaaaaaaatgtacgatgcgcatggaaggtgggtatagaatgcacgatctgcaagacacaaacacgtgtctacaggtcaactgtgtcacacgctgtttttataagttaaataaaagttactgtaaccatactatagttatgctctaaagattttcttttttcttaaaaaagaaaactgttgtcagatttggatagccccaatcaataatcatcagtggaatgagacgtataaccaacgaatcatcttgcggtaacgtagccggccggccgccttcccacggaggccggcaatggtgattcgttgaacattttgatcgattccccgctgctgacctcccagcgttgatggcgatccagccatatcttaccatatatccccgagcatccctgctaagagcaaggataatagtgggctataaggccagtcacaatgggggtttcactggtgtgtcatgcacatttaataggggtaagactgaataaaaaatgattatttgcatgaaatggggatgagagagaaggaaagagtttcatcctggtgaaactcgtcagcgtcgtttccaagtcctcggtaacagagtgaaacccccgttgaggccgattcgtttcattcaccggatctcttgcgtccgcctccgccgtgcgacctccgcattctcccgcgccgcgccggattttgggtacaaatgatcccagcaacttgtatcaattaaatgctttgcttagtcttggaaacgtcaaagtgaaacccctccactgtggggattgtttcataaaagatttcatttgagagaagatggtataatattttgggtagccgtgcaatgacactagccattgtgactggcctaagtaagctatatgtttatctgaaagagaaagataaacaaaaaaatagggagtattggctctcatgcaagagttaactgcacacaaactccaagaaatatgcattaaattcatggtgagagaaagagagaggatgaagaaaataatgataaacttatagccaatttactatacatgttagctttagacattgactaatagtaagtagtgagctctactattaaacttgctctaatgctgccaatggcaacactgttagcttccataattactgcgcattatactgcctcatttgaccgtggattttttttctctgcatttctgcctcctgttcgtggccaaaaattcagacaacgctgcatcagacgtgttatagtactcttgttatttagtatttgacttgaaggtcatctaatctaccggtagagaggcacattcgtatgttgctcattatagtggtacacttgttggttagtggtaatgctatccagtgggcaggcagtggcatctccattgcttttcgccattattatcaccgtgactccagctgcttcaccatgtgatttgctgaccgtcatgttggtgcatgcatcaactcttttcccatgtgtttcttttcacataaattgatctgacgatcttcaagttgcttgcagtaatacgtacagttcgtttggtaaaattcagagaggtgtatcaatagtaggagtagaatgaaccttgtgttcagcttccacgcaatgtcctccgacatgacaaatgacagtttatgggactagatcaaacgattatctatttcattatctttaaaaaaatcgacggttcagtcaaaaagtactgcatttcttaggataaattactcgttattgttcgtcgcgatgtgcagatagatgcagtttagtttggttttgcctgcatccacggatgataggtacttgacagaacaacgagcactatgcgactaagttggatgcttcagttttacaggaaaaagagcagaggactgatgttgattcaacctgcagtacctgaggccacaacactttgcctaagtcatgggtcgttgacatttgatatctataattttctttaatctatagcgtcttttactaacgaaataagattttttttctctgcctcaaaaaaaccaagtcaaaaggtttcaaagatgccatcttgcaaccaggtgccattccatgagggcagcggccattcatttttcacgagcttcactatttatgtatagtaccatcaaggacaagttcatttggcgttggaccagcggtgactactcaactctttggcaaagtggcggaccaaccaaatgtaagctttttctttggttggtgattcagcgatgctgctggatgatcgatagtatgctcagttaagggatggagaaccactcgatgtgccccttctgtgcgcaggaagaggagataacaaaccacatccttatctattgcgtctttgctaggtaagtcttgtgcaatctactccctccgtactagtaaaggaaatggtttaggataatgtttaagtcaaacattagaaatataaattatgaataactctcaagttattaagtttgaaaatgtaaaacttatatgaatagatttgtcttgaaaacactttcataaaagtatacatatatcacttttcaataaatatttttatagaaacaataagtcaaagttgtgttttggagaccgtgtcactgtcaaaaacgacttcctttacaagtacggagggagtattgatttttgatggactagctactctctcaccaggccgtcactcagtgctctaagattagtggcaagcttttgcggcatcgccaccataataagagtaggaaatgtctcgactcccttgtcaactatggaaggagaggaatgcccatgtccttgatgatgttctatctcaagtgctgatggtggtggagcagattgtggaagaagggaggcaatgggtggcgacaactgccaatccagttggagagttgttaggcacatagcttagttatgtttagtgtagtttcttcctctctcggtctcagcttaggagctttgttgggtgatcgtctaggcgtgtcactttttttctaatatattaacatgcaagaggtcatagcttaggagctttgctggttgatcgtctcggcgtgtcacttttttttctaatatattaatatgcaaagtttttttacgtgttagcatatatatatatatatatatatatatatatatatatatatatatattatagagagagtaacgtctctgactttttaaaggtgacaagaacagtagatcgcccattggaattatccatagaaagctgatgagtacgatgaattaaagctggtcatgggattggtcaattaatataacactatatgattgccttttttttcctccgcttggtcataacaaaagacagagaattgatacatagggctcggtcattttcttctagatacaagaaaattttgccccgttcttttctaattaagattcatattttatctcagttttcgttagcacacttttcaaactactaaacggtgtgtttcgtacgagaactttctatatagaagttgctttaaaataccaaatatgtggatttgtcaagtttgtaataattaaaacttaattaatcatgtgctaatggcattctcgttttccgtacgccaacttaattttcatcttcatcggttttatgtcaagtcagcatattttactctaccaattactagtggaaggtgcaatgaagctgaaaaaacatgtgaggaaaacctgcagattaaaaatatatttatatagaactgatataaatatatttttaatctttatatagaacatgtgaggaaagcttgtatgcaaaaactttagcatgcatccaagctttgaaattagctaatgatatgggaatgggccacattattgttgaaactgatgctcaagctctgaaagcggctttgttggatgaaacacatgatagaagtgtaaacgctgttatcattagagaggccaaatttttgcttgcaatgaattttaatgtccatcaagtcatgtattgtcctagagaatgtaatcgtgctgcgcatgagcttgctaaaattggtgcttctctgggtccacgaagccaatttgtttggcttgaaggattcccggatgatgtttgcaatttggtagctagtgattcagctggactacctgcttaatggaattgttcttcttcaaaaaaaataaaaatatatttatatagaactggtcaggtgaagaaatgctactacaggccaaaaatactggtgaactattattggacctgagcattattccgacaaaacatattgaagctgaaaacatgggcgaatcacctgtaaattaaaaaatctagaactgggcaggtgaagaattagtgctactataagccaaaaatactggcgaattattgaacctgagcatagaattattcagacaaaaaaaatatactactatatggcatcgtcgaagtgtcgatcgagtcgttgcatatttggtgagctgtgaccctaccatccaatccatggtcgcactcaacgcatcttataaattagttagatatttagtagttttaaatagaccgatacgtgcggaaaagatgcttcttggaatgttgtttgggattcaaatatttaaatgcaggacaagttggataaagtattagcgaccatttctcatctggagaagcagtctctgatggaaatacttaaacgtatgaatggaagcacacgctttcaaagtaaaatctctgatgaggattacttggcttgtctgcatttgatctgaaaaatccatgtagcttttgtggctgttttagtgtgggcggctgcgcacaaaagtctagggtcaaaaggctgggagagatgacaattatttggagagttttcaaccgatacattgtcaaaatcatcccatttctcctctttgaatagttccattttctctctttgactctggaatggagaagaatctttgtctctttcttttgttagtttaccctgataaggtagataaaatcttgcagctgctgttgatttcttcagagagagagagagagagataaaaagaagatttcttaagagcatcttcaacagatgtacaaaattagaaccccaaaaatcccagacaaacgcgagagatcatcttcgattcttgtactggcccagaaatgatgtgtacgcgggtggcccaacttgttcagtccacacggcctgacggcccgcgtgcgagaatagcccagcggcgcaagggagcctgggataacggcctagtacgcggggcgggggatgttccttgatgggccttcgcagcttctcatctcggcctatggcccaccgagcatctaaggccgaaagccgccacagctcacaggtgtgcaatgggcccggcactgcgcttctgcacgatcagatctgcaaaccgtaggtaaagtcgcatcgtcagggtcaagctatgggataagtgccgattcgggtggcttccatttttacgattctcacaaataaatactccgtacagtatcttgccctatctctatgcactgctgctaaatctgacgtactgctactacataggaagaagtcacatccagctacatgaatctggataaaaggtagtacagatttattgtcttagaaaaaatcacatccccagctacatgaatctggataaaagggtagtacagattcattgttttagaagaaatcatatcccctccaccatttttttttgggacgaatgaagtacttgtcacaagcataataaattttatatatctggataagtttttttaagctatttcccttgttttaaaatgtagattcattatattataaaatatcgtatcataataacattttaaaacaggggtaatatataatttgacattaatagtactcttacgtatgaaaaaacttgtctaaatatctctaattttattttgaaacaagccttacttgtgtggacggagatactccctccgtttcgaaatgtttgacacttgatttttagcacatgtttaaccgttcgtcttatttaaaaacttttgtgagatatataaaattatatgcctacataaaaatatatttaacaatgaatcaaatgatataaaaataattaataattacttagacgaatggtcaaatatgtgataaaaagtcaacgacgtcaaacatttcgaaacagagggagtagtacaaagcgagctcatcagtgttcactccaaccgttttaggttgtgtttagtttagcacaaagtttaaattttgattgaaattagagatgatgtaactcgcgagctcatcagtgttcactccaaccgttttaggttgtgtttagttcagcacaaagtttaaattttaattaaaattatagatgatgtaactgaaaagttatgtgtgtatgacaggttgatgcgatggaaaaagactgaaatttaaatccaaactttagatctaaacacagcaattagcaaataagccaaaacgaaccaacccaaaaatgagatgtgcatagccaaacaccatttactatcatgggcaattataagcaacccaaaaaagagaccgaactggattgagtgaagcaaactctttcttattcatcattcatagtatgtaccatgacatgccacccgcgaccgagaatatacattgccgagaggcgagagcccaaagatggacataaaaatttaaaaagaagaggtgaaaattaagtaaaaacaccgcagaaaaatagattggcgcgcttccacgctagctgcaaatatcgctctaataatctgcatgcttcggacggagaagcacatcggatatagagaggaggaagaagaggaggaagagatgagcggcggcggcaaacggcgagaaggccggcggcgagggcaggcgcacggcgacgagacgacggcgtacggagcgccatcatcaggcggcagcgtcgtcccaggtggcggcccagttggtggcgctgccgacgcggggcatggagttgatcttggtgaaggtgtcgaccttgaaggtggcgccgcacatgacgccctcgctgtccacccgcggcatcgccttcagccggttcatcgggtgctcgaagctcttgagccccccctcgctgtggaacatgcaccccaccgggaacggcgcgtacgacttgccgcaccctcccttcacgatctccctctcgtcgcagatcaccaccgacccatccgccgcgatcccccaatacaacggcacctccccatccgtactttgcatcgcgcaaagcgaatgaacgtcaatatataagaaaaagaaaagcagaacaatcagaaactgaagcttaggaactactacggcggctaaacacaactcctaacagcgggaaggggacagggccacgctacactcacaggaagttcaatttgaagcacaaattcatcaattcgattcagaaaaccagtctagtagtggtttaaattaccagggcggcgaagacggcgccggacttgttgtcgaagacgacgaaggcgaaggagccggagagatccttgacgacctggtcggcggggtaggggccgcggtcgcggagggtgcggtaggcctcgatgacgagcagcgcctcgttggtggagcggctgcacagcccgtactgccggatcaggctgctcaggttgtccagcctccccatgaacacgcagtagatgtcatccagcccacagaacatcctgtgtacacacccatttaccattattatcgatcccctacgttttaatcaccttaattattcggattcattgcctcatcgattaaattgatttaatttacctctcgtagccagagaggccattgcgggcgtggccggcgacgcaggcgagggcggcgccgccgccgaaggaggtggagaaggcctcgatggggtggagggcgtggaagtccctgaggatctcgtcggggttcttgggcttcgccgcgctgctccgcgggctgttcagctccgccggcgcgtgcgccacctgcttctggaatatggccaacattttcttcttcctcttgctagctagctccgacgaatcaaactccggcgccgacgaagacgaaagaacacgtagtactttagcttagcttagcttgagctgctgctgctgttcgttgcgtgaagatgagagacgtgtcgggttggcgagtggaatggaatggaggtgaggatagagatgtgcacggctttatagacgggatttaggatggcacgaacgcgaacgaaaatatcctatccatccctcgctcgcgcgcgctgtttgatgagcgtgttattggagtcagtgctgatgtgagaagccaaagcaagcagcgaacgggataaagacggcgagacgacgaggataagatcatcacgtaataccagttgccgctgccgatgtgacaccagtagtagtaaccggccaccttaaccgtgacgtgcggtgccctcaccccctacggtaccctgcacccaaagcctacataagtaattgtttactacttccgttttaaaatataaaaaaaattaaatagatataacacatactactaatctacatagaaaatttgtttaaatttatagtattaaaatttatccatctatataaatcttttatattacaaggcgaaaggagtattacacacctcctcgtgttggttgttgatacggttttcttccgtttctatcgagtcgctgcacgagcactgttttcttgtgaaattcctaccctgcacaagtgaggatgctgtacatggtctacacaaaacgtgattaaaaagaaattcgcaagaaagaaagagcaaagtagaacaaaagacaaactagtaaactgatgtcgtagatctgtagaacttcatgtttttgccgccggggtagccgagtaggatgaccggaggtgagcgaaaaacggaggaaacagcagcgagggacgccttttccgtgggctgccgccgttagtttggcgggagcggtttattatattaccccgtaattattgctcgctgaaccacctgtcggacacgtcatcgcctactcgaactgcgtgctcacgggggccacctctctacggcctccgtggacgcggcgtgccacgtaggctcgcgcaccgccctcacagcctcacccaccgcaactgccacgtgcgcgccgcctccttcccgtgggctggggaggtaaacgccggtgagcgccgagccgtacactgacagggtggggcccacaccgagcgacgacaaaagtgtgggcccggattggggataaggctggcacggtatggtcgctcggtacacgtcacccgcgcgtcggaccggagcgataaggtccgcgcgagcaagcggttgaaccggacgcggcaccaacgtgttgtcacgtgtccgactcggcagcgagtcaccttttttttttctctcttttctctctcttggcagggcggcaacgaacgtgtttatactaatagtaatcccaaggttgtggtcgcttgtacgcgtgttaattatggtgattaaaacctggtcaggtcgatcgagcggcgagcgatgagcagttgagcacatgcattggatcaggaggcgtgactagagtacaggtcgccaggtcggtagcgctgatcttggatggccagtagattggccagacgcttatccaggccagagttgttaataatctctatattgctacttagatgtagcttacggctgacagaatcctgctgatgagatctagtatcctctaccggatcatgacagtccaaactgtgtgtttacataagcagtatggaagatgtcaacagatgctgcatcgcaaggagccaaggaacaactcgcatgaaattgttgtactagtgtaagttactccctctgtgtttcatgttataaggcattttgactttagccaaaatcaaactgatttaagtcaataatttaatatattttcataataaatttgtcttggcttgaaaatattattattatttctataaatttaattaaatttaaagtattttgactttgatcaaattaaaaaaaaatcttatgacttgaaacagagggagtactgctaagggatcgagtgcatgcaggttgccagttgtaatagttaggaattaaaaacatatttattgttatccgatggtattgtagaaattctatatctatagccttttgcacgcttactactgccacacgctcatctcatgctcgacagctccaggaatactagctagtaagtcagaaacggtcgctttcgtcgtcatactttgtaattatgccattttaattttgctccaggagtacatttctttggcatgtttctatcctacgccgttggattcttgatacttgccaactttccgttctgctttactcgacggagacgtgcgtttcacaagctctgattggtccgagcagctgacggagatgtgactcagcagattaattacctttatttacatatatagcaccaataatccaccactagttaagttaaaactaaaaaaaaatcgatgagggtttaaggagtgtgtgggacagagtcgcactgatgaagattaactttttgtttgaaaacttgatcaagattaacttttatattaactgtcacttttcactggagcggtggtgcacacggcttggccagatctagcggcgcgtaaggtgtggtgagactcgtccatcggcgggcgcgtggaccgctgcgtgttcagctgccacatcgccacgtcgactggtttattcaacggcgtaccgcttcttacagttaacggtaagcatcggtacgtaccctgcatgataaacacctagctagagtacttactagtgcgtacttacaaaattcattagcgtactgtgcgtatatcatgttcaatctgcaccaaacgtcccaacatccacgggatctctccccttccatgtgggaccacctcaaacatgtggagcggctaagagcaaccacaatgtggcaaaaaaccaggtaacaagcatttatttcaagcctactacccagtagtaagcattgtgggaagaggtagtagttaatacctgatatttgtgctattgccggtaacaaccaaataa

SEQ ID NO: 980 - DNA, 2559 bp, Oryza sativa
atagccttcacccgttgtaacacacggacattttttccagtaaaaagaaaaaaagggaaaaataattcttcggattgggcctaacgtatatgagggccatgctttctatagcacctaaattagcccaaaaggaccgatcagttctattacgaacggattagcgaccattaattaagagagcgcgtgacggattaagcgaagcgaaccacgcaaataatactacacacgcgcgtcacggacaccacccagtcccctccccacaccacgcgccgcccaaaacctccgccgcgtttcgcaccaccaccaccgccgccgaccatggcctccttcttcgccgacgacggcgccgacgagctcccccgcaccgcctcccaccccttcgacgccgacgacgacgccgcgcccgatgcatcaggaggcgccgccgccgacgacaccggatacggcggctacgcctccttcgtcgacggcggcgtaaaggatgtggaggaggaggaggaggagatcgccgtggagtccgagggggtcccgatcggccacgtctccggagggttctcgccctcgcccttctcccccgacccggagctggacggcggcgacggccctatcctcccgccgccggcccagatgggggcggaggaggggatcctcctccgcgagtggcgcaggtgagcaccgcatctgatctgtccgggcctttgccgtttcggctactgcttgcttgctttcgctggtgctagggttccgacgcatcgagcgagatctaacgcttagatctgatatttcgcctaattttcagctaggtggggcggaatagagtttgtagtgaggctgtattatcgtattatatgtcgattttagttaggatgaaacttgaacttgttgtttaggaattgcagtgattgattaggctgaggcttcaactggttctgaattcttagctagtggtactgaatttagttagtgcaattgaatctggtttggcaggagctgttgttaaatgcctttgcttgtgaggaaagtttgttagctctggtactggtatatgtacaaaataatcgctagttagcttctactcatagaacaacaagatgcttgatcagtgttgcacacactccaaaggggaattgatgtctttgcatgtgcattaaaaggctcatgtttcttgtttagtgaagttaaaacactttaagtacttgaaccattcttctctatcatcatggtgtggaaatgagcataaggccaatctcattttgcaattcacccatggtctgttacatgtttcaactttcaagataagcctcaggcttaagcaataatgcagtacacgtaacagttttctgagttaatgagcaaatgcttagtttatcttgagctatcttacatgtttcttggtgaatggtgatattaatcctaggtcttaccatgatgatggttcgcacccttactccttttgatgcttgtcttaggatgctttaattgatcttaaaatcagcttgatttgccagaacataaatcaccatttttagtgctatgccacatgggcatggaacgtgctcggcaaaggtgtgtgccaacaggagcaaactggctacttgtttgtgcttctgaaatttgcattttgtctgtcatgatcttatattctgcacttgcacgctcttctgcacctgtcaaatttttagtagtttcatgtatatccattctcagctcaaattttgtaaggtggtaatgttagcagttttactaccagtggtatgtgtttttgtgcctaatttatcctgtgcttggtataatctggtcattacaattgcaacagtatattttgcattagtatatagcgcaggtgagccacatctgatctgtttcggctatgccatttctgctattgtttgtttgcttccgtgggagctagggttccaccccttcaagcgagatccaacgcttagatctgctatcttccctaattttcagctagggagggcgtcatacagttgtagtgaaattgtcgttaaggaaatggcaagtgatcgattagtttgaaggtacaaccaattctgatctggttctcatgcccctgcagtatcgttcttcaagagctgctgtttaactgcctttgcttgtgaggaaagttttctagctctggtatacgtacaaaataatcattacttaacttttaccgatggaacaacaaggtgcttgattcattatgcgcacactccaaagggggctgatgtctttccatgtgcaataaaaggcttatgttgatttgtttagtgaagaaaacctaagtacatgcaccgatttcttttttcagcctggcatggaaattagtgtgaggccagtgtcattttacaatacatgtatggtctattacatgtttcaactctcaagataagcctaaagcttaagcagcactgcagtaggctaacagttttgtgatttatgatcacaggcttgtaaggctagtttgtcttgagctacattatctgttttcttccagttggatatcttggtgaatcctaatatttatccagaacttactcctttggatatttatgt

SEQ ID NO: 981 - DNA, 732 bp, Oryza sativa
atcctgcacaaaagagctctaacagctgaaaatctgctaatccaccattgggaatgtgattggatatatcccctttgtagaagcgcctgtgaagacactgaccatctttttagggagtgtgatttcattagaaccacttggagcctagtggcggtagctcagggcatgcaaactgcgataaattcaaactccaccgctgaatggatgatggctttagctcatggaaccaataaggctgaatcaaaacgaagagtgggaattctgatcaaaacctggtgacacgtttggctacaaataaatgctaaggtcttcaagcaacaagagccatatgcacaacaagcggcccagcagatcggggaagacattcaagaaaatgagtttgtttttcagcctccttgatgaagtctgctctactcctttctttctttctctattgcagtctacctcctatcgtttgtctgctttctttttgcttgctgaaagttgttccgttacgtctctaataatacgctcctaagcgatttgtaactcatactccctccggattgataataccttgtcgttttggacaaggacatggtctctaaaaaaacaactttgatcattatttaaattgttaacaaatatatgatcatattaaagtattttttaagactaatctatacatgtagtcatcatatttgaaagacaaatattttaaaaatgattcataatcaaagattgtaaagtttg

SEQ ID NO: 982 - DNA, 1024 bp, Oryza sativa
ggatgcgcttgtaatcacgtggaactcgtcgccagacaccgcagatcttgcccgtggcattctgatagacactgagagtgcccgccaaggtggtctccagttgatgctcctccaggattacacccgcatcatcaacgaattgaatggcacgcggacgaccgattcgcgatgaggtgtagaaggagtagtatagattcttcttgtggaacaggaaacgggcggtggccaccacattctgcggattgtaggtggtgtacatggacttcatttcctcacccttgaggaaataggaggtgcggcccgttagcaacgcagcgtaatctataaatagggatcaaatgaaaggtggagataatccaggtgttagataaatacaatagttctcttgttaattaaatgtaggagctggtgaatgggattacaatttcccgcaggatttggcggattctattgggatctgggtgggtgtccggtacttttgtacttacgtttcatgttgcgctcttcctcttcattgggcacgggcacatccaaggctacatccgtatctgaaagatggagggaatacaaatagagaataagatgatgctgggcgataaggtacgaccttaaatggaatttagatagcaacaaatgcttcaaagcaaccgaaccgccgccagccattcaccatccatccagccagccatccagccagccatccagccagccaaccaactatccatccacaatttgtggacacaattccggcattcaaccaaaattccagttgaatgggtgaatggtgaatggctgaatggacgaatgccaggggatcatcatgaatggcaatgcaactatcaggtagagatcccacctccgaactaagaccttccatttccacctctcgcttccacccaggtggcattcattaatcgtgcataaattgagggcaggtagaaggtagagtttctcgaacgggaagtctaacctacatctaactagggaagtgctttgtatttgaggatgtgcggactctggggtt

SEQ ID NO: 983 - DNA, 677 bp, Oryza sativa
ggagtaatgggcgcccccaagtcaagcaacaagcatcgtcacttaagcatttgaattacttagagatgaattggcaccacagccgaagaggtcgggaaatctatttctccttgcatactaaaaaataatgctgtctttagttttttagccagtgatgctcttattagttttgttccttattgtttccaaatcaaaacttacctattttcttgatgataactgacatgctcctttgttttgcacatagtctgtagattatgataaggagggatctgtcttgcgtgtacgtggaaaaaatataactgagaacgatcatgtgaagattggacagtttcatactgtggagcttgagctgaagagacaatttactttgacgaaggtatgccctaaaatttgatcaaactttatttctttcgatttttaacatatacatatatataaattttgtattcatgcgtatacaaagtttgtatacatacgaataaaaaaattgtatacgtggtgtttttttcttggttttcggttttttaaatatgtatgtatttatatatataaactttgtatacgtgtatacaacaaactttatatacacgtggtgttttttttttgttttcggttttttaaatatgcatactttacatacgtaccacctattactactaggactgcctactacc

SEQ ID NO: 984 - DNA, 2850 bp, Oryza sativa
gataaggtactcgggaagtgctggattacattgggggcattcaaatgcgaacatgcaatagaagaatctgagtcttttgtagaaatatggtctttaagtggtgttcattaactaagaaatcatatcgaactctatctttgtttatgcctaaagtttgtgttaaaaaaaatctaagtagtactagtcagatttctatttgtgttttaaatttatccaaaatcactatagaaaaactcaataaaactggcagaaaaacgtctcgtgcagcaagcaaaaatggcccaatgccccaatccgattcgtggtgcgaccttgaaaaattttgctggtgggccgtcggaaaatgttcgcacgcaaagaaacgagcgcacgcccattttctggtgtggaagtggaacagatgctgcttcctctgtgtagtgtactgtctgttgtgccaggctgctcccttcgtttgcgtaatccgttcgtaatttcatttattggcgtctaagaaaagagaacgagcttttctccttgctgttatctacgcccaatacactcatacgtatcgtaagcaggttttaccaaaccgtgtggttatcatgttttcgtggttaccatggtaaccgccgaaccgcggggtgcgtggtgaagagtcatggcagagtttgcaagttgatatcccgtgtttactgcttagtaatcagtaatcacaactatgaccaagaagctcataagagtgagatgctacttcgttggcatgctacttatcagctcatttctttcccttgtaccagatgttccgcgttaccgagcttcacctctccggggccggcgccggcgccgaacagggactcgatctgctccagcgacttgccgctcatctccggcacgaacacgtggacgaacaccacggacagcgccgagaaggcggcgaacgcggcgaagggcacccgggacggacaccggggccgcagaaggaaaggaacgacatgggcaccgggccgctggtcagcctgttcacggagaaaccgagcgccaccgcctgcgcgcgcaggcgcagcgggtagatctccgagctcagcaccatgttgatcggcccgatccccaccgagaagaacgccacgaagccgcacaccgtcaggatgggccgcccgatcgccgccgcccgcggcagcgcgccgtgcgcgagcagggagagcgacgcggcgagcgcggccaggcacgcggtgatcccggccgtgctgacgtacagcagcggctttcgcccgacgcggtcgacgaggacgatggcgatcacgatgaacaccgcttggagagccccacgccgacggtggcggcgagcagctggctctcggtggtgatgccggcgtcccggaatatcgtcgggctgtagtagaccagcgcgtcgatgccggtgatctgctggaagagctgcacgccgatgccggtcaccagcatgcggcggatcaccggggacggcctcaggagctcgcgccacacggccttgccgttgccggtggccgtgacgcgcgccgcctcctcgatctcggcgagcctctcctgcgcctcgtcctcgccatcggtgaccttgagaagcaccgcgcgcgccttggcggcccggccctgcatgacgagccaccgcggcgactccgggatcaccagcagcacgaacgcgacggagatggaagggacgatgccggcggcgagcatgactcgccagttgatgtggtcggggagaccggagaaggcgaggttggagacgtacccgaggaggatgccgaggctgatgaagatctccgggaacgaggcgtacgacccccgcagcgtggccggcgtgatctccgatatgtacaccggcgccaccatgatcccgatcccgatgccgatgccggccagcagccggcccatcatgagcacggcgaaggacggcgcgagcgtcatgacggccgcgccggcctggaacacggcagcggcgagcccgatggtccatttccgaccgacggcgtcggacgtcctcccggcggcgaggctgccgaggagggagatgaagctgaggcacccgacgagcacttcttgctgcacttcactgatgtggaggtccttctggatgaatatgatgcagccactcatcacaccaacatctgaaaattaacagccacgatgtaacacaggatttgacaatttgtgcaaagatatttcatccatttgaaagtttgatcgattgttcacgagacaaacaatgtcaatggctgtctgagagagagactcagataaagattaacaaccataacaagtatctgaaccaaattaccggtcaaaatttacatttcatctgaatctgaagcagaatgggctgtcagtgatgataacttttcaaacactttcatcttctaaaagcatattaacatgacatacaatccccatattttactagctgcaaatcttgctttaatcagaaaataaacccctgattatgtgtaatacaaccaaatctgaatcaagaacagtcaaattcaggagaggggctcaccgtagccgagcaggacatggttgagggaggcgaagacagagcaggcaaagacgtatctcccgctgccgccgccgccgcggacacgaacgacgccgccgccgccgccgccatctccctgctcatccgggagcacgtcgtccatgcgcacgtacttgctcttcctccccaagaaatccggaaggctcctcatgccgccgccgttgcccgtcgccgcctcggtggcacgaagccccattctcaccgtctttcttgtgctgtgctctggctatggttggctcatcctcttctctcctcttgcaagctccaagaatgtggcttgtgaatgggaaaaggac

SEQ ID NO: 985 - DNA, 2852 bp, Oryza sativa
ccggatccatgtggcccgccgccgccgccgaagcttccggcattgcgacaccctcccctccggcgaggcggccgcgcgcaaatggggatttatatgtggcgaggaggttttggttttggattatggtgtgggtgtttgtctagttcgtgcggggtgcgacgtcgtcggcgtgcagttggagttgggaagacaacaacgagggcgccatttggatcaacaagtctcctctctcatctccctcgactttggactttgcagacgactcgactcgactcgatgatgatggaggcgccgccgtggcaaaattgctgctgatccctagtatcagggggatcggagggtatatccttgccgggggctggggacaatgacaggtggggcccccggggaggtatcgggccaaaattagccggaccgctcgattagataatgcgaaatgtgcatgcgtcattttgaggcatggaacataggatacatatcctgcctaggatcaagatgtcttggtttatgacattattaattttgtgatgctaataatgtttcatgctaagaatttgttcgtggttaggttaactcttgtgtagtatcaatggagtagtagtatcgctctttgtgtggttgccagtaattttcccctctccaacaaccaatcacatcgtttctactgtgcacttaggcctctcacagtgccgcacgttttgtaccactagcaatttcatttttcagatgaaggtccagtttagataaaaacatcacatcgaatctttggacacatgtatagagcattaaatataaattaaaaaaactaattgtacagttaggaagaaaatcgcgagacggatcttttaagcctaattaatccatgattagccataagtgttagagtaacccacatgttctaatgacggattaaataggctcaaaagattcttcttgcggtttccaaacgagttatgaaattagttttttttattcgtgtccgaaaaccccttccgacatccggtcaaacatttgatgtgatacctaaaaattttcttttcgcgaactaaacacacccgacgggttttgatgggagggttttgtactccccacattaaatgaacttattgggaaaacttcaatcaaatcttatcctaaacgttgatcggaaagagtagcatatttccgtggtggagttgaaaagaaaaaaaaaacttaggtgctgtacctgtgaagattgaaatcagagtttttctttaaaagaaaaatcagagtatatataatagttacagtgaatcagagttatgatactgtagtatggattaggcaaaataattgcattgcgtgcagctagcagcggatgtcggagaaatcgaaggcgcaaaggttcatggtaggggtgttatgttaaggcttgtttatatcccctcgcaaaattttacaccatgttatgtcgaatgtttggacgcatgcataaagtattaaaaataaaaaataaataattaattacacaaattgtatgtaaattgcaagacgaatattttaagcctaattatgccatgatttgacaatgtagtgctccagtacacattattaacgacggattaattaggtttaataaattcgtctagcggattatgtaatttgttttgttattagattatatttaatactttaaatatgtgtccgtatacccgatatgacacaccaaaactttatacccctgtctaaatacagccttaggccatgtttacatcccaccctaaaatttttcaccctatcatatcgaacgtttgaatacatgtatgaaatattaaatatagactaaaaaaataactaattgcacagattgcaactaatttgcaagacaaatcttttaagcctaattcctccatgatttgataatgttgtgttacagtaaacatctgctaataacggattaattaggttaataaattcatctcgtggtttaatgatggactatgtaattagtttttttattagtgcttaaacacctcatacgacaccctatgtaagacaccttaaaactttatatccctatatctaaacacctcctttgttagttttttttttaagaacattatattagctgtatgctgcactccggtgctgtgcccgcacgtaggacgagatcgacggatggaattacgtggagagcagttcacttcacgcgttacctagaaaccagcagagattcagatttcagaggaatcaatcaatcatggtgttggccggagttggagccacgtttgcgacgacgacgatttcaacaagtcaatttgcaactgtgcgatcctcgccggctagccgcgccgaccgcgatgaaccccaatgcacattggatctgagccaatggagaatcaaaaggaaaaaaagggtaaaattaacagagatgattaaagctaagtagctagctagagaccgacctgcagtccagcttgattattctttcgtcagattaattaatcgtgcttagctaatacggagtactagagtaaggcgccgcgtcaggctctttcttcttcttcttcttcctgtgaataaacatgcacattcgtcagtagccaccaccaaccttgcactggattaaagaaacagggactgcacgttctggctaccttagctagctacgattcgatcctctatctgcactctgtttgggttaatatatttcttcattggagagaagaccaccttagttcgcactgattagattccagcctagatcattagcgttcgtgcgtgcgtgcatgcttctgttcttccgtggatcgatcggaggttgggtgggttagttgctagtacttgctactactacttgctgctgaaaaggtggaaggaatccaaagagg

SEQ ID NO: 986 - DNA, 1410 bp, Oryza sativa
atccaaccaacatacgaaggcaattaaacaacagatttgttccttaatgttgcagttgcattgacaacagatcaatcaggatgacaaaaaagtaagggaaaaaacagatagatcacgattcaattatactatctcagtaaaatcttccgagtaaatcacaataacagtcctataattataaaggctgagtagaaaaatcataacaaccaaactaagttatgcaaaacaattccacatacagatctttatagctgaagtgtgaaaagattaggatcaagtaagagtgctgtttcccaggttacgaggcatggcaatgatacatatttcacagacaggccaatgaagtcaaagaatagaccatcctagcaagttgaaacaaattcacgcctagtgcaagaatctttcaccagtgcaaaactgtagtgctcaacaaccactcaaccaatttcacttttctatcagcaagatgtagccaaatgttgcatgctgaagcctacgctcaattactatggcaaaatgacaaaatgcattgttttccaaatagcccgttgatttgatctttagcctttttaacaatgcgggccttactgccgtactaaacatcatcaaaacaacaaacgacttcttttctgtcctactatctagacaacactaaaacgaaacataactttttccttgttgccctgaagaacaaggcagtgtgatggtttattattgtgattttttagaacatatgccagagtgccaaaagttatgatttaacagtttaacattcaatcgaaagatcacaaagttcgcacctgagatttggaccatgatagatcaagaacatcggcggcgtgacccaatagagagcatactggtttatctctgaacccaaacacacattcaggcacaactagatgatcagagccaacagacttccggctgctttgcatccttggcctcctcttcttctccacaaaacccccgtcagcacagctcaatgacaatgttgccagctccggcgatccattcccaacagctgcaagaaacgggctgcagccaccaccgttctcccttgccaccgtaccttccccgagcaattctccctttctttctccctctgatacctcccacacatggatgacacggtcctcgccagcgcttgcaaggtatcgtccatccaagctgaagttgatacaccagattgagcccgaatgggcagccaattcttgtgtcatgaacagcccggtgagctccttgcacgccttcccatactgccgcaccctgaccctccctgcattgcgcgagccgttgccgtcaaggctgtcatcggtggcggagctcaggcgccgcgcttccctctccttcttctccttctccttctccttgtccctctcatcggtgctgctgcgcccgtatgcaacg

SEQ ID NO: 987 - DNA, 5266 bp, Oryza sativa
taatgtgtgattaattaagttgtaattattataaacttaaaaaatggtttaatctaatattttagaacaactttcatgtaaaaagtttttacacgaaacgcaccgtttagcagtttgaaaagtattacttttatctaaaaatttatccagctttagttggagattcgaacagggccgtagtagaagatgagcgaacctggctggctgccacgcacgcagacgcaggaatgcgtgacacgggcgtgcccaccgtatagtgtgctgctgaccgatcgagctggctggtcatccagccgggatggatccacgccagccaatcccagtggccaagatcactgtacgatttacactgtattctgcatgactactagaggcaggagcagtacgtccacggtccacgtacttcgtacactaggagcatgcatgcatgctggtagactggtttgttggtacctagtagtacatgtagattgctcgggtgaaaatgatagacgatcaaaatccccaccaatcgtgtatctcgttaagttaaaagtagtactgtaacgttttctttatcgttttgttctagctatgtgtaaattctgtttttttctccagttttttttagtgtcgtattgcgctaaccaatagctaaacgattttgctagatatttatcatcaaatttctccccctaatatttgtcagatgtaattacagtacaattgtagtgtaacttgcatgtaattacagtacaatcgtagtgtaattacactgtacctataatgtaacttcgaagaatctctcgataacatgttatttcagtaaaatagaggtcgtgggaacaaatcctttcacatatgtgtgtgctgtgatttttttcttcctcactagaacaaatcttgtaacagatctaacgattcaaaattacgtgaaacttacatacaagttacactgtagttacatacaagttacagtgtaattacatacaagttacagtgtaattacattacgattgtactataattacatctgtcaaatttttagtagaaaatttgtcgacaaatgtatagttggtcccatagctaaatcggatatgaaaattttcaactgaccgagaattgttgagttttttttcgaacgcgcaaaagaattgcatgccaatatattagtagaaaaaaagagtgctacgcactcaggccccgtttagttctccaatttttttttctaaaaacatcacatcgaatctttggacacatgcataaaacattaaatatggataaatgaaaaaactaattgcacaattaggagaaaaatcgcgagacgaatcttttgagtctaataagtccatgattagctgtaagtgctacagtaacccacatatactaatgacggattaattaggctcaaaagattcgtcttgcggttttcaagcgagttctgaaattaattttttcattcgtgtccgaaaaatccttccaacatccggtcaaatatctgatgtgatacctaaaaattttcttttcacaaactaaacatactcagtcaattgttgagtagaaatgctatccttccgaccgttttcatccctgaacgcatgtacgtctggtgcggtgcgttgctctgctcgtgtggccagaggcaagaggcacgcatcgcgaaccgtgtgtacagggctagctagcttagcgaggtggtacaagttgaggaaagcttaacgcacaaggagagtatatctcgctgcgtcaggcgcgggctccaccggcggccgcccgccaccttccattccttccttcctcgcgcctccgtctatatatagcagctatgccaagctcgctcgcctagcctagccggtccacgacgaaaaccaacacatcaccaactgctcaggcataattgctttgccgccctccaggtcggactgactgctacgtctctgtctacgtataccccagcctcctcgtcgtcgtctcgtactaggatcttgctacaaatagccggctgcttgctagctttagcttcttccttctcccgagagagacgatcgagatcacgcgcccacagaaactgcagattaagcggcagagattgtagatagcgcgaggttattaaggccagcagtctgaccgcgcgcggcatgcccttctgctgctgcaaccgaccaaatggctcctgcgggtgcctcctccccgtcactcgtgctcttcggcggcggcgccaccgacttcaacaagcgcccggccgattccgacgcctcgccgccgcaccaagtcaggtaattactcgggtacatacttaattacacttgcagatgcagttgcatattagctgtggaagtgtgtagggatatacgtgggttttagctagtgttgctgtttctggagatttgttgagaatgtagcgtggctcgctctttctactttctagagtttgtgtttagccgttctctggcataagtcggtctgactgattgtgttgtgtaaccacaatttttttattctaatatactacgtgtaatcttttttgcgtgttcccgaaaaaaatgaagtgcgtagggatcggccagtaatgggaatgtggtttttatttgcaaggagatcgcacggggcaccagtaaaaaaaccaccaccacctggagtgcccgcgctgccgatccaccaaccccaagttctgctactccaacaactccagctcgtcgcagccgcgccacttttccagcgcctgcccccgttactgaacgcacgggggcacgctccccaacgtgccggtggccggcgcctctcaccgcggcggcggcggcaagcgccgcagggtctccgccgacgccgacccttcctcggcgtcgccgccgccacccacgacttccaccagggacgcgtacgccgacctcccagccggcttcccgttcctcagtgacggcgccttcctgccgcagttcggcctcgccggcgttgcgccggccgcgttctcttgggcatcggctgtccctgacttgtacaactgcgggatcgcgccgtgggacgatggaacggcggtcaccggcgcggcgtgggacaacttcgccgacatcgccggccttgatctcagctggccgccgccgggtaactgacgaacagtacacagctggtcgctcgtgttttggggggctccggttttagcaaagcagcctcaagtagtgcgttcttcgatcggtatgcaggtagtgtgttcttcgatcggtatgaagtatattttgctgagctagggattatgatataattattgggaatgtaattaagcagctcaattatccaacgtggtgtttgcagttttcttctctcaccaatttcatacgcttgcacaatgatgtggtgattatcattgggatcagtgaatcgtgatctgtagctggaagatgtgtttacgtatgtgcagtgttaatgacaataataagagtttgttgccatcaagattctagcatgtgctcctagtaattaaatgaactgtagaatgctgaacagtgtagttcaataaaagccatactgggagggaagattgcacaatggattatcatggagttagaaattatcttcatatatcaatcagtgtataaccaagaaacaatatatgaacaaacaaatcgatgtattggttgttaaccatacaattacacaaagccttgtatcaacagagggtaaaaaatagtgtggtgcttagcaagttggattgagctactggggctcccaacctgacagcgaaacagggaaatcttttagctagtaaaagaactaggtgaaatggagaaaaaactaacgatatctatacagtaaacaaacggacatctctgaatattctcacactagctttacacttgaaccgggaagccgaaattctggaacaccctaatttcaccaccccttcctgcagtgacaatcaccaatccccaagctgaccggcgctgaacatccaaagctccaatgcaaaggtcggatgagcagtgaccaggactgctcttggcagacgattgtttctcgtcaggccaggacgttgatactccatccgctggaggattgcttgtgcttgcaacaccttcacaaactgggcgcttggtgcatctattgacagtgccattcagatcatgctcactgttctctacaggggcatcccgacccgtgttcatcactgcatcgtctgaatcactgtttctgctgctacgggacccgaatgagccacgggattcagcgccgggccatgtgatagccacagtgacatcatggcaatggaaatgctcatatgagttggttacatcaactgcactcctgcttctgctcggatgggaagtattgtcatgcctccagacatacacgtgggagtcctcactggcacagaccacatatttcccgtttggagctacagaagcggatatttggctacttgtatttcggaaccctggtgaaaagatcaaataaaatgtaagtgaaacagtataaatactggcctactgagtgagctaatgcaccaatcaagtgcacagttcttgtgattagggcctggtttagttcccaacttttccatcacatcaaaactttcctacacacacaaacttccaacttttccgtcacatcgttccaatttcaatcaaacttccaattttggcgtgaactaaacacacccatcgggggaaattggggaaatggaacctatgatttgatctgtgaacatgttaggaactgaggtaaataggtgggatgtgggggttttccaaagtatgaatcacttgaatttgggttacttactactttaaatcggccaggttccttctaggtgttctacatccgtcaacgtctagaggatacacaagtacagtgaatgaagcattacctttaaatttgtgaacgagttcatcaccattaacaacacggattcttgaatctgcagaggtaatcaggacttccgacgagcttccaggagcaaactgtatgaagtagagatatttagcatgtacaagaggcatcaggctaacatctaactattagagtacagaccactctttcttaacaaatgtccgccacgcaattatgcactacctggaagccagttatcttcttctggccagacttcttcttcctgattcttagttctatctgacttttgtactgaagcttcttttctgaaaagacaaaataaatgtgcaagctcattattgagggaaggcaaactctaaagtctctactcttgtttcctttgagatcatgctattttatagctacacaaataggaactcttagctagaacctaagattagat

SEQ ID NO: 988 - DNA, 9735 bp, Oryza sativa
cttcttgatcaaaactcaaattctcaatctacaattgtagtagttagcaatcaagtccataaagctcaaaaagaagacaaaattgtctggcttgaatacagcttgagcgacagcatagtaatatcagttcatcagttaccttgtgtaacactgcaatatagattgatcgtccaacaacggcaataactcttcaagcaagagaaactagctgaggatacagaggtccaatctaactctatgaacacaatcgatggcctacaacacaagtataaagggcatataatcacaaaggttcctaaactgttgcatttcatcatcacatttcagtatctttcgaattcctgatccaatgtcaacattgttgtctttcttcagagaagcttcccgcttacactctggcactctgcatgtacaggcatttgacaatctgagccggaaggtgcttgctttggcacgacaacaaacttcaaattttttggagcacatttatgtatgtgtagcttgagaataggacaaacaatctcctgaacctataaacacaagcaaaatgtcagtttcctgaatatattgtaaaacacacaagttttgagaattttgagccccttaaatgcttcatttctttcccatcatgcagtatcacacaaaaaacaagtctaacaatgagttctcaaaaatacaaacaaccagtcttacagtagtcaaagaaacaattgagattgtatatgttggccatgactttttttgggtgtcaaagggatgattcttatgaggtactacgtctatattgcaaggtagaaacttctttttaagtgataattttgaaccacacaatatatatagtacttcctagaagtagacaacatttaagtagtgaaaacaaaattttcaacttaccaaacccactggcttttgtgtgaagccattgcctcaaagcttctggaagggctattattaacaagagtataagttggttgttttgagcttgaggagagggtggaagatagccaaatgtcaactggaccactgtacttgcgaaaaatgttcaagcttacctatccaaataaacaggcataatccaggttagcttcttcaaattaatgtattcacagggaattgtttagaggttaactagcctagtgccaataaaaatcatagaaattagccatcaaatgagatagacacatcaagcaattcaaatctatgcagagaaggcatgtgtagtgttattgttttctgtctttacttccaacgaaaatgatgatatcaatgcatttaagcacgcaattcataaattcaagaaagcaatgcacaggctcttttagactctggaataagtagagtatatggcaacgtgaagaaaataaagctaggatatcagggaagaattttacaagctcccatgcttcaatgtgtccttgcccgttgtcacgcagaagcttgctgttcatagaaaaatagatttattaagactccaaagaaaaatgctagaaacaccctgcagaaatatgctacatatgtgtaatctagactgtcataagtgaaagaaatgtaagcaaatccggcattaaatagatggaataagtgcacatcaccaaccaagagctacaggccatagtcatgacatacatgaattagccaaactgttcaattaaagtgtgaccccaaaacaacttatattatatatgcatgaaagggatgagatcatgggagagaaagagagaacccttacaaaggggtgtggtgatgggaaaggggaggccacagttatgttgaagttaggtaatacactttctttcggcagaacatgttgtgacttgacaagatatgtaacttaacaactatgtagatattatagaagcttgtgcggacaagctaacaatataaaatacatcagtaccagaaaatttttcttacaagagggcatcaaactcaaacagttgttattctaaaaatgctaaacaacaaagttgaactaaccagattccatgatgaacatcgcaatgatttggatggcctgatactcctcgggaatcgaaggcaacaatctaaaatgacaacaaatattgcaggagtaaataggggaatcggaatgaacaaaatgcaaaatttccatattttgaggtctagaaaatcaggacgaaaaaggcatttcacttgcacaatcatatgatgtactcaacctgggtacctgtttgcagcaacaccgcactgagatttggaacagattaactaatacagttttaaatggcatataatacagataggcgcacttgatgctcctgtttcttcactatattttttatttttaaagttgttcagaacagtaaagctcgaagcgaaacataatacaggaaagcaccaaagttgatagagtatagatatgaattattattactgggagatcatctgaatcttgacatggaatcattaccgtgtcgatattccataactgggattgtgccagggtaagttctgctattagtccatgatcccaatttttatgaaatccatcctacaaggtacattgtgtaaacttaagtatatatttggaacagtacctacatacaagcaggtcggcaaaaatgagctcataataaagcacctgcagttctgagtggtccaagactttaacttgctcagctggaatctgtaaatacatgatccatttcaacacatttttcaatggacaaccgaggtcaaaagaccctctccaaggggtataatggagcagagtaggacttattaccttaagagtgacacaggcaaggtagagttcctctttgcggatatttccaaggccatcagcattgcctaatatggggattaaattgacaatcagaacgaccgactcagatgaggtttcttatccaaataatggcgcccttaaagagtagaaatacatatgattgagctgagacatactggaaaagcgaaatacgcacataggatcagagtgtagacgtcttttaccttgagacaagcacaagatatgaatgctgtgaccttttgacttgaggaaaagaatagtcggagcaaaaaacctgtatcagcaacatgacaatcaatcagaatcaaccaaaacaaatactataaacaagatttcccctaaacagttccacaaaataataaaaagttcagctgttcacttagtttcatttctgtaatcatcctgcttttgtaagaactttgtttcatttctgttaaatggaaatggagggagaatgctcccttagctcaaaaaaaaaaaaactgttcacttgttcaggaatttcatcgagcaggtaccgtgcacaggagttagcctattaagcttcattgttagcggttactggaactgtagccccacgatttacacagcgaggctcgcaaacgataagagacatgaggaggaagaagcagtacatggattcgtcgtcggggtgggcgagaacgaggaggacattccggctcatcctgtcgccgcgaggaggggagaggaaggtggagttggcaggcagacacgccggcgaggaggaggagagcacccgccccagagaaaccgcccacaggagcacggcccccgccgccatgagcatccagatccacgccatagccttttccggcggccgcgcgcgccactcttccccgtgcctgtgtggctgcgcggtggtggactggcctctcgtcggtctcctcgagttctcgccgacgcccagctcgccgccttcctcccccgtggcgccaccgctcgccggtgggctcctcgtcccctcgacgtcgacgacttccggcgacgaatacggtgtgacagcgctcatggcgtgagaagtggcttaatgggccagtgctggtcggcccatttaaatgaagaaacgggccggttggattgggtactgggccttgcatccggcctggagcccaccatcctgtttctaattttcgtatggattaattaaggatcgtattaatgtcatttcaaaccatactattttcttaagtaaagttaacaaagatacgcattcatttagttttttaaccaaactttggtaaatataaaataaatcatgtcaaaacttgacaatattatcaaattgccaaaatttggtaaggtttattttggctcccctaaacaagtggttaattacttaatttaggtggacaaatcgataatgtaagcctgtggttttattgcatgatttgtcgggtaaaaaaaaattactaattgtacatcacttgacaggcctctctcactgaaagctgaaaccccctaaaccccgaagaaattaacagttgaaacgaatgggtaaataataaactcagacgaggccgacgagcttctcgctgaggtcccagagcttcctggccttctccgggtcgctggcctcctgcgagagctggttctcgaacgacgccgagtccttgttccagctccagtacacgccggacttggtcaggctcgggtcgcccaccacctgcgccagccgcttcccggactccgcctccgacacgaaccccttcgtcacgaaccgctggaacggcgggaacagcagccggaacagcgggatgtgctcgcggaacaagcccgtcgtcgcgatgcaccccgggtacagcgacgcgaacgtgatcccggtctcctcgtggaatctccggtggaactcctgcatcgtcagcatgttacagatcttgctgtccttgtacgccttggcgccgtcgaagctctccgcgccgtcgatcatcgccgacccgttctgcccgcggagcccgccggcgagcccccggaggtcgcctagcccggccttgggagggacgttgccggcgagggtgttggtgttgccggtgatggagccgaggatgatgagccgccgcgacgggtagtcggatttcttgaggtcgtcgagcatgaggcgggcgaggaggaagtggcccaggtggttcaccccgacgctcatctcgtacccgtcggcggtgaacgtcggctgccgcgccgtcggccggtagatggcggcgttgcacaccagcgcgtcgagcggcatgccggagcgccggaagttgtccacgaactggcggacgctgtcgagggaggcgaggtccaggtgcatgacggtgtagctccccgccgccatccccgccgccttcgccgccgtcgccgccttcaggaagtcgcggcacgccatcaccacgtgccacttccccgtctccgccagcgccttcgccgccgcgagcccgagccccgacgacgcgccggtgatcaccaccaccccctgccgcagcgtcttcttcccgtccgccttcgacgtgcccgcgccggggctcgccaccggcgccgccggcgtcgccaccgccctcaccaccagcgacggcttcttggccttctggctcacgctaaggaaccccggctccttcaccaccgcgctcaagttaccctgatcagtcgtcacacataatccaatcaaaaacttgttcaaaatgcacaaacttcacacaaataaatccatttttgacagaattcaacaatgcagatgatttttgggtgcgcattgttaccttcttggggacagagagagcagagggcaggagtgcggcctgaacttggagagccattggtgtgagtgtttgagtttggagtgagctcaagtgtactatgtttctggtgtccttttgcttcgtgttggtgaccagcaagagtgagttccggagggtatttatacacggacccgaggagcgaggagcgccacgggctaaggataagggggtgggccccccaccacgctggacgcctcccagccaatcgcagctcgtgcctcggattttccgctacgatttttttccttcgagatattgtcctgtgaaagcgacacgtggtgggatattttttcgtaaccgacacgggggacagcgacgtcgcgggatcttctgcgcatggctgcccgtaacatatggtgacgtggcgttgtgtgattgggtcgtggctatcgcgacccgtgtgcggtgtttgggcgtggaggacgggatgggagtcgcaaataatgcagcatgggaggtgtgggccactgatgggtgggaccagatagggcagatctgtcgttttgcgtgggaagatgacgcgagttcgtgcccatgtgaacgtgcggtaaacgactggctgtggcccgagacacgtaggaaaggcccattgggtctgtgctgacttggcaaccgacgtggcacgatatccgttgcacttttcatcgcctcttcttggtgtcagcatcgcagcattggtaagattttcttttcattgacaaatacagtacaaaagtaggtgttcataaggcgcgtagactcatccctataaacacacatatgcacactctatcctataaatatattgaaaaactaagttgggagattgacgaaatcaccaccgacggaataagatttaaatcagctgaggatagtgtagtactccctccattactaaaagaccatctttcaactttaaccagttactggttaatctgaccagtaacttgacccaaatttcaactttttacgctaacgcataaaagaattacacgtcaatatattagcaaggaacaaatttcacttttcaagttgcaacttgcaggtagtacgaaactatttctaatctctgtccaaaatgtcaggtaaagtggtaatggcttgcatgaaatgcgtacaccagtctcagttctgaaatgtcttactagcagttaagccaagtatacttttttctaggtgaagttaagggcatgctcagcttacttggtcacaactgcaaacacaagagagtttttgctgatggttatcgctgttgcatttgtgttgcgctgcagctgcgaccaactcaatcatgcaaggcctagcaagtacttgatgcggttgtgcggaatagtgcattgtctttttggttatgcttatccgcatagtttattaacaaccaaatagtatatattataagtaaaaatttatacatgtgtctatagcaatttaaaagcaaacgccataaaataaaaatacgatgaaaaatcataaaatcatatcaaattaaaaatttaaatttaaattttagcttacaaatataagcataagcaaaaatgataaggctattcgatccagaagctgtctctcggcgaacaaaatgaacacctgagagacaaaatgaacaaaatgaagcaaatcttctaattaagcccaatacgtttcatttccaggaggcccattgctatgggccccatcacttcctcatgcaggccacaaaaacctgggctaattacccacaacaaataaagcccaattgcccatgaggccattcaacccagagattcaaccaagatgcatgacgagttgccctctggtcgttatcgtcctaatcagacggtgcctattttagcttccttctccatcaggatctcgctggaaagtccaacttacctacatcagtatatgacatttttcattcacatcaatcttagcaagcatgacataatttactatatgatattatagaccgtcgtacgctcatactaatgtgattatctgctgatgatggacatcgaccagcacactcgtccttatcgtttgaccaaaatgacctgatccaactaatcatatacatgcgagatcctgtgtactatagtaatgtattgtagcgctaattaaattgagatgatgggcgaagaggcgtgcttggtcgagagaggtaggatgcgtgtgtccacgaacaatagaccagggttcagcttaaaatgtttaactagacgcatgcagatgcagaagcttgcgagttgttcatatgataattattaattcagaatatattacagctgatcgatcgagctggtagctactgtagctagcatgcggccgcgattccgatcgatccatcagctgggcgtcgccgtcgccggtaacattggtcggtaggacaccggattttaaaaatgttgatggtttctgaagcaacacccaagtgttaattattggagtatattgtgtgtaagagtgacaggtgctaccaaaaaaaacgctgttcaatctcccgtaggagcatattactaattgctagctgatgatctatgattaagctctgactgacttctcgggggtcagcaatgctcgaagctactagaatacaattccgttcccagcaacttgtgaacttttagctagcgatcgaggaataaaagctagatgatcgagcaagttctgaacattgttgggttggtgtgtgcatgacatgtgctaatcctaactgatgtaattgggatcggactatgtgcattcgtggccagtagaattggaaggctccacggcgctcgagtcaaggcgcacgcccgggcatggtatggtggtcaggcatcggcaaacgacagacaaggcagccaggcagagcacgttgtgcgtactctatatccaccgaaagctagtgcgtgccgtctatgttctgtattgacacaagtactatctttctattctaaatatatatatttatctttctattttaaatatattgtatatatcgttgttaaattttttataaatgtttaaccatttattatatttatttttcaaaaaatataaaagatatactccctccgtcccaagaaaaggcaaaccctgggtttccatgttcaactttgactgtccgtcttatataaaatttttttataattcgtatttttattcttgttaaatgataaaacatgattaatattttatgcgtgacttgtctttttaattttttttataattttttcaaataagacggacggtcaaacgttgggcacggaaaccagagtttgtctttttttggacggagagagtaagttgcttcatccgttacacaatgtaaattattttagtatttttcatatttatattgatgttaatgaatctaaaaatactggaatgacttagattgtaaaacggaggaagtatgtttgaagagccttcagtatgtaatgaattaagtcataagaacttaaataaaaaatatcagccgcacgcgcacgctcacgcaccaccttgtttcgcgggccgagcgtcatacaagggagagcgtgatgcgtgtctctcgcataacgacatcgttacgttcacacgaataagcagcattcacaataggcgatggcaatcacaggataaaaaacacaattatatatcagtccaattgttcgggctcgtatggagaaaccgcgctctcagtaaacaaaccaagccaaaaaaaaaataagattctaatttgaaactaacatcctctagtaatttactatgggctacatacggcggccgaagtatcaaagtagactcatatcagttgacggggtgttgacaggttaattattttccaagtttagtcgcttcatggttgggggataattgatcaacccacccggtcagaaatcccagccgcagagaattcagattccaatttactgcttttcacgagctacagggcggcagcgcgctgatgacaaaccaaaccacggatgcatgcgccgatccgacgagatgcactgcacgtatgcacgcaccgtggctgcgtcggccgacaggtcgcggtgcgcgtgtgccccgcgcggcgagcagcgggcagcccgagctggggccagcagccgacgcgctgcactgcactgcactgcagagaagcgagcgagcgagcaacgcattcgattcgattcgagagtaggagaagcaatgcaaggcggggggcgacggtgacagcgcaatatttcgcggaggcggggcccgtcc

SEQ ID NO: 989 - DNA, 3468 bp, Oryza sativa
  unsure (1)..(3468): unsure at all n locations
cttttgctcaacgccaaattgtgtagcgttgaatttagacacctcagcgccaaatagcatgacgctgaatgtacgttggcacgctgacttagtctcccatccgtcgtggcaccgcattcagcgccagctaacgtggcgctgagatgtctaagttcagcgccacatgatttggcattgagcaaaagggtcagatttgaaataagttttggcagcggttcatttgtaaaaatagtttttgcaaaaagtcaaattgtcaaaatttgtatcaggaatctgcccacattttcatggttgtgttattgtgtattcagtagtaaggcttagagtgaaattttggagctgtggtcagtcattttggcatgaacttgcacaattgctgaattgcagagtattaaacttgaggtatcaccttgttctgaatattcactcgagataattgctcttataccatgtggttagatgtcaaacttccatttggcataaaatttcttctatttgctaaaatatcatataactcactggaaattcgctctttttcaatgaatttgaataattcagttcagaatctatttacattcactgtaatggtttcatggatgtgcaagtgtagcttactagcattaccaactgtgactgattgactggcacagtggcaccaacatttacactgtatgattcgttgatgctacagaggattctgaagttggaaaagagtatgagatattttctttcctattagtgctctaaaacaaaacaatttggtttgcaatttgcattcaccgcaacaccagtatctagtaatactgttaaaacccacctaaaaaaatggccaagttcacattgatccatttggtcaataactcaagatcctcatcccttgtgcaccaggtgctcgccgtaacggagctcaacctttccccgcgccgcttcgccgtcgcccgccgccgcgccaaagagcagctcgatctcttcagcgtcttgccgctcgtttncggcacgtaccggtagacgaacacgacggacagggcggatatgacggcgaagacggagaaggcgccggcaaccgagatggcgcggcagacggacaggaaggacatggccacggcgccgctggtcaccctgttcatcaccgcgccgagcgccgccgcctgagaccgcagccggagcgggaagatctccgagctcatcacccagcagatgggccctatcccgacggagaagaacgcgacgtcgccgcacacggtcaggatggcgacggcgatgccagcgctcctggacgccgacccgtgcgcgagcgcggcgagcgtcgccgcgagcacgacgaggcaggccgtcatgccgaccgtgctgacgtacagcagcggcttcctcccgacgcggtcgatgagcacgatggcaagcgcgatgaacgccgtcttgaagaacccgacggcgacggtggcgacgaggagctggctctcggtggtgatcccggcgtcccggaatatcgtcgggctgtagtagacgagcgcgtcgatgccggtgatctgctggaagcactggatgcctagcccggtgatgagcatccgccggatcaccggagacggcctcgtcagctcctgccacaccgtcttgtcgccgtacttgccggcgctcgcgacggcggcggcggcccgctcgatctcggcaagcctctccttcgcctcgtcctcgctgtcggggaccttgagaagcacctcgcgcgcctcgtcggccctgttcttcatgaccagccaccgcggcgactctgggatcaccagcagtgcaaaggcgatggacaccgacgggaggatgccgacggcgagcatgacgcgccagctgacgtggtccgggaggccggagaaggcgtagttggagatgtacccgaggaggatgccgaggttgatgaagatctccgggaaggaggtgaaggagccccgcgacgccgccggggagatctcggcgatgtacaccggcgcgatcatgacgccgaacccgatgccgacgccggccagcagcctcccgaccatgagcacctcgaacgacggggcgagcgtcatgacggccgcgccggcctggaacacgatggcggcgaggccgatcgtccatttccggccgacggcgtccgacgtccttccgccggcgaggctgccgaggagggagatgaagttgaggcacccgacgagcacttcttgctgcacttcattgatgtggaggtctctctggatgaagagaatgcagccgctcatcacaccaacatctgggaacaaaaggtttattaccacacagaaattgaattatatatgcattttgtgtgtaattatcttaaacttaatttttgcccgggtgcaatttcatcttaatgaaatcaattccattatcttaaaagaaaaagttagttctagtcaaatttttagtgtgttgctaaaatgctgtcgaaaaaaaaaaagctactacgagctagctgccgttgactgaaattagcatcgcgatgattccaaataagtggactattcgatatcagtagtgaatagaaatccatctgaacaaaacattgtgatactagttactactgattcttgattatgaagaaactgcattgctaattactaaccagttaactagtaaccgtagtttagactactcaacaactcctactaaacgccacaaggtaacagacatggaataagctggagagtcgccatcaaagaccgaagactaatgaagaagaaatagtcaacgcgattggccaaaacatttcctactccttgtgcaggatcaccaagaacttgccaagatccaagcacgcgtatcgaaattctccatcgattcagccaacacgaacacatatacgtgcgagagagattcatgtggaaacggaggagattagttaccgtagccgaggaggacggagttgagggaggcgaagacagagcaggcgaagacgtagcgcctgctgctgtggctccggcggacgcggacgcctccgcctccgccgccgacgccgtcctcctcctgctcctgcggcagcacgtcgtccatgcggacgtacttgctcttgccgccgaagaatccagggaggccgccgccgctggccgccggcggctcggcgccggggagccccatgccttctgcttatctgatgcgctccctttgctccgtcttcctcctctccggcgagtagagggcggcgcttcgaatggtactaatggtggtatcgcggattgctggatctgaggaggaggaggaggaagaagaagtggaggcagcgagagagattttataagtttctaattctgtccgcttttgagttttgacacgcgatttgctgttcaacgccaaagcggaggaggtcgaattttcaaatgggtcattttgtgttcaagcccttgtactactcgtgatttctgacaagggtactgtgggctcttggggcattgggctgggcagtacttgcacttggggatcctc

SEQ ID NO: 990 - DNA, 40167 bp, Oryza sativa
tcttcagggtttgaaaatagatgataaggatgcttggggtgatccgtttactatcacaccggatcacgtgtttatttaaggcttgtttggaggactgatatttgggccaaaccaatcatggtctttgatcaattctagcagtgcacccacaatgacaatcctacacagagcttgagaacaaataggaaggcgttcaaatttcactctatagtcctgttataccttgtaattctgggggctcaatattaaatcttcaaacctgttggaaatccccttcttcattgcgttaattttcgttgttgtggccattgcggtgtgctgacccgtcagcggcgcccggggggggggatttagcagctggttttgctgccttccggttgctcgtctcggtggccctcggatcgtcatccaacagtcgtttcggcccctcgtcttgctgcggcgtctggcatccgtccgtcagatcacgatccaaagctaactcattctctgcttgtttccccgttttttgacaaattgacccttttcaaaaacttatttcgaaactaacccctgccaaaaacttcaaccaaaaataggccgtttgctcagcgccaatacgcttggcgctgaggttgggcgtggcagctacctcagcgccaaccgcattggcgctaagatggcgaatctctgcgccaaccgcgtcggcgctgaggtgccaaacttcagcgccaacgggcctggcgctgaggtttggtacttagaggccggccgaagccgcccccaaccagcctctcctctattctcccccaccgcgcgctagggttcgtcgccctctcttctcccctcaccaaatctcccccaaatccactcaaatcgaaggggatttcgtcgggattgatttggggatcgattgagaaggtaaactcctctagaaactctaatttccccccatgttttattggatatttcgcattgttttggttccaaccgtggtttgataattattggctcggattgggatgttaattggataatgtgggtggggatgtagtgcggaagatacatattaatcttgctccatttggttcatgttgatttgtgggtggggatgtagtgcgctgaccttcctagtctcagcgccatttccgctggcgttgaggtcctccccccctcacgcaagccagacagaaggcctgctgggtcgggactcggccgaaaaggctaagtcccacctcagcgccgacgggtgggcgctgaagttagccagctcagcgccgatgtgcttggcgctgaggtagatgccacgtcggcggggggatcggctcggccgccacggtggcacgaggtcagcgccatgacctttggcgctgacacgcccaacctcagcgccaatgagcttggcgtggagccgacagtttattttttgttgaagtttttggtaggggttagtttcgaaataagtttttaaaaaggttcaatttgtcaaaaaaaaaaacggttgtttcccttcctgctccggctcccgcgcaatcccgcgatggcaatgcaaaagccttcgcttctacttccacgagatctacgtgcggcggcacacccaacgcatgcatgacgcgcccctgcatgcatacatatcacctcagtcgtacaggatcggaactcgtacaggccaaataatgttcacggtctactctttaggtactgtttagttgacacccacaacttacttagtgttgtcatatctcttaattaagttagacaagtttaatagatgattgtttagttcataaccatatttatggtaagatttattctccattacatagtccacatatgtcattgagataaaaaagtgtggcaggagtgcctcatgctagctaacgagtggttctaattttattagtcataccttagacaagttagccaaaaatttgtgtcaaacttgggtaaattgaattacccaaccaaaaggccgtttattatgcctaaaacaatgaagagtttcccacgaaatatatccattaagatcggctaatatatggggcccaaattttataagacaaccaacaattttatccagaataacttttattatgctcaagatatgaagagttccacataaaatagacctagttttcatataaagaccatccaataatacatttgtaaattccattacaccagtgaaagcgagcatagaatatgggcgaagcacatttcatccacaagctcctcggcacgtatttctgcgcggcactgcatccggatgaacagctcgtcagccatcgccccgccgatgtgcgtgttgacgagtggcccaaagagggcacgcatgtagttcgctaccatgcgcccgaccacgccgcggttagcgggatcatccacgacgggagggcttcccatcacgagctccaactggttgatcttaaacgagccgtcggcgtccacagcctccttgaactcctctactgtagcagcgtaaagggggacgttaaagttgtccatcttctcgccatcgaccatctcctcttcgatgagatcacgcaatgagtcctcgaacatgctgcaatacacttcatagatgtagccttgctccgtggggccgcgggtggatgataggcggccaaggctgacaatgaaaatggcaccaccaggcttcatctcggcggcacgacagtgtagaaagcgcatcatgtcagaccggaattgtcgttggtatgccgtgcccgtctcctcagaggcaccatgcacgaacactttacctttgttgtatgccggcgattgcttgtcgacgactctcttcggcacctgtgtaataattaaaccaattaaacttcttcacttattgcttacatttaagggtggttgataagctaactcgaaccgtagcttgactccgaaaattggttgagttaatgagccgactcgctcaactcgttaacataacaagttaaaaatgagcccagcttagttcgctaagaaattcgagtagactcattgaaactattaaacttgctacgacgcaatacatctttattattataaaaattgaagacgtttttgccggtactttagtacatcatctgtgtataagtcggttttcaagttcgttcacttttggaaatacatattattatttgagtcgtttattatgtttgcttttggaaacacagaagagtcatataagaaatctttgtaaaaaaaactcgtatgctaacttgaggcgatcggactctaattacagctcatgattttaagcgaattctaatagtgaatttcaccttaattaaactgtataacaataataaaattaaaatagctttcacccgccgcaacgcacgggtattttttctagtgattttaaatttaggatttgctttttataatttgacataaattttgggagaaaattaatattttatattgttcgtcatatccgatgggctttaagatccctgaccgttggatgggttaaaaaccaaagcgtattgcgtgaggtgggcgtcgatcgaactagctcgcaaccaccaatagctcctgcgtgcgtccccctactgagctagtgcaacttttttttttatttacataccgcttacttcctctggttctatattaattgatgtttttgacaaggttgaggttaaacttttataactttaaccatcaataactttaaaaatatttagtttaaagaaactagaaaaacatatatagatttgtcttttcaaaacactataataaaagtaaacatgcatttatttattgtatatattataatagaaaaataaggtcaaaagtatatcttgtagagcgtgtcattgtccaaagcatcaattaaaatgaaactgaagggagtatattctaggtacatgtgtacttacattgttattgtactataatgtatcgtattaatttacattttaaatttttttgggggaatttctatagaacgttagatagatatatatactccctttaaatttacatttggtatgatttataggcctatgtaattggagttatggccgacgtgctatgtatcatgacaatataaggttgtactataataagtggtttgtgagctgcttgtgtcatacgtgacactatctagcatgtggagtggacttttaatttcaacacgtcacaagctaaacgagctacacaagtaactcacaaattagctcaaggtagctgactaagcaaatgatcgaaatattgaacttaatgatcctactcgatcattaactgctcgagtcaaaacctgaattttaccagtcgagtagctcactttgatcccaaccatacttaactacatgtataacgtgcaagaatttttctcagattgaacaacacattgaaatcaatataatccatattcattagtaacacaaacgattttcttttctgtactatcttcctaatttaacacatattttcattagtaacacaaacgtttttttaattttcagtagtacttgtgtgctatcccttctttttttaaaagaaaaaaattgcgttcgcaaaagaaaatgttttttttaatttcactgtgaaaatcttgaatacacacgctcagaatcctacgttcacaccactgattggaaactgaagcaaaaattgtatacatatcaaattctactgaaaagatgtacaatatatttatctccacgcaaaattgggtgagaagatatgctagttagtctgaagatcaacacaaaatggaggattcattggggaaactattttgattcctcaaaggggatgtccctcatttacttcaaaaccatctaaacggttatgaaaaattctggaaaaaattggcaacactcatactatatatctatacaactccacaaaatcttaaatccaaactcaattcacacgttgagatttaaaaaaagacaaatttagtatatgaatagtaatataatgttcatatctgaatttgtctttttttttctcgatatgtaggtcgaatttgaaatttatttttggtggactagtagatatcgctatactctatattgtcaattttttttaaaatttttcacaaccatttgcatcgaatttaaaagaaaaaggtacacgaggggatatctcccctcgacggattagaatctactcccgattcattatgattaatttgatgtactctaaaaaaaacctaaactgtatattatacagcgtacctgtgagagccagtgcaatgagaaggtggaggtgaacacgttgatggatcgctcggggaacaggcgatcatggaaagagccaggtacggcggcggcgaagtagcgccggctctgccgcccatctctgcccgcggcagcagcttgctgtgggaggaggtgaaatagggtgttgaagtcgttgctcgggaggtcggaaaagtagaagcagaattccaggccgtcgtcgtccttgctgccgaaggatttgtcggtcatgtggtcgacgatcacgtccgcgatcaggagagtattttggccgcatgagcatcccaggtcggcggccgtcagtagcggcttgttccccggacggtgacgagggagctggatcttgtccagtgtctcctcaagggcgtacagcatcattttcaggtttcgggactgcaccggcagttttactttgctcgatcaggcgtagcaatcttactaatactctccgtcccaaaatataattacttttaaaataatgctaagtcaaacattttcaactttactattaatcactaaaaataaaaaagatcaatcatttaaaattgatattactagattaatcattaaacaagctatcataatatgcaactctttttatttaaaaaatcttaactttatagatatttgttagttaaaatagcatctcgaaaattatgtcgaagtccaaaaatgcttatatcttgggacagagggaatagtaattaatagccacctctaattgcatatagttatgcttgtattacttagctaattagtcttgcttaatttgttaattacctgagattggctgttgttgatgtaactggactcgccctggccaccctccatacagaagacgttcttgaagtcctgctgctgctcttgcatctttgatcgcgaattcaccgcacgacgggagaatgggggtgtatgtgtataacttgttcctgagtaatttagttggatcgagttggcaaagctgtactgtatcgatcgtatatataacttgcctcgatgataccttcagccttttttttttattgaacacatcagcgctggtttgttgaaccgaatatgatgtcatttttttagtgggatataaagtcattttaattagggcccgtagtacacagaatttgaacgaacccatatggccatatggttgatggtaaaaatcaggagtagagcaaaaaaggaaaagacgactcacgcgtggtaccgacgaggtcgcgcggtggccgatgggcggcacgtgcgccgtgagtccatagatgctacgctagctctcagtggcccagttgactagtaatgttcaggtcgcttcttttaaaaaaaatagagaagggtttgtgtagtatttttaaattatgaacttagtctatgaaacaactcaatctaaaattagtttctataaaaatttaaaatcatgacatttagatgctactcagttcattgcaacaactatgtagatttagattagaaaggcagtgggatgcatgggggcgtcttcagggtttaaaaatgagatgacaaggatacttggggtggtctgtttacgatcacaccggatcacgagtttatttaaggcctgcttggaggactggtatttggtccaaaccagtccctttgatcaattccagtagtgcacccacaatgacaaccttaagaagagcttgagaacaaataggaagacgatcaaattccactctatggtactgctgtaccttgcaattccggggggtcaatcttaaatcttcaaacctgttggaaatccccttcttcattgcgttaattttcgctgttgcggccattgcggtgtgccgacccatcagcggcacgcggggggaattaagcagctggtttttctgccttctggttgctcgtctcggtggccctcggatcgtcatccaacggtcatttcggccccttgtcttgctgcgtctggcgtccgtccgatcacaatccaaagctgtactcattctctgcttgtttcccttcctgctccggctcccggcaaaagcctccgcttctacttccacgagatcgacgtgcggcacacacaacgtatgcatgacgcgcccctgcatgcatacatatcacctcagtcgtagaggatcggaactcgtccttgctccggcaaataagtactcaacccggcgtcgtggttgatcagggagctaggtggtggtattcaggaatgtccgtgcacacgtacgcgtcgaggtggcttcacgtacggcgcgtatatcggcagctcagctctctggccacgctgctgggccgcatccgcacgtttggcccgtcggaacagacatcggcaggcataaatttacaagttcactttatgtccttcaaaactatggatggagcactattgtctcggtgtacacatacgctggccacatgccacgtcaaaggacaaggacaacgagaatcaagaaaattaaatctaaactttaattagtaaataacaaaggcaaatcttatctgaacggaagatcaagcaacaaatgaacattccaacagatacagagagagatgagttacgactaatctcatgtttgatcgatcatgatgcgcgcgggcacaggccggaccagcccttgccgacgactcgctgttgtccacgttcactcacgctcatatatatcgatcacaatacgccccttgcgcgcgtggaacaacgcctatatatggtgacggacccccggcttacgaaccttttgcgaacgtgccgtggctcgacctacatgcacagcgccgaagaccgtcttgcccgcggtagaaccgccgtcatttcctccggtagtcgtccccgtgcgcgtcctgatcctcatcagtattcgtattcccgaccatgcatgcatgacgcatgtgtagagtcctactgtcatagtgcatcccggggcctttcgtgaggtgttgtgtgatctcggcttgatcgaggctctctgagtgctgagattactgatgtacctcctccaaacgaaacgattctgcattattttcttcgtcttttttcctgagaagattcaccagcttgtctagtgtagtattgctagcgctagctgtgtggtgcacatgatcggataccccgagggaagaacacgagctttgggccgccgcgggggactgcaagtctgcaaccaaccaccgcctcacgtcgtgctagctcccgggcagggcatgcagcccacacgggcgtaagcgggttgcttttctcgtctcctctccatccatatgcacgagcgcgcgggcgtcaccgtgacccgtctcgctcgctcacggtcgccgagtgtgcgcgccctcggatcggcgccgtcgcgccgagcgcggcaggttgcagctcgctcacaccaaaagtgtcgggtatatgtggtggggcgtcgcaacggctaaaaatcccaaggtttgccttatctcacaagcaccgatcgccatttccgtttctcccttcttgcatctctctccagaggcgagccgctgagacggcgccactcccctcggcatgaagcaccacgccatgaagtcccagtcccgcgcctcgtcgtcggcaatgggcgcgcgccacgcacaagttctgacaagtcatgcatatatcacgcatatgtactccatctaagcatgaaaataaacattccagaagagggagaagatcataggaacatttggatcttattgaccggcatggttacagaatcatagaaacactatcatataggctaacattagcacaacgagatagactaacgccgtatgggtggttgtatgcgttccaatgtacttcttggatgaagaaatactttccatctttgcacgctcacaagcttcactcctatgacgatcaagcatgatcttctttagggcttcttctcgtggcatagttttcaaatggctacgcacaaagtatgaaatttcagtaaggtggggaactagataaaaaaccctggctttaatccgccgttcccgatacttcttcaaagcatttcgaatagcagcaatcgacacttcgatatttgttttatgttcattatattcttcccaatcgtacatcccttgttcatgtaagattttcatctcattatcaattcttcttccagcaaagcgtagcttcagttcacggaacaaatatgtttgtttgatcataacttgcctagtcatgtcggtaataccatactcatcacggcggcaaaaggtcaatatttttgttcccacgaagaatttatttttctttattgatctcctacgagtagcggcatcgttgataaccgttgttttcataaagaagttggctctatctttcttttgtgttttcctgcgaccatggatcaataagctaggttggagtatataagcacactaatataagtctctctatatatatagctttagaaaatccacgtgacagattttaacacgcacacacatacgtacctgcagcttcggttgttctccatgatatatcgcaatccctaataattgcttcacctggatatatatatcagaggactgtagtatatcatgtataaaagaacatatgggagaccaaattaatctactcctatgagagtatatctctaacaacgactatagcgtggaaagatcagctctctatataccagcactcgggcaggttgatggatggatttaggagggcttgcactgttccgctgtcgtcgagtcgtcctgtttcgaaagtgtacgttgtcttggagagtagatcgaatatatatatacactccatgttggatatatatccatataagaaacgatcttaatttaagcctatatgttattggatcggattaggaacgactggccgcaccaccagttcgatcataagaccatataaaacccttttattactctttttactcctactagcataaatgcctgtgcgttacaatgggtgaagtagtcatatatgtttagattaaaacaaaatcacattgtgtgcatgcaagttatggtccggttcgtttccactacaaagagtggataaaattttagatatttttaccacgcttttcaaactgctaaacagtgtgtttcatgcgaaaactttctatatgaaaattgctctaaaatatcatattaatctatttttcaagtttataataaataaaactcatttaatcatacgttaataccgtatcgttttgcgtaaaacactttatttttatctttatctttagaagaaaagaacaccacctatatctactagcatacttgcacgcatacatactactagtcataaatgcccgtgtacaagttatgcgcagcatatatttttacgtactactaggcatacatgtttagattaaaatcccatggttgtgtacggcagtgtgtgtttctaacccgtctctctcgtgatccgcgtgtacgttttttgaatggttaaacagtacgttttttttacaaaaaatttatgtacgaaagttaatttaaaaattatattgatctattttttaaaaaaatagttactacttaattaattatatgttaacgggccatttcgtttttcatgcacaggagatttgtatccatctccttcaaacgagctcaacataacacccccacacaaaagacataacttcggactcgtcgtacatatcagggggtgtttgggatctcaaaaacataagtcctaaagttcaaacacccctgaactttggactcctcgcacatatctgcctccgtcctaaagcagtcctactccctacccacctggggcgaagatgctgatacattgacagagtagcagacatgcagtggaaagaaaagtatagagaacacaattctggttcaagttccagagatgacaaaattgggaaaaacacttcagttgtatttagttcttgaaattggggagaagtttggaaaaatttgatagtttgaaaaaaaagttagaagtttatgtgagtagaaaagttttagatgtgatagaaagttaggagtacgggggaagtttggtatactaaatagggccttcatgaataaaaacacttccgcggtgagacgcgccccgcaagtcacaaaagtgtatgataagttctctcctctccatcatacacgagcgcgcgggcgtcaccgcgactcgtctcggtcgctcacggtctccgcgagtgtgcgcgctctcggacgagacgactcggatcggcgtcaagcacggcaggttgcacctcggctgcttgcactgcactgcacacatgtctgcagctcactcacaccaaaattgtcgcgtctatgtggtggcgttgcaatggccccgccgcccgcgggcggctttgcgtcaccgttgctgctcgagccaactagccccggccggcgtcacctgctccgctctcacgtggcactgcacgccgggtaattgtgcgaaatatatccgctctccggtggtcgttgccgtggatgtcctgatcctccattatacgtattcccgaccatgcatgacgcatgtgtagagtcttgctgtcctagtgcgccccggggcttttcgtgaggtactgtgttctcggcttgatcgggaaaacccaatccatcccttcaaagggatattctctcatttttgcatatcacttaaagagttatcaattttttaaaaaaaaaactgtaggatagatcaatatgtgatatgccacttcacaaatatgcaaattcaaattcaacttatacaattagaaacaaaaataacaaattttactatggatagaatgagttatttacggtcaaatttgtttttttaaaaattgtataagtcgaattttagatcgcatgtttgcaaaaagatatatcatatattgatctatcttgacaattttttttatttttttataaaaccttttaaacgatatgcataaaacgagatgatgtcactgtagatggccatatggcccgtggcccacggcccggcccaaagcacggctgtttggcccggcccaagcacggcacggcccgactggagtcgtgctcgtgccggctcggcccgacagacgggccgtgcttgggccgcaccttcggcatgctaggccggcacagcacggcccggtcaaataaaaaaaataggaatttaaaatagacttaaataatcatataaggcaaagcctaagataagaggtatacaaaatagacttattttccagccatttaaacacagcccacagagttgagggaccaaaaatagactttttatgtgatgaggtatacaaaatagacttattatccagccatttaaacacagcccacagagttgagggaccaaaaatatactttttctgtgaggaagcacgatgggccatcgtgccttcgggccgacccggcacggcccgagtagtattgggccgtgcttgggccgtagatgccgcccgtggactggcacggcacggcccggtgtgtcggtcgggccgtgccagcccgacaagccttggcccaggcacggccgtgcttgggctgggccgtgccaggcggcccatttgaccatctatagatgtcacctcgagggacaaaagcccacttccgcttgatcgaggctctgttattgatcgggtgctgagattagtccctcctccaaacgaaatgattctgcattatcctgaaaagattcaccagcttgtctagtgtagtattgctcgcgctagctgtgtggtgtacatgatcggataccccgagagaacacgagttttgggccgcagaggactgcaagtctgcaaccaaccaccgcctcacgccctcacgtcgtgctagccgcactgcccgcagggcagggcagtacagcatgcatagctagcccacacgagcgtgagcggattgcttttctcgtctcctctccgtccaagcgcgcacgagcgcgcgggcgtcaccacgacccgtctccgctcgctcgcccacggtcgccttcggatcggcgccaagcgcggcaggttgcatcgcggctgctgcactccaggtctccagctgatcgctcacaccaaaagcgtctgcaggtctgcaggtggggcgtcgccatggctccgcgggcggcttgcgtcaccgtggtacgccgtacgcgggtactgttcgagccaattagcctcggccggcgccctcacctgctcccctctcacgcggcgcgccggatcataattgtgcgaaatatattacgaggaaattagtgacggaaacaaagagatggatcatctatacatgcgcgtgtacatagattttttttttttggaaaagagattgctaacatataaatatatatttatacacatcacacaatgacacaatgcaagatgtagaatcaatcatagaagtaaagatgtcctagtagggaatatcactttaaaataaaaatgataaaatagattatatgaaaaatattactcaataaacatacaagtttaaattcgacttatagaagttataaaaaaagataaattttgctacaggatatctcgacttcatggttttaactatagtacaccacacgaaataatttttggggaatacactatgtaaatatagttatttgcaacaggacactgcatccactaaattagtatttttgtgctgacaaggcgagaggggacccacatttttacacggtgtgaccaaattgctcctcttcctctcttctcttcttccttacctctgtcttctttctctcttctccggcgagccataggacccgcgagcggcgggcaaccaatgggcggagcgcgcgcggcgaagatgggaggggtggcgcagagtactgtgtcacttgcggcccttcccaagtcaccattgcctcgatccacctgcgttgttgttgatgataccggctgtggctgtggcgggtgacctcgcgcgcacaaccggctctatgtcgcagcaaagatgtcaccacgccgccaacctcaggaatcgcctgggaacgttgtcacctccggagccctcagtgtcgactcctccaccggatgccgccatcattgaagtccggcgtcgattcctccacatggaatcgccactgccgccgcaagctcctccacgagctccgaagaatgccgcgccgagcaccacacctccgcgcgccgcctgcaagatcgactcctgcctgatcccaaaccggaaagagagatgggaaagctgacatgtgggccaaagggcatttttgatatttcacgtgatttttttctctgttcaaccagaaattattgttttaatgagcgcggtgtccaccagcaaatatccaacttttgagtgtgtcttcccccaaaagtcacttcacgcagtgtcatacaactaaaaccgtgaagttgcaatgtcctgtagcaaaattcatctacaaaaaatatcaaatatgactatgatggtacgtataagtttaagtttagggcctatttggttcacaggattttcaaatcacaggaataggaaaaacataggaatagtgtaggaatgcacgtgcaaaacaatggattggaacacatgaatttttcctacactgagctaaacaaaagaggttggagtggatgttttcattcctatggaattagtacattttagaggatttttggaggattggcatagtgttcctatggaaaattttcctttgaatcctacaaaccgaatacatgaacagtgtttattccaaaggaattgagatttcctttaggaatccttcaaaacgaataaggccttaacttgtatttttttttataacttgtaggtgttgagttttaatatgtatgtttgtggagcggtatgtccatgttaatttatcttgtcaacattttctaaaatttttcaataactatctattaacttattagaggaatagaaaaagagcctccacgtttgctctcacggactagaaattctaatattaatcgaagaaaaagaaaaacagagtccatatatagaaatacaatttagaaatagttgaaattcggaattaaaaaataaggaatattggaagaggaaactagattctgtcgacgagcgatacccgtagaccggatatagagggtattggggtacgttggtgcaaggatctacgtagtacgacatcaagcaacaaaagataaagattatactggttcaggccccttgataggtaatagccttaatccagttgatatgggattatatgatggaaaaccacagattacaaagggaataatggaactcgatgaaccctgcaggatcgtaatcgagttgattcgactagatccctagcgatgtggctcttgcaagctccgatttcgtaggctgtgggggttgtgttggctatgagattcgatgccttaggtcctcccagggggtcccttttatatcgcagatcaggtggtctccaagtaaaacttggagacatcggaccctacacgatataccgatgaccttgtcttgtctgagtaggacttaaacactgtggaagattttcttagtatatgcagataatgtccgtgtatgcgcgggtatgccatgtcgatatgtggcgtatatcgaagggtaaggggtatacctaacccgtaaccctgacagattccatatagaaatacaatttagaaataactgaaattagaaattaaaaaataaagaatattataagaagagtatagagtccatatagaaatataattaagaaataatagaaattcgaaattaaaaataaggaatattagaactagagtatagagtctatataggaatttaaaacaaactaaaattcgaaataaacataaacataacaaaatttaaagtagagtttagagtccgtataaaaatacaatttacaaataactaaaattaaaaataaaaaaaacatgagaagaagagtctaaagtcaatataggaatacaatttagaagtaactaaaattcgaaattaaaaattaaagaatattgaaagatgagtttagagtgcaaatagaaatacaattaaaaataataaaaattcagaattaaaaataaataatattggaagaagattctatagtctatatagaaatacaatttacagataatgaaatttggaattaaaaaataagaagtattgaaagacgagtctagagtccatatatgaatataatttagaaataactaaaatttgatattaaaaataattaataactaacacgtatataaaatataaatattacacattattagtttcataaagttagtacaaaatttaaaattatgttgtcattttaatatattttaataataaattgagaaaacatatacgctattatatgagagaaaaaaatataatgatgctagccgcgcaatctacgtgggccaccatactcgtttaggtgaaactctaggtatgaaaatccatctctatcatgtcattcaaaaattgaaaatcagatgagctgttccttggaaaaaatattctgaactcctcttttgaaaccataccaattaaaatcatgcttatctttgtaccaccgaaatatatataaaaaaactttttatatatggaccattggatcgcaggctcacctcatccaacggctaaaaatccacaagggttgcctatataagccaaaccctttcggcgtgtgctctggctctgccacctcccgtctgtcacaagcaccgaccgccatttccgtttctcccttctggcatctctctccagaggcgagccgctgagacggcgccactcccctcggcatgaagcaccacgccatgaagtcccagtcccgcgcctcgtcgtcgtcggcgacgcacaagctctcccacgccatcgcgaaggcgccgccgaggaagatcaagatcgtgcacgtcctggcgccggaggtcatcaagacggacgcgaggcacttccgcgacctcgtccagcggctcaccgggaagccggccgccgacgggcccgccgcggcgtcgtcgcagccggacccgtgcgacaccgctggcgacgagggtggctttgtcgccgacggcgccggtgcggcggcggcggcggcggcggcgacgatcaaggcggaaataaaggtggaggaggccgtggcggaggcggaggcggaggcggaggcgtcgggaggattactgcacgcgctcggggaagacgacaggaacgacatgttcttacagtggctacagagtggctcttgcatcgacatggatgctgttggtttctcatgaatccgatcaggtgatccatgcattggagttcatagccttgaattctccagatcattgatccggatccctcgcgtttagatgatttcgcctttcctgacatgattttagatttgattaatatataatggagatctcctattttccttgtttgcgttgatgaagcgtcaaatattatcttcctcagtttctttgcatttttgtcttttgaagactctttgaaatacactacataactgataaagtgaaaatggaatagaaacacccatttcttcttttatttagatgggttttagtagcttccagcttttgtctgacacggcagaatttttctgataaagtgtctggggctaacctgtcgtgcatagaaccaaaattaggacctgcaatgcaatggggagaagcctaatggtttctcattattagaaagtaaacatcatttcttggagaattacccagtgatctctgtagaacattgcccttgactaaaaagaaagaaccctctatgcttgtaaatcgatctcattaacagttggctgtttcaaatgtttgcgtcattgacgtgtggagtggttgctgtagaccccactgatgctgcaagcctgcaactgctgatacgagcagagcaggctttagtttgtgctattggaaatcagaaacagatttgtttgcctgttcatatctgggaggaggcctgctcaaagtggtttgccagtccaatgtttatgtcgagatattcatcttattccatgagctgacagccataacaaatcctgaagagcagtatcagtatgtactctgctcacaagaaaggaggtaagttaatccattcaagtggatgctgttacgcactacagttattatgtatgtgcaagcgtgaaaagtggctgaacagaagaacaaaaaactaatcacgacgttctaattagtgcacccaattaacactagctttcatattctgacagcactgcgtctgatgtgccatcaattgaatttggctgtggcccttccaatcttgttaggacatcaggtgctccagatgcatctctgataatctgcaagagaagatattgtgaagacgatgagttatcattaacattagctgaaacagttaagacttaaaaccatccattgtatgctcaggagacatgattatactacctatattaaaggactcattcaaaccagacttgtaaacgtgcaggatatatgatacagtgtggattatataattgatttcacacttttgtgtacatgagagctaaggcagcctactaattaagtgtaaattgggttttagatcaaagggataaggatcatattttgtttgactctgaatgcacactagtacaaactaaatgtcatacaatatgattgcggtcttcaccggatgtgtgcatagaaacgtaccagtatttcctcatccaagtaagaaatcatgaataggcgctggaacatcccatctgccataagaaaacaaggcatcaactctaagtaactaatccaagtgttttccgcagttatcacgttgaccaatgccagcatgaccagaacaaaaaatatcaaaccgttgtttataccgagcttcagctaagaaaatatggcaagctgtgtcaaacttaaatgagaaaaaaatataaactaaaggtaaagttataactcttttagcataagcgaaatactgcagatggaaatgagaagtgtactccttactaagtggcaatttaatcccctctgaaacagcgtcccttatgggggcagggagttgttgcagagcacctgcagtttgtccaaagaaaccctttagttgatcaggcagtgtttcttctctgatcctagggatctctattaggccctcgacatattcctctttcatcctaataggaccctccacagacaactgagtagtcagcaggaacttgctttgcacctgcatacatcaaaggctgctagttaattgtgacaacatgagtgtgacaaaagagtttgccaaaaacagaaacatacaaatcccagttaacatatatcaattaatcttgcaagattattgaagatattccatgtaatctactacaaataaatgcaacaagaagagtctgtgcaaaatatcaatcctgcatgttgataaattatggtaagtcctgtaaaatgtgtaattgttaaatttaaactgcttcatcttttgaaattaccgtatttaagaacttcacgttggaagaaattttggagtatccatccttgatcaggacatcaagtcctgtaaagtgtgcaacagttgtaggtgacctcctacagatagatgatatttgttatgtagttagatttttatgttattaagaggaagatcatcatggaattatgcattttgatcatcataacataagacaattttatacataatacataactcataatcagaaaaataagtaactggcaacttaatttcagaacattatgtaaatttcaatttgcaaatatcaattgcatccagcaataggacatactcaaacagaagacgggctgcaagtgctccaggactgctgtcaccaaaccattcaaagttccatcgaccttccagaaagggagatctgtgaagtgaaacagacaaattatggaagttctcctggagacatgcaaccaaaagcatggtcatcaaactacaaatgatctgcagaacatgataaattttctgagctggacacttacgttgtgggccgtggagtggggtttagacgctcgagcccaacaatccgctcattgacatcaatcttctgcatccctgtagtctttccactaaccaaggattcaaaccctccagcatctctgaactgaaatttgcaattttacatatcctagttgagaaattaacatgaagctcacaattggctataatattgatacaaactgatattgcacaactcttctgaaaagatgggaatgcacagctcttcttagataactcgagaatgcacaattcatctttagaatgttgagaatgcacaattcaatacatatactcattggtgggtctgtggaatcgaggttttcattagtaagtgtttttttttattttttcataagtacttgttggtacttatacgctattttcttgttggcacttctccaaagacgcttgaacgctgaaggcatgatggcaaattagcaagttgtggaattacaaacatctccaattagacacggcagtggaatgagataagtaaatgcatggatcaatacttgttccgtgtacacactaatcaatcatgttgctagttgaaatggcacttgctaggaaaatggaattgatactcctgcgtgtaccaggtagtacgagcaagggtaggtcagaactagcggattcccaagtagaagacgagggtagagaggagctcacggcgaggaggagggactccttggcggagaggcgctccatctcgcgggcgtagctggcggcgggtcccccctggaacgtcggcgccgaggccctgcagcgcccggcgccggggcggcgaggaggcgaaaggctcaggtggccatcccgccggctgcggaaggagaccagcgggaaaggagtggaggcggcggtgatgagcgccgcggcggcggcggcggccatgcgggacctgagtgagaagagcggcgtggtggtgccgagatgagttgcagatgcacacgcgacgtggaaaccgtgggagaaaatagcggaaaaatcaaatatggggctgacattttattcccgatttcctcaaactcgcaggattcctgaatatttttttggctacttccaagtcatactagtacgcatattcaatcatgctagtttatcttttggcacaggttcagagaagcgtagcatcatccaacaagttgttcaagggtctcagttttgggcaaaatgaactccactgtcctcaactgatgaaactactatagatgaataaagtgagggtgaagatactgaaagagggagctctacactggcatacaccccagaaagactaagttatttgcttcttagacatctatcaaaagctgaaccgaaaacgtaacaatccatatagaaaatcgcaatacaacaggctaatcacctaaagatgcagagatatatatagtcacaaaaggcaatggagaattagtgcgccgcgcccaagatgcgtttcggctctcaagcagcgcccttccgctgctcgttctcgccatgagcgaagtggcatcggtcgccgaacgtgcaggttcccttcacgaagttctcgcacagcttggtcttgtagttgctcctgcccccggggccgcctcggcctgctggtgctgctcctgctgctgaaccagcgggtttcttggctggtgtgctcgggctgattgttgcaatgagctcacccaccatgttgcttgcctgctttatctggtcgaaattgccttcgagctcaatgttcttcaggtttgaatctgattcatggtcacgtattgagagcttgaccccagttactcggcatatctgcttcgtgttgactccacccttcccaattatgccaccagcaagcgaggcatcaacgctgatcttggcagtagcagatgcaccaaagtttcctgctggaggacccatagcggctggtggaggtggttcaggtcggcctccatatcgaccacccataggaggagccatggcactctcatgggacatgtaagctggcttgccaagttccctctcaccatgggcgaaatggcacttgtcaccaaatttgcagccttctgcagtgttatacttggtgcacatgcgtgtcttgccagaagaagctggatgagaattaccaccagcagcatgatccataggagctcttgccggtgcaggcacagctgggttgcctagattgagtgtttttgctactgcttgatacccaccagggacaaagtgcgagaaatgacaaccctcgccaaaagggcatccgatagtgctgcataaatcaaaacataacatgttaatcttctacattccaaaagacaaaattacagtgtagcttcagtccaagttgcataaacacaaagcatcttgagatacataattacatagaaagtcagacattgactagtgccaacaaacttcctaaaaagtaaaataaaaatcagagagaaccaaatcaatcaatcaatcgtggaactgtattgagacacaaaatagtgcatgtggaagcataggacagtaggttggttagaatctgtaacttaaattcaacattccattatatcacagatttagtatttcaccaataagcagcagcatagctttcttatagatacataagctaaacctggaaacagcataactgcataacaagtttagtttaaacttatactaagacgatcaatttcaatgcttgtcctgtgcaatttttataaatacaagtgcatttggaaatgggagtcatcgcctaaaagactccatgtcagtggcaatggccatcacgtttgtaaggcttgttgatgtttaattaaaacaaggattccattccattcaaggtctacacatcaaacttccccaggggctgttctgggagcagatgataataataaccgttttcaatatgcagaaacataactcagaataataaccattttatcatgttagaaattatatctaataatccataagtcattggacatttaataggcaagcaagatctactgaaaatacgattcaatcagcaaaaaactgaatttaaggcacccatgcatctatacactatcttagaaaaggggggaccaatatgtctagtgttagacgtacagcttctgaataaaaaaaaacttgcaagggtaaattaattcgtaactgtaataaatagtgaatattagaagctactattctgatgttatcttggataggttaagattgtaacctgaaaaacttggtgcaaggcttcaatttgcttgatagaccagtttgaaatgactccgtttctgttgcataaaattttgttacatcttctcacttgttagaagttgcattgttaatcttctaatgaagtaaacatataaaatttgcgtccaatgaatgtgatgaataaacaataattttgatatgatattgatgatatttcacagtgatttatcctgcagaaatcattcacatttacattcaaccgcttcgcagatggtaaatatcatttgtccaggtgtttcttcttgtaacctcatttggagcatcctcaggccccattctgattataagagccacaaggtactatgcttttgcagatagtttcgatcaatagtgctacatatttcttgtctatatatgaatagggcctcgctagcactatggtcattagttactacagacaggcccacagctcaaaccatacaccatttcttgtactttattttaagcagtaagggctcacctgttctatctataaactacctttccaaattattaagcagttttcttttgcttcttgaagggaaacaccaatctaactggctgtcctggactatgtaatcatctgagtaatcctacacacttaacatgggtactttccctaactcccctcagaaacgttctgttgtattttgaatgaatttcactcacaaattaaactcaaatagcccatcaaaccatccgaatcagcacaaactgctaggttacgaagtccttgttgacgaaaacacgtgcatactcatgatcacggttcatcatagtaagtccgagcacaagattgactattctaatcttattactggggctcatcagcccggcgcactcgctcgatgctcgcggaacaaaccctaaaattaccaggagagcgtcgaggcttgcagatccagcagcatagcgcacagaagacatcgaaaaatctagtacgcacaagcaaatgcagaaggggataatgaggcgatagagagagaagggtacctctcgagcgcttccctccggcggcgcctccgttggccgtgtccggccgggatctcttgcgggcggcgccggctccctccatggcgagccttcgcgcggagggaggaggagggaagggaggggaagccggtcgggggcgagatcgaaaccctagctcgtggttggcggagggaagcggaaggggaagcgaccagccgcggaatcgagagggttaacgacgagagagaggagagacgtagggaacggctggttcatatggggtagttgggctttgggcctccaccgagtcagatatttattggatctcgaggagagctttgtcttcgtcatgtcgtgtacgtcttgggctttgggccacaattcgtattggacagtgtagatcgaattttggttcgagatttcctcactgcgtagtttctcattgtctgccacttcactgcttgatttcttgaaaaaaaaaacaattcactgcttgtgaattgcgatggtaacaaactacttacaatctgattgataattgttgccttttcgggacagaaattcttgggctatcctaactcgagttttacattaccccaccattaacgcaagtatgccttccagatcgaaaagcaaccctctaaattcaattcagggcacaggctgcaacatgaacttgcccactgctaacactgcatttgtacttgcataatgtcgtcgatcaaattcagaagttacagagagttatttcacaaaaccaagctgtgcagtgaatcctccatggacaaaggaactcacatgctcctggccatcatctcctggtacctccggtacgactcctgcttctccagcaagaacttggcatggcacctcgcgatgaacctctccgcgagcctgtcgatctcgttcaccgcaccattgccgtcgccgtcgccgttgccgttgccgccgtcttctccttctccggcagccggcaatgcaccggccgacgtctcctcctccagccagcacaggtacccgcagtcctccccgtcgtcgccgccgccgccgcgcagctcctccgccgcgccgtcggccggaaccaccacgttccacgtcgagtcgtcgtagtcgtagtagtacgggtggtagtgcagctcgagatccttggcgcgagccggcgtgacggcggcggcggcggcccagttgaagcgcagcagcttcatgaagctggcgatcctcttcttgctcttctccggtctcgagcggtagccgatggcgtacttcttgccgccgccgcctctcgtcggcgccctcttcttgcggacgacgtcgaggagcagcgacttgaacttggcgagggcacggaagacatggccgacctgcgggtagatgtgggagtggagaatggaattgagcttgggagagatcgagctcggaagcagagcttccatgtgaaacaatggagccatggatcggggtggtgaatgcggtggagctagacggcgtgagctcttgggcttataaagcttacatgtatccaaataccaccatagttcaaataaattgcgacaataccattgcatagtctgaaactctgactacagcttacgtcgttttcgttctgtaaaactctgattactgaatacttgtagtcaaaaagaaaagtaaaaaaatgatgcactgcatgcctcatcggatgctttgcctgtctcaagactttggggccaaaaaaccttggctccatgaagcttttgttctgcaacagacaaatggagcactgaacaatgtcaatgattcagataattcagcaggttgttactgtttcatccgagcaatattacagcagtgcttgaggggtttagggaacagaaatcagcaaggctcaggaggtgcctgtcagtaactgagcatgcttccgataagtggaccagcctgctatgctctaggcccgtcgaagaagacatttcatctttgtttctgaatcttgtccccgcaatgtttacgaagatattagtacgttggttgtaattcttcaagtcaaaatattccctgaacatcgtttgttagcctgtcacgtgatagtcatatacattatattcatcttgatgattgatggaaaaaaagtcaaaattaactgaattactctgcccctggaggcatgcagagcagtgacaagtgctgacatgcatggagcgttccaagcagcaacaaagtaggatgaatgttacaaatcatcaattggagaatccgaagaaaacagagagtactggatgtatcatagctagtcatggtcttttcagtgtattcttactattctgacgacttaactgcctaattacttactccagtcatgtccttctcaaaggaaagagaagcgacgaacaactttctgtgagcaagcctgctatagaaattcagaaatacaatcgcagtacctgttggcacaaaaatggaccttaatctgttgtttgattctttctgcacgccactgactagctgcaatatggattagtactggctcacttaattatcagaaccgagctgggaacagctggaaacgaagcaaatattagtacatcaaattgtcatccttgcagatgatagtcctcccacttaggagtggcagaaccaaatcaagaaatcccatagacttctccacgtaaatgttgcgtggtatctcaacctagtcagtttcagtgaaggacagtaggacacagcaggagctccggtctaattctcttcccggttttgttgcgtccaagactcccaagttggtgatccatgagaaagcgcaccacataattggccatgacttacaattgttcagctggataacagacaagagagagatggagcgatgaactgtgtacgcacttgacatggatggtgtggatgatgcattcatgcacctggctgctcatgcattcgccgtgtgcatcccttgcagcagcagtaggagatagagatggtgtgaggcccagttctgtgtcgtcgtaggaatctagttgttgggatactttgcaaattgcaattgcaaaggaacagtgacacaccacgcgttgcatccgtggagaattggagatatgcgaggaagaagacttgaggaaatggcaatggcaatcattcgcagaggctggtgttgtgattgtaaccggaggagatcgcaggagatacacgacgtggactcgtaccggatcaatgtgctcatcagcagatcatgcgatcatgagatgatgcaaagcgctcgatcgctcgctcgcttgccgctggattggagcctgcagcctgtgtctgtgtgcggcatgcgtctgcgtgcgcgtgcgtaagtttgacgtgcccacttgcacggcgaggtgctggggatgagcgaggagaattccttctagaatgtcaataaagccgctgtcaatggtattgttttttttctcctattgccatattgatgtgtaattgcgcgtttatgaaaatttttcctattacgcgaaggagagaatgcaatggaggaaaaaaataggacttggatgcaatccgcttcgattttgctatatatttgtcagataattttttttaaagaattaacatatataaattaaataaagtataatcctactatgattgattttatggctattaagaaggtaccatattttctaatgtaaatttagtatctctagtactatgaggtaccaagttttcactaaaaatgttggtacctcccagttccagtacctctcaaagactgtaaaattactatcctgctatagttacattataacttgtatgcaccttcacatgattttaaactgttagatttgcttcaagatttgtgcacgcgagaaaggaaaaaatcacagtgcacacatgtgaggagagtcagttccacgatgtctgcttaccggaaatagtatgtttcctatgcaagttacaatataactccactataactatatactatagttacatctatcgaaatttttagaagaaatttgtcagtaataaatacataggtagtcctcgggccgtgggcctgcagggacacggagtatctagcccatcacgattcgcgtaggccgtttgggccatacagaattctatagtaatatagcccatctgaaatcagcagcaactgtcgttaggcccaatttgttttttttttttggtttaggagagggggatatgcggcggagcggagccccggtgcgtgggtggccggagttcactcctgttcacgcgcggcgcggcgaactaatcggatgcggcattgacaactgatgtgcattttttgtttctgcagccacaagaaaattactcggagagccgcgtgcgtctagttcagataaacctcgcgtacagtgcattcatcccgacagattggaacaacttggagacaggtgaagtaatcctccaacagaacatcattaactactcacaatttgccaaatcttcgataaaaccagggattaaactacgcccaagatgcagtgccagggattgacacaaacgcattttggctttccatgtcgtttttgaagctgagtcaaggcctaaatccacgggattaaacaaggttcgagccttcgaggagccaatgaggcgagcatgttctgctgccccttcagggtttcagaagacgagcttgcgaattccatccccctccacccacgaagcaccaaccggcgcgcagcaaaagaccagaaaattaaagccaggtatatgtatatcagtatatgtatgtacatacctatccagataagattctttcttaatctttccacgttggcacaccagcatgtccaaatctgcaactgcataagtattgtcgttgatcgaattgacgaatcccattttttatcacctcttttgtcagactcctgtaaaaccctgaccaacttgagcatacagagttcagctacatgtatactgtatatacagataacgattatatgtgtgcgtgcatacagttttgatcgattgacgttacgattgacagtttcacaattgacagtgtccgtgtctgtttttgggtaggatcaggaattcaggatgacagcttcgaccttgatttctcgttcttgtttctgatcagggagattccaaagacaagagtagtccaatgctcatcaaacacctgtatttcttctgaagggatgtgtggacccggtagattccccataacactaaaaaaaatatggttagaagattttattatggtttgactttgtttttagttagggatcggtgcacaactttgctcaagaaaattatttgatctgtcagttgtactagtgcatgtaatttctgatacccctgagaatgtcaaagctgatctccatctattctttcttttcaggagaacttgttatcaggtgaagcggtggtgaaatgccaacgtgtaaattcaacacaccttgaaaattttgattactagaatcttgcttcagtacagcatcctcctaagtcctaacaataaaatgaaaaacatctgattaaaatctgcattgataaagggggcctaaaatgactgacgatgcagatgtgtattgcaacttagaaggagtgagatgatatggacctagaagtcatcacttagatttgaatttacggatgctagtcttttttaaagatgacaggatcaaacgagaaagaaaatggtgccttatacgacaattgaattagatgaaacaaaaaagcatcgatgttatcgtgttaacatgtgatgacttcctatggcatagtgttggtcctatgaagtgcaagcttttcctttagtttgcacttcggtgacgatattggatcaccgatcaaatgtgccgtcacgggatggatagtcactccatgtgccctatgtgtgcacaggagcagaaaacaaccaatcatatcctgttggagtgcgtctttacaaagtaagttttgcacaagttactggccaaggtcggactgcccttatcttcgcccagtcgacagtccaccccccaagtccggtactctggtgggagtgcactcaccggtagctgcctgatcaccttaggagaggattcgactccttcatcctctttgttacctagaatatcatgttggaaaggaatgctcgtgtcttcgatgggttcatctcccaggtggatagagtggttgatcgcatcgtgcaagaataaaggatctgggtggaagcgaagccgagtcctcttggagttcttcttgtccatagtcctttttcctgcctttttgcttgttcggggctggttttgcctagcttaactggtcattgatccccttttctccccgtttaaactccccatgaccgctacggtaggtcacggttgtacaaactttttccttgaggaggtaccatgaggtactattttttctattataaatttggtacctcttggtacctatgtactacgaggtatcatgaggtactaaaattttggtacctcgtggtacctcctcaaggaccgtagaattgctctttctaatatattagcgtacaaggctcttgtgcgttcacaaaaaaaaaagatcagtttattttgctgctgatgaagttactgctctattttgactactttgtctacctcatggtgacacagagagttgtttacttgattatctatggatctaaaatttacccgcttcgtttggccaataaacatcacgtccaagaagattcaaactagaaacattgtatgattcgtcaggttatctacccttgttgggacatcaaaagacaagcaacacacaaattatggagcatagagatgtcccctctgatcctaactgtaatatgtttgaagcttgcaaattatgttcagctagagctggagactaaaaagaaccagataagcaaagaaaatgatagcgagggtgagggcaccaaagtggctatttgtcaccttagccttgtccgacatgcgagataatttatgctctgctatatatatgtagcagttggatttatatacatacacatatatacatctctttgcatatttatattcttgtcagttgtttgctgaggcccccactgtgagaagttcatattccatttgggattatcaggactccttcagattattccaatccttccctgcatacagaaagtgatctagctgaggtgagatcagagagagagagagattgagctggttttaccaggaagtttccagtggtgtttgctttgctgcacatgtgatgcccttcaagttgtaagttcatctcaaccatgtgtgtaataatgcttactttttgccatgcattgcattgcgtcctctccttctccggcggctgctgctgctgcatggtgtgatggtggtggtggtggtcgtcgtcgtcggctgttttgcgattctggagattggttttgtacttttgtgcgtatccggggacatgcaccgccgtcgaattattctcgccgttgttgcgtgccacgcctcccctccttccctccctgcgaatataggccggtgcggattcccaattaattcccattgatctatcgtatgtgccactagcttcccgttcgttcgatcgagagcctatttaagcttcgccgccgcgttaatccctctttcctcctccaaattaatctcatcctaattctgttttaatttctggtgggaatttcgctgtttgatctggcctcttcacgtaaccgtaatgttctatgtgtaaattgaattaatggagttggttgtgaaatcgttgaattgatggtgattcggttgttgttagttcagttaaatgttgcaagatatcatgaacaccaagaagattaagctgcacgactgccacttcggctcgccgctatgtgacccttcgccggcgccgcacctgctgagctccgccgccgccgccgggctgtcgttccacccggggctcgtgagctcggcggcgcagcaccagcagcacggcgcgggcggctggctgcacgaggagtactacgcgccgaggtcgtcgccgccgtcgtcgcttctcgcgcagacctgcgtcggctccaacgcgaccgcgttctacgccgccgagaacctgccgcagttcgacttcccagctctcggtacggcggcggcggcggcggccaaggcgccgttccggtcgtcggagagcgagctgtaccggccggtcgacccgctgctcctccgtgcggaccactcggtgaggacgtactacgtccggccgcagaagcgggattccggcgagaggacaccattgccgccgccgtcgcagcaacagcatcaggacagaatccacgggctcttcgccggcgctcccaccactcggcttctcagcggcgaacccaaaatccactcgtttccacctcaagtaagcatggaacaatcatgaacagaactctactaagaattctactgtttgtctttaattcttttctttgagatgcctgtgaatttttttatcgtaatctgaaaattaactccgatgaaggtggcggcgaagccgattctgccggcgatggatgcgccgagcctgcagaaccagatggagaatcagctgacaaggaactgcatcggcgcggcaactccggtgacccccaccggaaacctcgccggatcaggtgcgccgagcaagacgcggatcaggtggacgcaggacctgcacgagcggttcgtcgactgcgtcaatcagctcggcggcgcagacagtgagtgttcttgatcagcaaaaaacaaaacaaaaaaaacagagaagcttttgtcatgcatgacgatttctcatggcgcatagttctttcttcttcttgcatgcagaggcaactccgaaggggattctgaagctgatgaattcggatggcctgacgatctaccacatcaagagccatctccaggtaactgaaactctgaaactggaaagcagggtcacttgatcaactacacacgaacgattttaaacagatgacatagatgtgtaaccaaacagatatcgtattaatgtcgatttgtagctagggattggttgatctagttgaagtttgtttaataaacgagctgtagttatctaacaattttctctcatcttctttctgtgcagaaatatcgcatagcgaagtacatgccagcgtcatctgaaggtaagccatcacaacttcgttactgttttttttttttttggttgggagggggggggtctaagctgaatcctgaaatagagaagttaatcctccattagtagcagcatttgtaagagataagcataaattccagatcccctgagttcaggaggatctggattcgttcgttcgttgtgttgctttattctaggtcatttcaacgccgtgcttttatcctactactgttgtttggtatgcttcgctatccattcatccactgacacatgtcctcattctgctgctatactgtcgaattttttcagggaagcaactggagaaaagagcaacaggaaatgacatgcagaatctggaccccaaaacgtatctctctttctctctgtctgctagtagtaatagctttgcgaaccagtcccaaatcccaatggagtgcaagtgctgctagctatctactgtcaaatcatgcgtgcatatattaacaagaatcgcctttttgctgtagtggaatgcaaatcacggaagcactgcgtgttcagctcgacgtgcagaggcgcctccatgaacagctagaggtgctagctccatcatttgccaacactttgacactagatactttacaattttcagaaaaggaacggcttaattatatagccatcattgataatcatgtaactaacttctttatgcctgaattttgtgtgcctcgctagattcagagaaatctgcagctgaggatagaggagcaggggaagaggctgcagaagatgttcgaggaccagctgaaggcgagcaggagcgtgatggaaccgcaggagctggacgacgtcgtcgccttcgccgccggcgacggagacgacgacgcgttcgatgacgtcgacgtgcagctgctggccgtcgctggcagcggctatgacgacgccgggttccagtccaaaataagctaggacagccttttttgcgttttgtgttttggcactttgatttgacaaatattgttctggttcttcgacgtatgatacgcacaatgctattttttgcccgtgtagttggcgaaagtttcaaaaagatattttaagaaagagagtgggatccacagattcgcgcttaatttttttttttgtagctagtttgatcagagttgtaaaatttaggctttttcaattggcctgcactgcatttcttaatggttttagttaggtcttagcaggcaaaaaacaggttaagttcaagtggcaatatattgctcatgtcacattcacatatgggcttgggatgctctacgtgtaccaccatgacaccatcctacgcagaaaaaggaaattacaaaatggatatcaaccacagaacgcaataatgctgttgtggattgtctactagataccttgaattaatttgtcaatagttaagaaataagaccttaatgatttgcacttaactttcagcagcaacctggactgatgttcaacagtagaagtatcatcaagaatatggacatggtcctcacgcgcatcttcataatgcaagcaccgaaatgctctccttttccccttctttaccaaaggggaatgtaaagataaatcagcgctggccttaaaagacatacaccaatatagggggcacacattcaataaccaagaggtcgtgaatccattacagctttttaaaaagttcaacctggcactcaaataaaaagcttaactttacatagtcagccaaagacattttgacatttagaaactaacgctacgaattctgtagaggttacaccaaagtactgcggcagtagccactacgtagaattaaaattacaggctaccacaaataatctggttttctctgacaaacttcataatccagagcatagaaaagatacataagctagctgtccatttttttgtcaagaacaccatattgtaaagttaggcctatctggcaccactgcaatcctagatctgcatggacaggtaacagaacagaacgaaacaaatcaaatcaatttagcagataatagataaatctctgatgtactagcatcatactgggaatgtcaaactagtagagaattaatattttatatattgtaacctaacaaagaaaaattttcgccgggtgtaacctaacaaagaattcagtggctatggcacttgacaaaggaaaactaaccagttaatgaggatatgctatgtttccttaatgaagtggtgagcaagcaactctgataatccagaactaggaatgctctcgcagccgaacagctcctgaagttttgagtcacataatattgatccagtaatagcatcctgtgtaaaatcagtaaatgaataaaaagcacatatcagttggccaactttaaggatcacattctcaagattggaacgattacaagggagacagaaagaacacaactttgctaagatacttggcaggttaatctagtaatctaggataaaagaataaaacaagaattacactggtagtgcgtaacagatatccagtaaccgtgttacatatcagataagctctgtaagcagtcagcttcccccccccccccaaaagacagacgtagtaataaaacgttagcactttaacttgacacaaaatacactatttcagttgtctctaacattaacaggaatgtggtgaattacaagccagcagattattcttcagtctctgccataatactactattgcttatggacaattataactatatataatacaatgatgtttcaaaacattgaaagttttccagcgtttgcagccaatacttagctccaacttgcatccatcagaagcaaagagcaaatcgatatcgtgcaacaataaatataaagttaaaacatattcatacctcaagttggtttgcttttatgtaatcccaaaggtacctcaaagcatcatcttgaggcactgtgccttccattccaataaacttggctagtgcatcagaaatcaccacagagggttgattaatcagaggcataggctgagtagctacattggagggcttaaatttctttgcttcccgaatttgatcctctgcagaaccaagaaaacataattaggaacttccatcagaacaaaacattagcagcgacatctagaccaaaagaagcagaagaacgtacttgggtcaagtggagttatatgtttcgccaacaatttattcatcttaaacatgtcagttgtgtcagttccaaaaaccacacgaagttcatcattgcagattatcttccttttgtcatcaggatcttgaagattattctgccgaatatattgccaaagctgcttgacaatctgaatggaggaagcaagttactttgtctcggttgattcattaaagagtttatcacaggattaaattggatgccattttctctaatacaattggggaaagctgagattacctgagttcttgacatgacagtctcaccaacaatagtctgaagttcaggtgagattgcacaaactttatttaaaccaccaggcccacctcgtttccgctttgaagcactagaggaaataatacagatatgataaaccaatcagtttgcatgcatgagtaaattccacaggtttgaatcaatgtacaatccaaggacacatgaatctaatggttaaaccagtatatcttcaagcagaacaaaataacctttatatcagcttcaaaatagattcagcgtgacatttgcatattatccagtgagaataatatcatgcgataatacttatatggcctaagaaatcttaactgattgtgaataagaaaatgtgcaaaaactaagaactataacccatataacattgagctctgttttggtatacaataagtgggaacatatttctttggttcataggggaaatacactacaacaggtcaacagtacaagctatacagtgtacagaatcccatcatgaaaaatagatgtagcatacagatccaatgaatctaatgttaacgatcatgttttttttattacaaatactatgattcatacacatacaagaaaaagaaagcttttcaacatactaccaaaggacaaaccaaaattaattgactgtaccttttgtttgcaggatcaaaatgtcattgtttgaaaaaagagaaaagttcacgctgagcagtctgggcagaaaacagtatccagacaggggggaaaagcaggaagttctatttagtggcttgcaagaaagctgacgattccacaagtccaaactatcagattcactacttaagaaataaagcaagcccaatttagcattttgtacattctaggataacagctgtaatatccttcaagcacttggtaccacaatcaaacaaaatacatataaaacggactattgtgctttttttttaattataaccttctgaagctcaacacagaatacaccagtcaaacaaaacatgcctaaattccactatattcgaccagttaactaaatgagatagaaactaactaacataactacaaatggatggttacacaaccaacatagtatatggtcaaaaagtagataccaccataccggcatcccaagcatgtgtcctaaaagctatagtgtatataaattggtgtacacgagttggaaccaaaatcactttgctaggagactgaaccctaaaccctaaccccactcagctagaggtgccaattcacgagtgcaaacaggtaatctcaagtcaaagtcattattattagcagccctaattaaacgaaacaaccaactaattgtccaaccaaactagatttaagagcgaatcggaaatattctgcccatatatatctcgattcgattgggggaatgaaccctaatttcatccggtggctcacctttccttgttgtcgcccgcggcctgtactgcggcggtgggggaagcagtgccgccggttccaggggctggctgctggaaggagacggtcccaccagtggcgaccccagccaagccgctggtgacgcggaaggccagaggaggcggcgggtagaacgccatggccggcacgggaggctgcggggagaccgccccagcggcgccgcctggtacaccagcggggagctgcggcatggcctggaatatgagctggggctggagcaccgcgagctgctgctgcatctgctgcaactgcgcctgcacctgcacctgcggcatggcaggcgcgggagcggcgaccagaggaggaggattaggagccgccgccgccgccgcctgggccttggcgacgagcggcggctggaggcgcgggccgaagaagaggtccatctggtcgcggatgaaggtcgccttgtgtgcgaggtcgacgccgagcttggcctccgcctgcgacagcacggcggcgagcgaggcctccccggcggcgccccccgacgagcggaggacggactcgacgcagctggcgatctcctggtcggacaccatggcgcgcgggagggtgccaaaactcaaatctcgcccaaaaaaccctcccctccctcgcacgattccccccccccctcccccctctctctctctctctcccctctcctctctgtgtctctgccgcctggtctctctcccctttgtctctctctcctccggcctctctctctctctctctttctctctcctcttggggtctaatctattgttaagcagaggggagcgtttcgtcggggaggggaggaaaagatgggaaaaggacaactcgctaaggttaccttagatttgttaccctaatgatgacgggtggggacatggattggataaggttggctatgggcccacttgtcatgggaggggctaggtacgaggcccgtgcggatggaaagtctgcagacgaggagtcgtggaattacggaagtgcccatggttttggatgcggttgttgagtgggtgagggggtgtgcggtttttctgcgctggtggggtctccatggacgtctcttcggctccggggagtagaagggatcgtggggcagagatatcatgggctcatgggctgatgggccgggctaaataatgtcaggctgcgccttgcctgggagtgacgggccaagaaataaagtgttcttaaaaataaaattccacatatatcgaacatgattttagtttcaaaaaaataactcgtcattttttaaaaaataaccaaaaattttacaggtgattttttaagaaaaaaaacttaagatgaattgaagtttgttacacgaacattggatcttactgattatcattttcatatgccatctatgtcaaactaatatgtggcattgcgactttttttttagattgcattgtgaccttgaaaatgtttttcttatcctaaagccacgaggcataactaggtcaaaccttaatattgaactcatagtcttcaatcccgatgagttgtttattagcgtgtaacacacataaatatgttcattgtctcgcgttatatttgatacctaacttacttttgctgtagtgatggcacatccttgtataaaccatccttacttttttatattcaacatttgacaatctgttttatttgagaaaattttatggttagtatttttatttttagtatatgataaatttgaatagtattttatgtctgacttattttttattttttataatttttttaaataagacgaatataaactcacaaccacatttaaaattggatgggagagcactgagcaacacgattacatttcgcacatggttgttgaagtttaagtgaaaaatgaataaatctgagatataatcgaacctctgaaataactggaaaatagcgtaatatattaaaaagagtaaaatacaccagcggtccttaaacttgtcagtaggtttcacttaggtccacgaacttgcaaaatacatatcgaggtctctaaacttggtttattatatcatctcggtccaaagccgcatttgaccgtggtcttgcctac

SEQ ID NO: 991 - DNA, 946 bp, Oryza sativa
tcctgcagccccacaagcgcgtatgaagcactttgctgatatgaatcgcactgaacgagtcctgactgtcggcgatatggtttatctcaaaatgcagccttaccgtcacaattccttggggttacattcttccttgaaattgcattctaaatactatggcccgtttcgtgttttggaacgcattggctcagtggcttacaaattgctgttaccggcatcctcccaaatccatccagtctttcatgtgagccaactgaagaaacacatcggtccaaaagtggttcctgaacctggcctcccactcactgatgataacggtaacattctttcccagccaacggctgttttggaacgcaggctgattcctcaaaacaatgcacctgtggttcaatggaaagtccaatgggcgaatctacctctttctgctgcaacttgggaagatgctgctttcatatccaaagtgtttcctgcttttaacccatgaggacatgggtgcttaagggggggggcattgtgagaactctgacgaactgaagccatgattgaacgctggaagggaaggcaagttcagttacccaatggctgggattattcgataacgcttgggctggagattatgaagatcggacgatggagatgagcttggaccgtctacagcacacccctgttgccgtactgttgacatcatctcttttgtcttgtattagcgagtccctttataagctagtgccgccgcaatgtctgtatcgaacaattgaaccctaatttactttactcttgtcttgcggcgcccatctatttccttgtactgtgtactcttcaattcagtgcaaatccttcaatttaatcccattaggatagctacttaagcctcttttctctgaaattgttcttgtcaagctctgaatctggccggggcttgacaggtgggcgtgtgcaccgtggg

SEQ ID NO: 992 - DNA, 672 bp, Oryza sativa
agagcaacctatcaacgcgctaagttacttttctattggccaggcatgaagaaggatattgcctcatatgtcaaactctgcccagtttgtcagaaaaacaagtctgaacataatctgcagcctgggttacttcaccctctaccaatccctgagatggcttggacacacatttctatggacttcattgaaggcctccctaaatctgataacaaggatgtcatttgggtcattgtggacaggtttaccaaatatgctcattttgttgcacttagccatccattcacagctgaccagatagttactcaatttgtggaaaattattacaagcaccatggtcttccggcagttattgtcagtgacagagatagaattttcactagtcaaacttggaaggatgtttttgagaaagccggggtaaaactacattttagtagtgcctatcatccccaaacggatggacagactgaaagggtcaaccagtgcctggagaattatcttcgttgtatgacatttactaaacctaagaagtggaaatcactgctggcctatgctaaatggtggtacaatacatccttccacactaccttgggcatgactccttaccaggcactacatggggtcccacctcccttgctagctgaatccttcctatctccatctcttttcactgat

SEQ ID NO: 993 - DNA, 731 bp, Oryza sativa
  unsure (1)..(731): unsure at all n locations
tcctgcagccccaagttatcagctgtgagaaggatattggatcgaggagcagtaatatcaggaaaggttagtgactgcagcccattgtgatgtattgtcaatgctctagtcttaagatcaatggtgattgggctatgctgagagatccagtcacagccaaagatgatatcaaagcctttaagatccaacaatctgaagtctgagataaaagagacattatgaatagaataaggaacctgagagcaaacggtccctgtattcaaaatactgccattagccactctgactggtataggtgcatgattaaccatatgtaacccagctttacttgctatcttcggagagatgaatgtagtggtactaccactatcaactaaggctgtggcctgtatggtacccaatagaacatgtagtgtaaaggtagtagcagcaggagtgatgccctccagggagtgtaataacagatgtgtatcctgctgatctgtcttctgtggactatcaggaggagtagagtaagctgcatcatctaggatttcagactcatcctccattgtgaccaaatagacttgcttggtagctttacagactctgccgtgtcctggaacccagggttcgttgcaacggaaacacttgccagaaaattttgtatgagtgacagtggactgcttgtcatccttggtaggatgctntggtggaattttgggagtctctctgttggaaggaatagaaga

SEQ ID NO: 994 - DNA, 1097 bp, Oryza sativa
ctttcttcttttcttctttttttttttgcattgatttgactggctgactgatgacaactcagaatggtaaaccataagagaataccttgtagaaaattgggcattttgcctgatcttcgcttaaattagattctggaattgacaaagttcagctacagcatgaaatgaaaagaaaaggcaacgaacactggcagaccacacaacaaatggtgccatccattctgtgtgatccctagcgcatagttcatttcaaagatatgaaccattttcttagtggttttctgaagtttagcaatggagatttatatgttttagaatgaagtgactgatttgtcaaccatccttaattgacattctcccctgttggaatatgttattgattgtcaaaccattctctgttggtaatatttccctgttgaactatgggactgctgggcatagtattaattcgtcttgtacttgccatatagatggcattaaccatttaattatccctctgattttcagtatctcccaccaaatgatatgttctggtactttccgtgctatttgtgctggtgctaacacaacagcaatattatcgtgtctaacacatgtgttgtgtctagttcatttgctatttgaaatattctgttctgttttcagcttctttattcttttgctgctcctgaccttacattttagggaaattcagttcgtgcaacattggtgtttttgtgcacatcacaatttggcaatctttgtcttaataaatattctctgcatcatgtgacaatcctgctgttgacaaataattgtgtgcacagggaaatgtgtgccgatcacacgaggtgctggaatttatcaggatcatatgactgaagcccttgaagtgcttagcactggagactgggtatgcacattttcttcattttatcaccgaccattctatcattgacagttcttgtatctctactcataattttggcctttatttaatttcaaatctcgtcatgacatattcaaacagttgcattcattccctgaaggaaaaatagctcaagatgatcagccaatcagacgtctgaagtggggaactgccagtcttatcgtccgag

SEQ ID NO: 995 - DNA, 1478 bp, Oryza sativa
tttgattgcaacgtttgatcactcgtcttattcaaattctttttgcaaattaaaaaataaaaagttgtgcttaaaatactgtagataataaagtaaatcataaataaaataaataataattttaaaaatttttaaataagacgagtggtcaaatgttacaaataaaaactcaaaatcccttatattatgagattgggggagtatacggcaagggagtgtgctgtgtgtggtctgagatgatgtgtactgctgctagcctctcgccgtgtcggcattcgttggaacggcgcgagacttgttgtcatggaaacagaacttgcatgatgcattgttctacgtgaagtttgactccttttgatatattatcgttttaaatataattaacaaacaaaattcagaatgatcaaactggctaaccagtaaccagcatctgcatcaccgaagaaggacatgagcgtatgcaatttccgtttgaagttggcctcaacaggatcatttccaatacacggcccgcagattgcaagaagaattccgcttcggccgcttgggaatctgcagcccatgccgcgatggatcaggccgaatctattgcttaccacaagcctatggttatccgtaccattagtccagcccataatccccctctcaccatgggcggcccacagcacgaggaggagctcgccggcgtccggtgcgcggtggccggcgaaacaccggcgactcgccgccgccgccgcctccggatcgcccaagtcaagaaggcgagttttttccatacatattttacatttaccaaaaaaaaattaaagaaagcgaccgctaatacgcgacttcagtaactgacagggtggccccactgtcacagtgtccctaccaaccagagggacagggaggctgggaagaacgcgcgtcgagaaagggaagagagtgggtgagaccgtgagagagggggatggagatggaggcgtccgccgccgagggcggagccgcggcggcggcgcggacgctgcggtgggcggggcgcgcggggcacctcgggggattcccgcgcgccgcggtgatcgccgccgtcggggcggtcgccaaggcgtacgcgtcgctgctcaacaccaccaccgtccacaacgccgatgccctcctccgcctcgtctcctcgcggccccccggcacgccgctcctcaccgtcagcaaccacatgtcaacgtacgtttttccctaacatccccattccctggtcatatgttaccccccatgtccgattgctatttccccttgttgatgtgagacctgagaggagagagactggagattccgtgttgctgagttgcgcttgatctgtcgctgatccggttcctgtacgcaaaatctcagtggtttttttgggtaacccgcctgataactaaatgggatcacagcctgataacatttgactccataattggtgctagcatgttatatatagtcaattagtcatactt

SEQ ID NO: 996 - DNA, 1901 bp, Oryza sativa
atctcatttggcagtttgaagaattctgaagcagcttcaatagcaccatccatgactgattgactgatcccatgacttataacctgcaaaatggcagaattagtagagacttgggtgcacaagtaagctttctttgttcccttactgcctgctagttagtgatgatgtaggaaaagaatgctttggtacttatcttatgaagtagcaacttaatcaggaaaaatagcatttgaatggtccttctctatatgcacaaattgcacttttatatacatggtccgttcttgtcattactgaaaggtttataaaacaccccagtgatagtgctggcagccttgatatgtccacatggacggaaaaagaaaaaaaaattgcagtggtttagaacccaaagctaaaatatcgattaggtgtagagtcagtttcagacttgtgaacttgaaatgttaaccaatcttgtaaaaagtagatgatcatatagaggttttacatatgtcttttttaacctagaaagagatactttggcatatcttttcaaattttgtgaatactaatttacagttcatcattgaaatatttattgttacaaagaactaaggtctcaattcaaagtatcaagtcattcattgcattgcaatgatacggtactttgcatatgtcatgtatttgtgtaccttcggtttggcaagctaatcaagtctagcatgctcacagcacaaggtttgcttccgcttcatcatttgtgggtttccacataacaaactgataaagtttagttgttttttttccttatctagtttttcccattttcatgaaagagctgtttagcccatacatagagttggtgcagtgaattgtactatatgtacagttttcctagacttgcacagatcaaactctccattttggtgggagcaaaaataggatgcagctcatcaaacatgtagttcagtagatacagactgcccatatcaccacttccagaaaaaggaggcgcataccatattcttcaccgttagcgaacaatattatgctgccattgctacctgcaggatttcaaagaagggtcccgatctgatagctcctagggttcaattacttgctctttgatttggagttttctgccagatagaaatgtggctgggacacaaggataagcttccttggttgactaccccataccattctagcacatgtcaaaatggcgtcaacgtaaactgtcttcagtgtttggacataggaaaagaccaagtctagagagtaagaacatgacaaaaaggctgtgtcactacgttgcgttaaaggaaatttacctggaagtatcccagatcacggcatgctttggcgatatcgttgaccacccgggaccgcaccgtgggatcatcaagactgaggtggccaaggttgatcactggcattggcggcgggtggagctcctgtgatggcagctgctcttgagggatacccttcgacgtgtcagacattgttgatcagcgaagaagccacacgcagctcaggtacgccaattggttatgcagaattagaactgtacgcagtgtgagagctgtggctgcatctcttcttataggaagccgaggctgatggttcattctctccttcagctgcaggttggtgcaaaaaaaaaccgccgttcttctctgttgtctgtgcagaagcagaacgcatacatgtgcataatacacctgatggatcctcctcacctggacagggggctccaaaggagaagtcaagttaggcgacgcatttccatccattcatgcactttgcagcgtctcgaaatggactacatggatcctgtatctggtccaggagaggagaagccgctgggcataggcagcgtacctacctacgtacgctgggaacgcgtggtgtgcgatgtt

SEQ ID NO: 997 - DNA, 727 bp, Oryza sativa
catgccatgctcatatggttattattaaactacccgaccaataatagcttaatcacatgaaagttgcacccgtaccaacaaaatattatatgtgtctgactgaattattctgaagaactcaacagcattagcatatatcaatttcaaatctacttgcagaggagaaatgtaaatacctcaacagcatcagcaacagttgttgccatgtcatatgtgatctcttcaaaagtttcatccaagaaaaaaacaattgttgtaagcttacggctggataaaagagcctctatctcctcccgtgcaggaattgtaaccctagggcctgccttaactgagcgtttcagtgcatttagtgtgttaagtgctagaactcgaacatcagaatcagttgtagcgccatgagcaatgtagtgaacatactcagacaagtatgctccaatatctttgcttggtggcatggatgacgcacataaatacataagctcccaagctcttattaaccaagccctgtaagtacaaataataacattcataagatggttgtatcccatcgaattgctatccatgagaaatctgcttcatacctgtcgggattgttacgtgtttgttttgaaatctgtgcaaagagctcatctctcagttcagaacgtttcaaagtatgcttgtaaagctttgcaacaagttcaattctttcatccaaacttattattgctggggaatcgatgcccat

SEQ ID NO: 998 - DNA, 7952 bp, Oryza sativa
ctgccgccgatgacgacgacgacgacgacctggacgccacgtggaacgccatcatgcagaagacgcgcccggccaccgcgccggcaatggcggcccctccggcgcagaaggcgcctcccgcagggccgccgccgccgcgagcgcgcgacccgtcgatcggagcggaggagatgaaccggcgattcgacgatttcatcaagaagaatcgccactccttcggccggcaataagctccctccgatccactcccctccgccgtacaatacatatagaaattttcatcatctttggtttttcattgttcgccgaagagatcgccggagcggaggaagccgggctaatcgtatcatcatcttcaggtaacttacattaaaaataataaataaataaatctttcattcaatctagtaacttaccattaatataatcaaaaaaatattaattaccatttgtagctgttcgcaattatattaattacaatctcttctaatatatagacgtgcaatctttacgtatttgcgaaaaaccatttgttgttgtttttggtaaaaacacaattattttagaagcttaaaactcaaattaaacagtaatgatcagttaatccatgattaattcgttgatgcttacccggcatgacctgtcgtgtgcgcgtgctcggtcggttgccgcttaagctgttggcgttgtaactttaagtaagaaagaaaaggaaatggtcggcttcggcactcgcagtccggcccacttctttccctttcggtgccattaggatctaactcgtggatcatcacatctaaagtttgattatttccacgttgatctgacctttagttttgactgtgggtaaattttgtttctgaatttctggatcttcagtagttcactgaatacagggtaatggcaccctttatgttgaaaaagaagaactaaagaagcaccttgagttacaagcatcttccttttttttataggttctttgcttcgaataggaactgtacagatcagaaagcacatgcagttaccaatggttggatgtagactaataactccttttgattgtgtttgaaccagcataattttcagtcacttgggagttctgaaatttcaaattcgactgtttttccatgaaaacaagattcctattgtgacatgtgtcattgacaagtgggcaggaccatcaaattgacgattttgtttccatccatcttggaatttgcaggatgtggaggttccagaatgaatggatggatggtggatggtggtgctatggaagctgctagacagatgaccttaatgtgctgaagtgatggtttttgaattggtactttgttgttaggctctcctttatcagctgtggtggcctggcattttgttcttagctttctctttctcctcctttccttttcctacagctcttttactgattataacagtgctaattgtccaaagttcctatggagttaattctggtgggtagtgggtgtgcttgtgattatatctatactgtttggatgccacattgtggctgtgttgtttaaatgtcagccacaggtcaatgaccatgccaccaaattggtccactgttctaatgttgctatctatttgctcactgtttgaaatggataaccaacaactcatttgagtaacaaatcttagatgcatagggtgctaataatgaggagaaaaaaaccccacatatataatggtccatgtttgcatatatacaactcataatggtcaggaaagaattgatttttttgatgtgaacctttctcacaaactattccttgattccttcagtccttcaatatgcagcgacgaagaaatcctaagtggtgaaaaatcattgaactgcagaggaccaaagactttcttgaaatgtaaaggctgcaactctctgagatgacaccaatggaacatttctgtcgatcttgacatatgatgcccggagagcatttttttcagagtaatgtcgagattttctgttgctatcagtacctgtacttgtatatgcgtactttgctctgaaaaccgtgcagtattgctttcagtatgacataagcagaatcaattcctgatctgttgaagtagtagtaatactagtaatactggtcagtagtttaagtcatcatcttcctggagtactgattattattacctgatacctcataaagtgcatcaatgatgttaacttgacaaaatatattttgaagattataggagtatatgtatttgtatatgatgcttctcatcagctgatatatgctctctatgttagtattattgtttaaccacttctgtccacattcaatccagttacttctgaaatgaggctgatatgagtatttgttcataatggctactgaaagtggcatctgaaccacttcatcggcatggcatggttcctcgcatcgcactgccgaaagggccatgaaactgaaccatccttgctacaagaacaactgaatgattgtgatttggtaaggcagaacattgtatatattgcgttgcgtgaaaggcagctacaagttccaaattaatctgctttttactgtctcatcacattttttctttgtcacagtcatctacaatcggctagcttacacaccagatttccaggcctgaattcattctcatgaattatcctatcactcctggctagtcctcacaaactccattatccaacatgactggaacttgcacttaaatctgtaaaggctactactaatcctactacccctataccacaagatgccacacaaatcctaattgttattgcaacttcagacaccctgatcatccctggtagtaacacctgtgccatggacaagtctttgcttaaggtcagtaggcacacttagctgctgccctaggcttcaattatgatcactaaactatgcaagagcagggctttgcacttgacaaacatcagaggagcactgttatggcgaccacacaaccaccatctgataattttcagaaatttcttttacatatctttctgcatgaacagagcctagagctgagctaccagtggtcctcatgccagcactcaccaccacaactgtatacaatgtaaaatatgcagaatgcagtgtcatctgcagttcttgttgtgttcttgcgttaacctatcatgctgaaagcgacgggaggagtggaagtgcagtgaaccagcagaggcagcagatcacgaggcatttgcagggataagcagagccagtgcaggaaatgtggtagtgtgaagttgctgccgagaagcatcagctaaagcgtcgccgtcgtccccaccaccgccggcctagctagggcttgtcgccgtcgccgggaatttttagggtgatctgtagccgtcgaggcctctggtgcgttcggcagagctcctcgtgagcctgtgttgtagtgtcactcacggctcaaggtgaaattataaatggtgactcaaaaaactcatcgtatcatccatatatatcagatatgcagatgccaatctgaaaactgttcaaaaattgatgtgctaatcttcagactaaagtggacgttacactggacggtaccacaaatggcaccctgtttatcgaaactataattcggcaatatgaaaagggtaacgcacaagaaaaaagtggatgggttatgagactaagagtttagataggttcagacctaccctactcctgtttggagattgaatccgccgattgtagtattaatctgatgatcttcagtgtggttatgccctaaagggacaccctgccttccttatatagtcagaggaggcaagtttacaagataatttacatttctataactactttacaatcgtaccaaactaagaacatgtttccttgatacacaaataaatataacacccaagtcctaatcctatacatattctattcatatgatctatcccatatagtcagtcggatagtgcagccatgtgggtatatgatacccataatctctacactgttctttatagatatttttctcagggttttcttttttttgctatggattatctgctccactcttggaaaaatacgatttctcaaataactttttctactgcattgattagaccatccattcgagagtttatcgcgttggtcaaataaacaatccgcactaataatcaggagaaaaagctatctcaaaccagggtttgcaaaaccgccggtaactgtgcggttatcgcggggtacggtaaaaggaaaaccgcgataacctccttaaattcaaataaattaaagaaataatttaaaattttgataaattttacatggtttcgtacggtttgctacggttaccgcggtgcttaccgccagggagcgataaccccggacccggtggtttgggaaacactgtctcaaacaggggcctagtgatctatactgttgttagtacgcaccatagatggagtgagtgattttggatgcgtaaagacagctatacttatctgaagttctgaaactgttcgctgttgtacatgagaaagtttgggtgagttatcactgaaaaagaaatctttaggcgattttggaggaagccatgcacaggaagatactcccaccctcttaaaatataagagattttaaatagataggacactttctagcactacgaatctggactaaatctcttatattttatattttgagaggaaggaggaagtagttgcggttggagagtgagagtgtcatacattcgatcggcatagtcgttgtcaggccaggtttgtgtggctaataggccatatgattgcatactttgccatgctgatcaaacgaatcggatcactcagatggttgatttggatggccatgcactagatttttttttcctccttcagctcttgaaacagctggtgaggcgccatggtccaaaaacaaagtcatgtcagaatagtcctgcatatccaaacaaccgtttaggtgcgaacctgtataatcagatgttaatcccaacgtttttacttttacttctaaaatttattgttaattacttggaaaaaaaaagaaatgtaacataggatttggttttcatgacaacttcactcattatcgttttcacatccaactacctatacagatgatttttttatatatacggcttctatacctataagtgggaatacgcagttagaagttataggaatacttagactccatgtctcataactaaggaacaacacaataaaataacaataaaaacaaggctagaagataaaacctcaaatattcttcggtcattgctttacctagggttgccgccgctccgcctagccatctcagtgacaagtgtcatagcacggtggactctatggctgcacatcgctggaacacgcccctccaaaacgcctggctaacttgcaaccgcctccactatcaactcccttagccaccaccatatttattacaagccttgtaggaagataatttttttaggcgaattttgactgagacttgatgtccatctagtgttgatcctaggactctagccttgggctttgtttcttctagaggattaccattttgccaaagctaatcatgaaactccatccagctttggtgttttcaggtgtttagtggagctttagggtatgagattgaggtgtttgtacgatggtgttttcggtttgaacctttctagggtcgatgtgtatctcttctttatcaatgaaatagactgcacgtagcgcagatgccatggtgcagccgttgtgctctccgcgacctgcgtttgactctggccggactcgctcatccccttttttaataaattcgacattggtacttccccagtgtctagcctttttttttaaataaggcagtgcctctgtcattgtttctaaaaaacaaaaaaaaaaccttcacttcagctcttctcattgtcaatctagcttagcttttttttaaaaaaataaataaataaataaataaggcagtgcctctgtcattgttaaaaaaaaaaaccctccacttcagctcttctcattgtcaatctagctttttccctagggaaagtctatgtagcacattactaaatcaggaagagcagtatactctttaaaaaagagacagtgaaaagaaatgtatatgatatggttcacatagggatcttacagaaaccgaagcaaacttcttcttgtaaaggtgacaagcaaattgtaaccagtcataggctctatgatgatagatgtttaaacactgaagctctatgtttcactatgttgtcttcacacgatacttttgatcctatgctttagtttgtgcctatgaagctcaagttaaaatagggtgcacttaggtcgtcacaccaacactccctaaaatcacaatccatcctgttgaatcgaaaggatctagcagacgacagccaagtccaatcacaacattagctgtctaaaatagtgatcaccttctctgattacaattgttcttacctagttacctccatggctccatgttaccaaagcaaattttcatctttctccagaaacttcagcaacttcagaagtaataatcccacagcacaacagcaatataaacgaaaccatcggttgctctgcaacaaactgttaaaggtacaacacaagctactaccgatggcgatggctttaagactttcagctatgagttaaaggtagtttctatctatttcgctgttgcaatctctgatgtggactattatttggaaaaaaaaagagttactaaataataatccatagtcttgtacttttatctatgaagttaaaagtgtggggcaacacattctccaataacaaaaatgcattgccttgtaatgaggctttcagatgatggtctcaagacatgaagctgccattccacatcaggttttcttagtcagcaggctgatagcgaacccgcattcttcgctgttgttgagatcatttttgcagctgcagtccacaataggcatgatgacattcggcttaatggccttctccccacgaacaaccttcaaaagagccagcacagtagaggcataaggcaacatatatggaaatatcagcaatacaacttcaggaaaatatctatacatttcttggattttctcataaagattagccatatgtagaaaccagaaatccaatagattatgggggtgacaaaaggaattcgggttacgatcgacgtactaatttctcagactccgagcttttgtagatgatgaatatgtcccctgtctggagaccatgctgcttcacaaagccacctaaagagagcaattcatcagctccagtacaaactaagaaaaatccaaaagtatatgtttcaatgtttaaacgtacccgtgctttccaagacatacattctgctcttgttgttgggccagaacctgaaaggtatctcctatgagtaatatgtagcggattacaagccatatatgtttgtgtttctcgcatgtgacccaaataattacgaaaaattttgaaaaaaaaaagtgacaacgcagatgattgtatcacctattgcttgtttgtaaaggtcaaatttttatctacagagagagaaacagattaacaaagtcaactaaaaatgtgattgcactttccatagtctgatttgctgtactgtttctctatgcgtagatcaaattgcatatctgtgcaccgatagacaacaccattatatattctattctatgtttaagattatttataactatttggattgcatgctgaaatgaggccacatgcacttgataatgtaaaatactttctcaagataggattgaattagataatactacctccgttttttaatagatgacgccgttgactttttctcacatgtttgaccattcatcttattcgaaaaatttacgtaattataatttattttgttatgcgttcctttatcactcatagtactttaagtgtgatttatatcttatacatttgcataaaatttttgaataag

SEQ ID NO: 999 - DNA, 2466 bp, Oryza sativa
acacctactagaggtgcagtacagcagacgatttgccctgggtgatgtgaggtcactcgccatttcgccatggtgattggtagtagatcggtgcatgctgcatgggcatcatggccgacgaggcaggaagcatctagaacacctgctgctccgctaagggcacccacaatggttatctataggctctctataagagatccatgtcagcatattttcctacttagaagagattaaatgaagagagagagcaaagctatctactaacctggagatagtctatagagaaaaacgagacaatgtattagagagctatagatacccatgtagacatactattgagatggtttactattattctagtctattgctgagatgtacatgttttatagataggaccttactttaccattgcgggtgctctaataagatcaagtataatagtaggttataagccggctaaatgctaagttggaggaaagaagagaggagagagaggagaagcgggctataaacttatagccggcttggacacaagaaccaagaaactctatgagagagacaagtgggccctgtattaattgtgaagagctaactattatataggtaggctgagagaagactataaagaaccttatagccagcaggtcggctgtattattagccttgctctaacctacagagattagcttgctgcaaaccaacaaatcgctagctgctgcttcgcttttcccgaaaaggcaaaagcggaggaaactctactctgtccaccacccacatatcctactaatatctcatcatgcatctcatgtctggataagtcattgctaatttgatactgtactagtaaatccaaggaaatttgttcatcagttcatgtgatggttgagcaggtaaatcgtaatttattcacttattaatgtgatatagtcctaacggttaggttaaagacaggccaggtgtattgcgtttcatcattttctgtttctaactgctctgcctgttcacttgtgtcctggaataattaactttggccattgaccaacgaccctcatattagcattggatcgttaggttgatctggatcgaccggtacggtgatccaagaataggtgttgtttaattggagaagttgacttttctgacagcccttgtgtgtacactacatcctcccatacttcctgtagtcaaatcggggaactcaagcttctgcaatttagttgattgatcgaattaatcagatcgatgaactttcaagaaaaaattaatgagatcgattgttcgttgcaatgtcagcaggtaacaacagtgccagtgccgacagctggttaatctgtcttgcaaattactactacctccgtcccaaaataattgcatttctatgatttaaaatttattctaaaataattgtaattctagagtactaattgccccatcaatcatatctcattcaaatttctccctattttaccctcaactatcttcccactctcacataaacaacatttaatgagagacaccatagtcttttttctcaaaccttaatatatgctaaataacataaaattgtaattattttgggacggaggtagtactaattggcaatttaaatggttgcaagatgcacatgattatcttaagaaacaaatttgatttgatttaggtccaacaatggatgcaatcaccactgcccccatacatgatccatcactttccttcacttcattatcacaaggggaccctcaccctaccaaagaatcaccattaatacagtagtaatagtatcctgttatttaaaaaaaatgattgaaatcggggcgcaaattattgcgattattattggtttcgaattaaaatccccccgaattttgaattccaacttggcaatggcaaccactctccccccaataaatagccgcgcacccgctccccctcacccgctcgctgcccatcacttcgccatcctcgccgacgccgacgccgacgagaccaaccaccatgtcgtacagctacgcctcgcggcgacgtggcgggggcggcggtggagggatggccgcgacggtgcttgcggctaaggtggcgttcgcggcggcggcggtcgccggggctggctccttcgcgcgcctcgccgtgccgcagctcgtgtccgtggccggcgccgtgttcccgcgggtgtgggcggcggcgagggtgtggctcgtgccgccgtacctgttcgtcaccgtgcacctcatcatcctcgtcatctggaagctctccgaccacaagcacttccaggcgcagcagcagcagctcaaggatccatggccgcacccgcatccggctgttccagtggccgcggcagaggatgcgccatcgcttgttgtcaagcccaaggaggagttcaacgccgcggcggccgtgtacggcggcggctgctgctgctgcatgccggagcactaatcctccccggagatctccccggactcc

SEQ ID NO: 1000 - DNA, 2538 bp, Oryza sativa
agctataccaattcataaatatatccagttttactccctttctttccttttctttcttttttaaaaagaaaaatagaatggagcaagtacaagcatgcacctatcgatatgtatataacttgcttcctgttcagtatcatatcgatcagctagttttatactatctcacactcactcacagtactataattcatcgagtcatacttatttaaaattagttcttaatattttagtcagaacaaattaattagagggcactgtatgattaagtaaagcaaacatagggcatcaacaaaggctaatcttacgctatttggtccattcatatgattgcaaacggcgcgaataaaaattattccctgatgcgaacaataattattgacaaatatagtggaactgaagaataaaacgatcgatcagctagggtagtgttcgtctcctccggaataaattaatacctcgtttccatttttttttttaaaaaaatatcacttaaatcacagcccgttctttctgatagctcattagattatcgagacggattatttattcgttttatgatttttaaaaattattaattttctacaaaaatattttacttattttgttaagaaattccttattttttatttattaaaatatttaatttatctttataacaaatagataatgtaggataaaagtctaaatcaatcggcgtgcaaaattgcataatgtattttcctttcagaaaagaattaaaaaaatgcatagagcttctggagcaagctagctagtagtattctcttcgtctcaaattatataacatcattatctaggaatatcaaacttgatatttttttattaatgatcatactaattatatctatgctaaatattatacatgttatatcactaaattcatattttaaagtattttaatgtaatgctaatttcataggaatatgaaataaattattgatcaaagcatatcattaaaatctttttaaaaatatagaatttataatttaggatggaaggagtagtaagcattcatttttgttagaattgacctgcattcaatagtagtagtatggtactcactccgtcccaaaataaatgcagttttgcactattcacgttcaacgtttaaccgttcgtcttatttgaaaattttttatgattagtatttttattgctattagatgataaaacatgaatagtattttatatgtaactaaatatttttaattttttcacaaatttttcaaataagacggatggtcaaacgttgggcacggatatctacggctgtatttattttgggacggaggtagtagctgtaatacgcgggagatatattcaggtaaatcccatacgattaggacagtgaccgacgtaatcaattctgtcgttcgatcgcgataacgcacgtattttgagggacgagaccgccatgcttgacctgaatcggttcgagtccgacccgtcgtacatgttcggatcgcgctgacgaactggtctccatcgtttcccggatgtgaatgcaggtcgccatcaatcaatctgtttctataatctgcattcagtttcggccggccgctccgggagtgactacaacgacgcttaaattggtgaggttttctccaaattcagtctcaaaatcatagtcccaaaaagatacacatattattaatggcaaatccaaaaagaaaaactataagtcattttgacttattttcttgtttgatcaacttcatagaaaaatatagcaatatttagaacaccaaactagtttcattgaatatattttaatagtttgtttgttttgtgttaaaaatgctacttaagcttggttaaacttaaataaatttgattagaaaaaaagtcaaaataacttaaaatatgaatcgtatgaagtatgaaatatttgctcgcaatgaaaaacattttaaatccattgcacatttacacttcagaccgacgagccagggcactggatggtggatcctcccctacatattttgcatcgctgaattctaatatccgagcacaaaggccggaatgtttattctattattaaaaaaagataatgctgagttcataataattaattttaaagatgattcataataattagtagatgacacaaatgaataaagtattaattgttttaaaagttaaaaagaatgataacaaaatactttaagaaacaccgatgataatttcttataaaaaaaaccccaccatttcagcttgcaaaaacgtgccatgataatccgaaccaatgatctacaagtatagagaaaaaggttgatgatgaattgatgatcttggcatgggctgcatcgatctgcacaatctgccgctctgaactttctgaagccgacgaacgcacgcaacaaatctgaactctgaatcttttcttacgataataatgtctgaaactctgaattagccggcgacgtaatggacggcccatttcgccgtggacagatcgatggatgctgggtgatgtggagtggagatcctatgctgtaatgcacatgcggtgggtgt

SEQ ID NO: 1001 - DNA, 531 bp, Oryza sativa
ttaatcgcctttggtgattcataccgaagatcaaattcggttaaagcaaatattcactcaaaccgaaagtcattacaacctactcaaacaagccgattgcacaaggacatctgaaagccgtcttatgaatgtcttcttctgccataaagatctgattgttacctgcattgacatccataaaacataatatcttatgccctgaagcagcatcaaccaattgattggcaaccggcattgggtactcgtcctttggggtagctttgtttagatcccgaaaatcaatgcacaccctgactttgccatttttcttgataactggaactatgttggaaacccactcagcatatcggcatggacgaataaaaccggcatcatacaaacgtttaacctcagccttgacagcttcaagcatatcggatttgcatctcctcggcggttgctagtatggtctaacccccggtttgatagggagccgatgttcaacgattgatcggctgagtcctggcatctcataatattcccaagcaaagc

SEQ ID NO: 1002 - DNA, 623 bp, Oryza sativa
gcattacttgtccatttaaatatattaactcgagtaaataatcaataggtgaaaaagccactgatggtgaacagcatggaaatcataatgaaagaaattctgtggtccaaaatgcttcattaggcgaagatcgtaaatttaatgatgaaatgtctcataggaactcaagtgcagaacttaaacaagagctacgtgttcatgacacacatagtagggaatttccttcagatgccaaaatatcaagtcagccgaaggatgtggctcctaccctggatgagaaggcacatggatattcccaaaatggaaaagttccaccttcaggcaataatgttgaaaattttagcaatatggagagcagtcaagggcatttagggaagagcagcaatgaggaagattttgtaaaggagccaaaggctgttcgaagaaaagaatccgaatcttcttccaaaagatataatgatgatgataaatctagcatgtatggaaatattgataaaaagggtagcttcaaggaggaaaaaggatctgacaggagtgtgagacatggagctgatacaagggaaccccgttccagaggaaactctaagcaggatgatgcaaaaggagagagaaaagattatcaa

SEQ ID NO: 1003 - DNA, 524 bp, Oryza sativa
tggcaaaatactttcatgcctttctagaccagataagtggcgaacataatcaagttgtccagatacatgccgagagggtggttctttctccaacaggctcagtaggggacgaatttgatcattttgaccactactatgcccatttgatactagctctatatgctttggtgatctatctgttgatgtccttcctgcagaaacactaagccgttgtggcctaatgggatcattatcatttctctccatgtgaccagcagccgccatatcggtgaatctaggcgatgctgaaggatccattatgatatgatgcctatctgcatctgcttgtaaagattgcagtgaaccagatgaatggtgatgatccagcctcgttttggaaatttctagcattggcggatctaattgaccagaccttcgcctgggggtggagccattctgtgttactgaagcaccagacccggagatggaagcaaaccttgttgcttcattcaagctatgaagagtattgaccagcctaagaagta

SEQ ID NO: 1004 - DNA, 857 bp, Oryza sativa
tgtttacattacgattgatgaccatgttgtgcctttagtggtttacaagagcgtacactttagagctgaggcattgttttgctgaacaattgcaacagttgattgtttgagacggaagatgcccatcataattatcaccatgcaataaatttgacgagatcctgtaacaactaagaattgatgttttctctataaatggatggtgacatattgagagaaaggataagtattcatatagctatgcattttgcactattctaacttgaataaataggcttgtctacctcgttgtcattagtccttttgtccttaacattagtatttgcaagtaggaaacttaccaggctgaagaattgggaaaggctcctcacaatcttctcattggttgtaaactggatcatacttgaatcttggatttaacttagttcgttagagttctgtgtttatttgtaaattttgtccctgcgttcagtacctgtagactgcagtgattcaataggagcatggaaatatttcaatagaatcgattattagtgtcagtacgcatgcataatgaattaatatgactgccatgttaatcgtagtactgaaatatgagtatatgacaggtagagggctttctgaaggcaatgcaaaaacagatccattcagctggaaaacgtggttttttttcgaagaaatctgtgggaccacatgttcgtgaaaagttcaccttggaagatatgttgtgcttccaaaaggtgatgccatcaatccccacattatctgttaggttgcattttgagcaatttgtttatgttttcaaatcctttgcaaaagtataagattatgataaaaatggcgatgcttctattatt

SEQ ID NO: 1005 - DNA, 3017 bp, Oryza sativa
tgccagcagcttgctgtagtggacgccagttacaaattggctccaaatccaaaaggctcagggcgtcccattccgagcacgcggagagtggcttgcaacggataatcaatcctaaatttctaatcccaagttgatctgttctttttactatttagagcaggtacaatagcaggctataagccaactgcaaatatattttaagtggataaataaggagagagaagagtagcggactacagatttatagccagctgtagcacagactccaagacgcagtgtgtgtatgacaggttggaccaggtattaatagtgtagtatgtaactattgtatgaataagctatggctatagatgaattagagctagtagttggctatactattaaacttgctcttagatgcatgtttgaatatcaaagacgtttgtctagcttgcatgtacaaagtcctaatcatgccgccgagcaggccgcgcgtgctccgggcgccgccaccgccgccgagcttgtcttctaccgtgaccacttgtccgcagaggccatgtgcctgcaaaagattcgacaccattgccagccacgccgcgatgcctcagcagccaaccctgccgcgttcttgccgcaaagtgccgcaaagcgcgcttatgggagcatctcgacaaccacagcactcaccggtcagccaacatgccgacaacctcaccggagaagagagaaaggagggagagagaggaagagaaagataaaggaggagcaatttggtcaaatcatgtaaaaaagtggatcccctctcatccagtcagcatgaaaatattaatttaatggatggagtgttccctagcaaataaccacatttacatagtgtgtctcacaaaagtcacttcgtgcagtgtcctacagctaaaaccacgaagtcgtgatgtcttatagcaaaatttgccaaaaaataacgctagaattagcaagctgttggcacatcagcctcaagatgaccgatgactgttgggcttgtgggctaattgtgctaggcgtgcagcactagcagcaaccttgggctttggcccatccaacgagtacgagagcaagcagcagcagcagtttgcaagtctgtagggaaagaatgatcctacctcgagaatttgaggcgaaatgttatttataaggatgctttgccctgagcaattataacaccgagtttatttttacatgagtgtgtcagtacagcgtaggagtggtgaattgggcctatgagacgatgggtcggaaaagaattctccgaaccccagtattcgtcacgatcgccgtgcatacatatgttcaaccgaacaccaaagcaagcactgcacgatatataacacaccacggagtagtattcaatggtcgagggtgaagtacatgtcgaagacgacgacgatggcggtgtccgtggagctgagaagcttgctggtcatgtacccgcgcgcgaaccggagcttgcccgtgccgccgacgatgctccgctccgacgggcccgtcgtgatgaagtggccctgcgtggccagcgtgctgccgctgtacgcgccgtagtcggagaagacgaagttgatggccgtgaggccgcccgtctcgtccagcgacgcgtgcaccgcgaggccgtgcgccctcccgatcagccgcgacgccgggtccggcccctcccgcagcgcgttgtccaacacgttcacgtcgccgaacgtcgacgagttcctgcagtacatgttgtacgtacgccatcacgcaggtggtacatactctaattaagagctattcagattatagccaaaataacccttacaaatgtcaaaattttaacaagcttataatattattaaaattttaacatgatcttttatgtatttagtaaaatttgacaacaaactaaatacaggtactttttaacaattttataaaaaaaaagatacggttgaaaatagcattaatctgaacacgccctaattaagcttccatggactcatggtcaggtacgtaccggtgaaggctggcgacgttgacgacggtggcgttgggcgtgccggcgtcgacctcgtggaagtagaagtggagatgggtcagctccgcgtccacgacgctgcagacgatgatcggcaggaggcagaggacaaggagaggaaaccgagcagcggccatggagtgagctaattatctcctcgatctgtgcgtggtgtcagtgattgctgagccaattttatggtgaggaaataggaataagaggctgtgtggtctattacattgtactcacaaaaatgacccttcgatgcgcctcgtcttgtttggttgcgtgacttccgcacctcgcgcgagaggaactagtgtattcttccgctgccaaacgttggatagtcccaatctgatgtagccgcaaggttgttgcatggaacagttgtactttatttatttcaagtaacacgcatcttatttagaataagacgcctgtgttcgttagtgatagtttggaaattttttccctccgtatgaaaactagatagttcattagcacatttataattaagtttaaagaatttaaaaatagattaatataatgttttacaacctttttatatatttcttttaaaaaaagtattgtttagcaattcaaaaaaacatactataaacgagagcagaagctgagaaatgagttcagaacgcagaggctagctcacgtaatttctactatatcctaggtcaacttgaaaggattgatgtcacactaataattagcaactgataggaacattttatcgaacgataacgtggaaatcaccatccgctagtccatctgatgccacaaacatttgctacactgctatagaagtgagcagaagcagtagtcgtggcacaccaatgttcaggggacaaaaaggagcttagttctaataactcttccaccatctgattctcctatgaatgtgtgctacggttccctttgtacaagaggcatcattgccataatataatctgttactatacaattggtgtacaacatt

SEQ ID NO: 1006 - DNA, 18815 bp, Oryza sativa
tactgaaaaagtaaagttggggtttgttacacaactcatttgcgttattattataggattgctaaaactgtagggccacatttttttttcacttaaattcggttattttttttccttacgtgattgctctctctctctctcgtataatgataaggttagctaagttttctcattcggagatggattttcatccctcgagaagacatctctcgtttcttacgtgtcacctattaaatcatctttttttaaaaaaaaaacaagatacaaggtcaaatttatttttttccaagttataataaaagaaccaattaaactgaaactagttaacatacatttaccgttatatttttttacgacttgtagagattgaatttaaacttgcatacttatggagtgatatatttcacatgtatctatcttatcatttttttaaaaaaaaatctaataactatttaggtgatatatgggaaacgagaaatgtcctcacaaggataaaaatattttcccgtctcattctactttatattactacaatagatggatgaaagagttttatcattatattttattgaccttgcaagagatctagtcttcggcccaagattaattttctcttgcaatttgattcaaacctgtcattcaacttggaatcgattgcacgttctaccatgcacgaagtataccgtattgaagaataagtttaggagaaattttataatcctgaagaaagcatctcaagaaaacctaaactttaataataacacaggtcccggaaggtgttgctgacaagcggtcagcggcgtacaacaaggacaaggtgttcgtgcacggggcctcgcaagcgacgggcgcggcctaccggcggcagttccagtccgacatggcgcgcttcttgcggtgccgcgccacggagctgaaggccggcggcgtcatgttcctcgtctgcctcggccgcccgtcactgcacgcctgcccaacaaaccaaggccgcgtccagcttctatacggcgccatgttcgaggagtcgtggggtgacctcgtcgaggaggggacgatcgggcgcgagacgatgggcagcttcaacgtccccgtgtacgccgcgacgctggaggagtttggggaggccgtcggcgccgacggattgtttgagatcaaccggctggagctcgtaattacgagccctctcgctgtggacgaccccatcagagaccgccgcgcggttgcgaactacgtgcgctcgctcctcgggccgctcgtcgacgcgcacgttggcagggcggtggctgacgagattttcgtccggatgcagcgccgcgcggaagcgcgtgccgaggagctcgtggacgagatgcgtttcccccatattgtgtgttccctttcgctggcgtgacggacgggtattacgtgcgtatagacggtgtaatatgaagacgtactggatgtattttacgggaaagttttatagctcttggtcataatgtcctgtttcgttatgaaagaataaaactgtttgggccaacaatgaagtaatttatatttttcgctagtcgttttaagtttttcgagccagccagagtaaattagcagcagtaaacagtttaactgagatgtccgtggaagtgtggagccgcgcgcgaacagcctgccgatcctctgttccgacgggcccaacgcgcggatgcggcccagcagcgtggccagaggcctgccctacatgcgccgtgaagccggcccgactcgtccagcgacgcgtaccgcgtacgtgcaccgcaatgaggtgatcagccacgaccccgggttgagtccatttttgtcgaatacgttcgttcccgtcggtcaacggagatgaattctaattgctcaagtgaacattcacccgtttattatatgtcaattagatggttacgaacaaaatttaaaaaaaatttgacaagataaatcaatatgtaatatatcactctacaagcatgcaagttcaaatttaacttctacaaattgtaacaaaattaacaaatttaattgtatatatacatattgtaatttgagttttgtttgttatttttttatatttgtagaagttgaattttaacttgcatgtcgtggattgatatattacatattgatatatcttatttatattttttttacttttttaaaaataatttagatgatatgtaataaatgggtagacgtccactgctcttaaaacagtttcccgtcggtaaacacatggacgagttccgatcctgcacacatgtacgcccgagtgatgtatgcatgggcacgtcatggtcagctaccggccgtgcatgcagactgggcgtgcggcgtgccgctggagatgatgacgacgtacgtatacggtcgcgttggccgtgacggcgtatgtcgacctcgcggaagtagaaatggaggtacgctcagcgcctcatctgttcgtcaggaagcagctctccgcggcagcgattgccgaggggttcgtggccgaaacgcggttgagtggttcccccacgtcatgtgtgtttgatcaatttttggcacgcgtgacggggggtattttaatttggtgctcgtgaccgaaatggacgtgcgatgcatggtcttttgtagcaccaaattccgcagctatcacgtttttgaaaccgatctatttcttgggcgtacgcaagtgtagtgaggtggctccgtacagagaagaatttgatactcctttcatttcaaaatatagtaatttaaaattaaatgtaacacatcttaatataacgaatccggataaatctctgtctagattcactgtgtattaggatatatacgtgtcatccttggctgtaggttgtaactcgttaagcaaagcccggaattatattctattatctaaagaaaatatatgtcatccaatattgtgttataatattttgggacacgagaagtattagttatcacttgaggagtgtctataactctaaattgggtcaattgaagcacgaatattggattgcctatggccgatttccaaaattttcagaattccggtaacccaatattaattgttaaaccgaaatgttcaaccctgaaacactgtctgatgagactgttcagttgacaaaattaatcaatctttcatgcatgttagattgttaggtagctaggcgtacgtcaaggtgttccgttcaaccgtgcatgtatgcacgcacgctatatatagttaattgatctaccctgcatctcatctcacaaaaaaaaaatcatatcatcacctttctttaaataaaatggttgctggcctaatctggttgcctataaatataatctagtttaatatcccttctctcttacacaaacttatcttcttatgtcaatttttttaaacactattatagatgtaggtgcatatataaacacatgtaaactcacctgtataaacgtaaaagtgtattgtgcccattatttatcacttttttcaatatatagacttaccaacttctttaccttaattatataatccttttcagaattgtgtttcccaagtcttaacttaaattttgagaaaaaaatttcttgcagatatttacttctcaataactctatgcacgtctccgttgtattatgttctagtcttacagtccatttggtaagcgagcaaatattcatcaatctgtttttaaagaaaaaaatcccctaaaatcctttggtgcgcttaaagcactatatttaaaagatgatatttttctcttttccctagtgcctgcttataaaatctcccctttattgtgtccactttcttatgcatactcttggaagtttatagaagcctatggtgtatatttggaaaacttgaatgcaacaacatgtgatgttctcaatcaattagagcctttcacctcttaatttttcacacctacttatcttctcaaccaatcacaatcttttcctatttatttttacctacttttttataataactatgttctaacctaaatttttttgtatttttggatgaatgtagtaagaatttatcaaaaagtcgcctcgccttccccacccccaccaaaaaaaacaaataaaataaaatagatgggtgctttcccaattgtaagaatcaaatctcttccccactttctgaatcacgccatataactactttccaacttttcctgtatcaattgtcatgccgaaataagttataggaaacttcccactttgtagctcagcatatcagccactctttcttctctctttatcaactcttaccacaaaaaccttttttgcagtttcatttcagacaaagcaaattaaagagcagaaatttcaaggccatgaagtttttgtcaatgactttagcaacaaaactgtatcatcagagagacagagacagagacaactatatatattagatatacgcccccatcaactctactcccgcagtgtgcgcacggtggaaccaagataagatgcaagcgcaggacatgaagaacgtcttctgcatgaagggtgggcaaggggagtccagttacctcaaaaacagtaaagttcaggtaacaaatagaactaaattaattacctaaatgctataacaattaattgaagttcaaattctattttttatacgtaaagaattaattgttgaagttcaaattcagcattcaactttagtttttaaaaaatcagcatgcaagtatgcaaccagaggctattatgtttcattagcaagttgcttccctgtgcttgatcgagcgaaaatggcaactaaatgcagtttagaaacctgcaaatgatgctgcgtgccctggaggagacactggacaaggtcgtgctcccacaccacgggccggggaggcttctgctgacggcggctgacctcggctgctcatgcggccgcaacacgctcgtcgtcgccgatgcgatcgtgcagcacatgaccaagctctgtcgtcgtcgcggcaagggcgagcatggtgacgacgccgcggctgatccggagttctgcttctacttctccgacctaccgagcaacgacttcaacaccctcttcggcctcctcccgcaccgcggcgccgcttcctccggcgaaggcggccgtgggcggcggcactacttcgccgccgccgtgcctggctcgttccatgaccgtctgttcccggagcgatctatcgacgtgttcacctccaccttctgcctgcactggctctctcaggtaacgcaccattatagatttcgaggcgtgttcacctaaatgagaatcaaggagcttgattacatatttacataggtgccggaagaagtcgccgacaagtggtcgccggcgtacaacaaggagaaggtgttcgtccacggcggctcggaggaaaccggcgcggcgtacaggcggcagttccagtccgacatggcgcgcttcctgcgctgccgcgccgcggagctgaagcccggtggcgccatgttcctggtcttcctcggccgcccgtcgtccgccggcccgaccgaccaaggccgcagcctgagccagttcggcgccatgttcgaggagtcgtggcgcgacctcgtcggcgaggggttgatcgacggcgagaggatggacagcttcaacgtcccgtcgtacgccgcgacgctggaggagttcagggaggtcgtcgacgccgacggctcgttcgaggtcaaccggctggagctcgtgatgggaagccctctcgccgtggacgacgacgacgacgactcccacgaccgccgcgcggtcgggcgcacggtggcgaacaaccagcgatcggtcttcggtccgctcgtcgaagcgcacatcggcaaggagctcgccgacgagctgttcgtccgggtgcagagccgcgcagaagcgctcgacgacgagctcgtggacgagatgcgggtccacatccacatcgtctgctcgctttcacttgtgtgacgatacttaaatcgtacactgtcctaatgaaaaaagaataatcaaattccgggtacaataatttaattaaggttatatttggcacatctcataattttagataagtttgtatgttaaattatagtggtttaaacttttatatttcaattaaaataaaaacaaatgatgcatccattatcaatgtaatcgcagattcagatccatagatttatggagttatggatattcatctttaagaaatttcggatctagagctataccaaatagcatgtaaatataataattgaatttgttaaataattctatctcatttgttggacatgaaagttgggagtacttggcgatgcaaatagtagacgagcaacatgtttagtttgaccaaatttatagaaatacatagcaatatttttaaaacaaaataaatattgtcgacagggatacccgtagaccggatatagagggtattagggtacgctggtacaaggatctatgtaatacgacatcaagcaggcagaaaacaaagattatactggttcagaccccttggtaggtaatagccctaatccagttgatatggaattatatgatggaaaccacagattacaaagggaatagtggaactcgacggtaccgacgagatcgtaatcgagttgatccgattagatctccgacgacttggctccgataagctccggcttcgtaggctgtggtggatgtgttggctctgagattcgatgccttaggtccttccggggggtcccttttatatcgcaggtcaactgtctccaagtaggactcggagaagccggaccgaacacgacacaatgacaacccagttctgaccaaataggactccttccatctgtgaactccatgatgaatttccttaacgtatgccgagcacgtccgtatactcgtgagcataccatatcgatacgtgacatatatcgaagggtagagggtataccttacccgtaaccctgacactagcccctgacttctgcttatatgaactcgtgaaaccgatcgcgacttctgatgtcgaagttgtcgtcgttcttggcgtgatgaccgagagacgaggagtgatcgacaacgccgggtgaagctcaacggtcatgagtgaatttaaattgaagtccgagaaactgccgcatgtaacggacccagaaatttccggcgaccatctctctcctttccttggaattcgcaccatcggggtttaagggagttttggggatccaatttgaggtccgcatgttaaaaaaaaactctccagcttccaagcatccctcgtcttcaccgctcccgcaagaaccctagctagttcatctcggtcccttctccggtgatccccggcggcgatggatctcgacaagtctacctccaccagcgcgtcgctgaagaagctacaggcggatggcacccttcccggtcacgggaccatggagagagaagcaggaggtattgaaccccagcctgtcctgggtcgcatggttgcgattgaggactacattctctgtggttttcttcctccgccttctgaatttcttcttttggtcttgaatttctacggcctttctttgctccatttgagccccaactctatcgctttcctcagcattttttcgcatctttgtgaggcctatattggggtagagccgtttcttaacctttttcatttctactatgagttgcgctggatggaacccaacagggcatccgggtgtgccggtttcagactccgagatggcctgaagtcgcgctatatccccttccagtgtccttctcatagcaaatggcgtgcgaggtggttctatcttcagatagaaaatttggatccagtctttgttgttcctgaggaacaaccagacaagatttcgtcttggaccgcaaaacccgccttgaccccatccctccaagctttcattgatatcattgatgaccttcgagtacgggggttgtcgaggtatgaagtcgctgccgacttcattggtagacggatccagccactccaggctcgagcccatccaacctttgactattctagaccggaggacgcgacccgggtttctcctcggggtatttttcttgtatttacactgacttgcttatgtgcatgttcctcctgacttatcgaattttggttctcgattcacaggtctgagcagcgaagccgttgagcgccgtgtgggctagttgattatcagcggcccgacaacggcaagccacgtccttgttccccttagcgagaagggggcagccgaacgcgaagctgccatcaatgtaagtgtactcggcagcccttctgcacttttattccaagatcgcattgtgacttcataaagcgtaggctctccctctgactgacatcatcgggccgctcgtggatcatcaggtggcggcatcgctgaaggaggacatcgccaaggaggcgtccgatgttgctgccgctgctgccacaacgagtggcggctacgttccaaaaagggggaggaaattctcctccgtgatcggaaatcgttggaagacacccactccctcggtaagctttcctggtccctcatcgcgtactcggaaaacttccacctcacatcatacccgttatactccaggcctcggacgcgtctcccccgcctccgcgacggcagcggcttgtgacacttggcgagaagtaagtggatgagtttgaggttttgtcacttcgccaaattcttgtagcctgtctcaattgcaacctttcgcggagcggcgcgggcaaaggcgacgcaagatgggtctggaggaacctccagcgcgtctcctgctgtggcctcgacaaatgtcgtggtcgtgcccaggagccgcgaggcgacgcctagtgggccggccagtgatctcacggctagtcggggtccgccggctgccgtccttacctggaaggagctccaggtcgagatggggcgcctcctcgaggctggtgctcgcggcattagccgcgagatcgcggaggcgagggcagcagcggcgtcgtcggcgaatgagcgcgccgatcggctgacgtgtgatttggtggaggttcgcgaggacctccagaagatgagggagttggtggccggcaatgagcgacaacgacaagggctcgagcatcgtatgtcggagcttgagaacaacttgtcggagatccatggctccctacgggtcacctacaccggtctgcaccagctcgccggggagtgtggcgtcaagactaccatcccgacaaatcccgacgagttctcgctgacgtcttcgcttgcagaactggcgacagcgatggagacgtccaacgggatctacaccggggcacaccatgtccacgcgtgtgtgaggctggcacaccctgaactcgatctccagaagatcttggatcagggggcggctagcgacgcgcgcaaggatatgatagaagaagttggcgatctgggagagtctgtcctcccgctttttgaagagtaggatttcggctccctcgtactcattagacatgctgtataaaactctaattggttccaaccgcctttgtgcgtgcagtcatcaccttaattttctttagcattgtgatcttgagtactttgttgtcttctgtagagacgttgatgtcgaggatgtccagcagtgcgggcagcctgagttgccagcgatcgttccagcacttgcgttcgagtcacatgtgctacagggcaatgtagatcgaagttcgcccatggaaacgggcgtggcagcgacttccttaggttggttatttttgttttcatctccttcacccttctgtctggattgactaaatttgttgtattctcgagagagaagagcagtttgacttagtcgtttccatgctgagtagacctcgagagtgcgctagctgaccaggatcgtcgtattcagtattggaagacaaagtttgaggtcgcggaactcgagagggctatgctagaagtgaagaaggaccaggccatggagacactccggagtcgcaaggtgtggttcaactcgtatatgaagagttgctgcatctccatgtcgagagtttgtagagagctccgagtaccccgtggggatcccgaggaatcggcggccggatacatctcgtggctgaatggggcctgcacccagctcgatggcatcggccagcgtatcgacgaggccttgaagcaagagtgtcatcgatcgagccgatatgccggggggcatgtattggcttgtatacgagatcatcgtccgcagctgcaccttgagttcctccacgaagggttttctcgttctcggagaactcctacggagatagacggcctggcgaagtcgatggcgccgctggcggagaaagttttccagtcgatggaccggcattggccttcctagtagtctccgtgtcctgtgacaaatgtcttagggcaaaagtgtaatatagttttggatttttatgggattgtaagaaatacttgtgaaatagaaaagaaatctatctaactaagcttccttactctggatgtagtgtgtatgagtgtcttctcacttcgcgactttgatcagtcatttgagttatacactctccctagcccccagccttgtcatcggagaattcttctcggaagataaggctcttggacctttgacctgcctcggttgaacaagcactgatcctagccccagccgtgaagttggaaagtttatttccgattacacggcttggttaatacgcacggcgagaactcttacatgaccagatcttacatggtctttcgtctctacaggatctatcaaggccttatcggctctgggcgtccccagccgaagttcccttaggttcctcagaggccttgtcaagacggcgtaaagggacatgaggataggtttcaacgcaaggtgtcatctaggtaagggatcctcgggaaggaacacttcgattgtgatctggacctgaaaatatgctttattgaagctgtaagatgtcttacaagtatggatactattgacttatacatagaatttacgtaattgatcaatgttccaggaatttgccaactcgtgaccatcgccgtctgcaattttgaatgcgcctggccacagaacttgtgtgatcgtgtacggtccttcccatttgggtgagagcttgtttcgccctgcttggctttgaacccgtcggaggacgtagtcaccgatcgaaagcgtgcgtgctcggatgcgcttctcgtggtaatgacgaagggcatgttggtagctggctgctcgaatggcaactcgttcgcgatgttcctcgagtagattcacatcgtcgtttcgctgctcctcctgatcctcatcggagtacttatgtactcgtgtactttggtgtcgtagctcggtggggagcatggcctctgagccgtacatgaggaagaagcgtgtctccttgttggatgttgtcggtgtggtacgcacggcccatagtacagatggaatttcttcgacccacttcttgtcatgtgacatgagcctgtcgtagacgcgggtcttgagtccttgtagtactatgccgttttccctctcgacttgtccattgctctgagggtgagaaaccgaggcgaagcagatcttgactcccaacctgatgcagtaatcctggaaatcggcactgatgaactgggagccgttgtccgttatgatacggtggggcaatccaaatctgcagaatatccctttgatgaatttgatggcgttgtcggccttgatttcccccgtgggtgtcgcttcaatccacttagtgaacttgtcgatcgccacgaatagaaacctgtagctgccctgtcctcgtgggaatggcccgagtatatctagcccccagcactagaacggccaagtgagagggatagtctggagtgcttgtgctggtagccttgtgtgtttactgtggaattgacaggcttcacaccggtgaaccatgtcgcaggcgtctttgagggcggttggccagaagaacccttgtcggaaagctcttccgactaatgtctgaccgacagcatgtgacccacagatcccttcatgtatgtcgaggaggaggtgtctgccgtcgtcggacgagacgcattttaggagtaccccgtttggtgccttcttgtatagatcgttgccgatcatacaatagacttttgctttacgggatattttctcggcttctgcgtcgtcctcgggcaactcttcgctgcttatgaatttaatgagtggggtgcgccagtcgtccgtggtctcgatatcggcaacggcgcgctctgcctctatagcccccgagctggtgtcaggggtgaccgggctatcttcgccccttgcctctttcactgatggcctcgtcaggacgtccagaaaggtgccaggttcaagtggttctcgtctggacgcgcgtcgtgctagatcatccggttcgatgttgtctttgcggtatacgtgtcggacctcgatcccatcgaaccttttttccagcttcctgacttctgcgagatacttggataactcggggttagagcacttgtaatctttatgcacctggtttgcgactagttcggaatcccctttcacgatcagtcgcctgactcccaagtagtccttcatattcggctgtgttattggttgccctgaagttgaggtgaattgcatgcttgaattgatctcccgaaggtgatgtcaagatgaatcctgcccctgctccccggctgttgagtgctccgtcgaacgccattgtccatgtatcattgtcgatttggttgtctggcctattatcaggcatggtccaatcggctacgaaatcggcaagtacctgtgacttgatggctgttcgtggtacgaagtggatatcaaattggcttagctcgactacccatttcgcaatgcggccgacaacgtctttgtttctcacaactttgctgagagagaaggaggagacgactgtgaccctgtgggcttgaaagtagtggtgtagctttcttgatgtcatgattactgcgtagagcagtttttggatctgtggatatcttgtctttgcgtcgtggagagcttcgctgacgtagtagactggtcgttgcaccttctctctctcgacaacaatgacagtgctaacggaatatggcatggcggcaatatagagaaataattcttcattacgttggggggcaacaagtacaggtggattggataggtagcgcttgagtgcaataaatgcctcttcggcctcctgtgtccatacaaatttgtcttgcttttttagcagagcgaagaaaggttgtcctcgctctcccatcctaacgacgaacctgtttagtgctgccatgcatccggttagcttctgtacttccttgagtcttgtaggcgacttcatgttctcgattgccttgatcttctcgcgatttgcttctattcctctgccagagacgaggaagccgagtagcttgcccaatggtactccgaacgtgcacttctctggattgagcataaggcgatatcgtcagagattgtcgaacgtttcccacagatcgtcaatcaatgagtcgcttgtcttggtcttgacaacaatgtcatcgacgtaggcctcgacattgtttccgagctggtcgctaagtgcaccttggaccgtgcgctagaaagtgtttcctgcggttattagtccgaacggcatcttaacgtagcagaataccccgaatggcgtgatgaatgttgtcttctactcgtcttcttttgccatgcttatttggtagtaaccggagtaagcgtcgaggaagctcaacaactcgcaaccggctgttgagtccaccagttggtctatttgaggaagaggaaaatgatccttgggacacgccttgttgaggtcggtgaagtcgacacacattctccacttcccgttggccttccgtaccatgactgggttggctagccactctggatggagtacctctctgatgaaaccggctttgagaagcttgtcgagctcttctcgtatggcttgttttcgatctggtgcaaatctccgcagtttttgctttactggcttggcatcgggtcgcaccatgagtttgtgctcaatcacctccctgagtacccccggcatgtcggacggctgccaagcgaacacgtcagttgtcgcggaggaaggtgatgagcgcgagttcctatttctcacctagtgatgccccgatcttgacggtcttgtcgaggttggcactggagagtggaacgatcttgattgcgccgtctggtttcggcgtcttgtttgtcttgctcactttcttgggtggctctattgtggcaggcgggctgggcgtgtgctcgaccatgtcgaggctccgtttgtcgcattgtactgctagcttagcgttcccttgaatagtgattgttcccttcggtcctggcatcttgagcacttgatacgcatagtgagatgcagccatgaacttcgcgagtgcagttctcccaatgatggcattgtatgctgtatcgaattcagcgacatcaaaggtgatctgttccgttcggaagttgtttgcttggccgaaagtcacaggcaacgtaattttgcccaatggtttggacgatgactgaggagtgattccatggaagggttgatcggtgggtgtcaactcacttcgtgggatccccatcgcgtccaaggcgctggcgaagagaaggttgattgagctgccgccgtcgatcagtactcgggcaaccttgatattacgaatagtgggttcgaccacaattggatatcgccctgggatgacagcagtcttggggtggtcctcttctgagaattctatcttctactcggaccacttcatcttgggcacagccccctgccatgtcgaacagacttcacgttccactttcttgtattctcgctttgaggagtatgccgtggaacctccgaagatgtgtgagacatggacatcggagtctgggtatgctgagtccaattcttgagtaggcgcctcagcgtccttctcaaccacgcgtactcgcttgcctttttccgatgccatgtgttttgcgagccactttttgaagacgaggcaatcttctagagaatgtctgtccgtcttgtgtatagagcaccatgctttcttcgtgtcactgccttgtgggtctgggcgcttgggagggtccgcgtattctgttgcgagaatttccgatttagctttccttttcccactcttgcgatttttcttcttgttcgactcaagtgcgtccttggctggtttcttctctactccggtctttggtttgtcgttcttgcgtctcagtgcgtcatccgcatgagcacattgatcgacaatttcgaataatctccgagtagtcgtgatgcgcctcgttgtcaactcctgagtagtgtagcgatctctgacaccggatttgaaagcgcgaattacagaagcatcggtgatctcagggattgtgtttctgcactcgttaaagtgccgaacataatccctcaaggattcgcccgggttctgtgtcaacgcatgtaggtcgtcttcgatcgcgtggcgcttgtaagttccttggaagttggctacgaactgctgccataagtttgcctatgaagagatcgagtaggggggagatgcatcaaccatgaacgtgcagagcctttcagtgcgttggcaagtaattcgccaacgcgttgtcgtccgctccggcggcgtagagtaccgtggagtaaacctgaaggaactcttccgggtcagtgctcccatcatatttctctattgctacaggtcggaatctttcaggccatcggacatcccgaagtgaacgaccgaaagatctacacccagcgctaggggcggtgagttgtcggcgatcatacgttcttcgtggatgtctatctgatgatgaagatgacgaggatgatgatgatgacgatgggtcgcttgtttccggcgtacgattatggggacgtcggccgggttctcgagaatcctgtcgtcatctcccgctgttgtctcggcgccgatctccatcatcgtcgtcattattgcggcgtcctcgaccagtatcgcccagcacccgccgttcgcgatcgtcgtgatcgtggcggttgtggcggttatcacggtctcggtcttcgcttgaacggcctcctcgatcttcgttattgtgacgccgtgaagaaatatgacaccgggaatggttctcgttatctcgtgtgcgtcgcgcctctcgacggccattcaggtgatctcggagatcaccggtgccgcgaggtggaggggtggctcgatgaggcgattcccgctgttcagggttttcaccattagcatcgccagttggtggctgttccgggtgcgctgcagcagcggtctcttcgaacgcattgctgaggttggtcactgattcccgtagtcgttttgtccaacgtgcgagatcgtcgttcagaacgtgatcgtagggggtttccctcagtattgcgttgacggctctgatgagctgggccggagtagtcacttgattctccgcttccgcaccggtgcgcgctgacgtgccgacatcgtcgatagccaatacctcacgcggcgtactcattgtcgatgatccatagtcttcgagtaggtgcaagactgatggttcatggggatcgatgtcgattatcccaacaaatcgatctgaaatcggcatcgctcattgttccttgtcctcatccctgatggggatgcgtgactgctggaccttaggaggtggcgtcttcatggcgctgagaaagaccttgcagctcgagagatcgtgattctttgtcttgtgaataggacaatagacatcacgagttggagaggtacgctgaattccacgctctttacaggcacgaatttcagcatggacgttgagaaagacccagcatgcttgcagggtgtgtttcctggttttgtggataagacaccaggaccttgtcacctcggaagtaatccttgtcggctcgtgattcctgtcgggaagacaaggcttggccgcactaggatccttctcgggttcggacgtcgtcgacgttccgatctccgcttcggcgggtagatccttcgacatggagtcgccccgggttgtagccactgcgttctcattttcggtcattggcggaccagctgagatcggcatagtggtataaaccggaaagacgatttcgccgacttgagtccacaccagtgttgttgaagtaggaactccttagttgaggttggtgttgacgctgttgtcgacgaagctggatgtcatagtagtagaaccttgagcaccaagtccccctacctggcgcgccactgtcgacgggggatacccgtagaccggatatagagggtattggggtacgctggtacaaggatctacgtaatacgacatcaagcaggcataaaacaaagattatactggttcaagccccttggtaggtaatagccctaatccagttgatatgagattatatgatggaaaccacagattacaaagggaatagtggaactcgatggtaccgacgagatcgtaatcgagttgatccgattaaatctccgacgacttggctccgataagctccggcttcgtaggctatggtggatgtgttggctctgagattcgatgccttaggtccttccgaggggtcccttttatatcgcaggtcaactgtctccaagtaggactcggagaagccggaccgaacacgacacaatgatgactcagttctgaccgaataggactccttccatctgtgaactccatgatgaatttccttaacgtatgccgagcacgtccgtatactcgtgagcataccatatcgatacgtgacgtatatcgaagggtagagggtataccttacccgtaaccctgacaaacataatatcaaatatattgaaggttagatttaataaaattatttttttataagagttgttatatttttatataaagtagcacggtggtccacgcaaattatgttgctaacaccgttatattttcacataaataacatatacattttcacattttattattaaattatattaaaatggaaacataattttaaattatattctaacttatcaaactaaccaatatgcaattttcatattgtagtatagacacgtggtagtttgacttagactaaatttactgcgtcttatgagagggggtagctagctagcattgtttgcaagcttaatttggttggctcgattaggaaacccgagcatatattccattcagtatgctacccttcagacgtagggcctgtctgctttattcatatccatctatcctaatagtctcgaatagatcagtgtcgaagctaaaattatttttaacatgagtggagccaactagttaggtaatgactatagaaaaaaacaacataacagtgttggttgcctctgttccaagcttttctatgcgggtcgttgtggaacttatattgatgctctaatattctgaccaagccgtgttctctctaaaatttttagaatataaggatgggaactaatatgtaataacaattattttcctcttcgtgctagaagaattgaagtttgactaaattgaagaattgaagagcatagaaattagatctctgtgttcgaaaaaaaaatgttctcaccggaataacccaacaaaatatctaccttgtaatatcgtaagcaatatgtactgtggcgtcccggaataattgatggagaaaaaaaacataaattttttacaccgcacgaaatcacttttggggaaacacactctataaatatgattatttgtcatgggacactccatccattaaattaatattttcgtgctgactagacgagaagaggcccacttttttacgctccttgaccaaattacccctcctttctccttctcttcctctcttcttccttatctcttcccccccccc

SEQ ID NO: 1007 - DNA, 4648 bp, Oryza sativa
acattgcggcggcactagcttataaagggactcgctaatacaagacaaaagagatgatgtcaacagtacggcaacaggggtgtgctgtagacggtccaagctcatctccatcgtccgatcttcataatctccagcccaagcgttatcgaataatcccagccattgggtaactgaacttgccttcccttccagcgttcaatcatggcttcagttcgtcagagttctcacaccaccggccaccgcgcgaccttgtctgtaccatgcgcgagtcatcttttccttttttttgctctactcctgatttttaccatcaaccatatggccataagggttcgttcaaattctatgtactacggaccctcattaaaatgactttatatcccactgataaaaaatgacttcatattcggggtcaacaaaccaaaaaggaagcgttgaatgttgatgtgttcagtaaaaaaaaaaaaggctaaaggtttcatcgtggcaagttatatatgcgatcgatacagtacagctttgccagctcgatccaactaattactcaagaacaaattatacacatacacggatatacacccccattctcccgtcgtgcggtgaattcgatcaagatagaagagcagcagcaggacatcaagaacgtcttctgcatggagggtggccagggcgagtccagttacatcaacaacagccaatctcaggtaattaacaaattaagctagactaattacctaattaatacaagcataactgtatgcaatcagaggtggctattaattacctagtaagattgctacgcctgatcgagcaaatcaaaactgccggtgcagtcccgaaacctgaaaatgatgctgtacgcccttgaggagacgctggacaagatccagctccctcgtcaccggccggggaaaaagccgctactgacggccgccgacctgggatgctcatgcggccacaatacgctcctcatcgcggacgtgatcgtcgaccacatgaccaagttgtgtggcaccggctcccttaagtggtacgtaaacaataaaataaaagtggcagtgtggcactatagctcagtagggagacgcacgcaggagctgctggtgcatggttgcgagttcgatcgacgcccacctcacgcaatacgctttggtttttaccccaaccaacgtgcacagatcttgaagtccatcggaaatggccaacaatttgatatattaattttctcctaaaatttatgtcaaattacaaatagcaaatcccaaatttaaaatcatgtattgtgtcgtagcaagtttaatggttttaatgagccttctcgaatttcttagccaactgagctgagctcatctttaacccatccaacgtgcacagatcttgaagtccatcggaaatggccaacaatttgatatattaattttctcccaaaatttatgtcaaattacaaatagcaaatcccaaatttaaaatcatgtattgcgtcgtagcaagtttaatggttttaatgagtcttctcgaatttcttacaaactgagctgggctcatctttaacccgttgagtgagtcggctcataacttaaccaatttttggcagttaagctatgggttcgagttagcttgttaaccgcccttaaatgcaaggaactaagtgaagaagtttaaatgatttaattattacacaggtgccagagggagtcgccgacaagcgatcaccggcatacaataaaggtaaggtgttcgtgcatggtgcctctgaggagacgggcgcggcataccggcgacagttccagtctgacatgatgcgctttctacactgtcgcgccgccgagctgaagactggtggtgccattttcatcgtcagccttggccgcctgtcgtccacctgtggccccacggatcaaggctacatctatgaagtgtatggcgtcatgttcgacgactcatggcgtgacctcatcgaagaggggatggtcgacggcgagaagatggacagctttaatgtccccctttatgctcctacagtggaagagttcaaggaggttgtggacgccgacggctcgttcaagatcaacgagttggagatcgtgatggcaagccctcctgtcgtggatgatcccgctgaccgcggcatggccgggcgcatggtggcaaactacgtgcgcgccctcctcgggctactcatcgacacgcacatcggcggggtgatggctgatgagctattcatccgaatgcagcgccacgcggaaatacgtgccgaggagctcatggatgaaatatgcttcccccatattctatgctcactttcactggcgtaatggaatttacgaatgtattattggacggtctttatatgaaaactgagtctattttatgtggaactcttcgtatcttgagcataataaaagttattctggataaaattgttagttgtcttataaaatttaggccccatatattagccgatcttcctggatataaaactcttcattgttttaggcataataaacggccttttgtttgggtacttcaatttacccaagtttgacacatatttttggctaacttgtctaaggcatgactaataaaattagaaccaccctttagctagcgtatatggtctatgtaatgaagaataaatcttaccataaatgtcgttataaactaaacaatcatctacctcaattaaacttgtctaacttaattaagagatatgacaacattaagtaagttgtgggtgccagctaaactgtccctaaaagtcatccaaataaaagtgcttgttctcctataaaattaggcaccttgtaatttatcgaagtgaactagagtagaccgtgaacattatttggccaactaagccgcgaacgtttgaaaaaaacacttaagccgtgaacatttgagtagttgcgatacaaatactgggcgagcttaattgagtcgttaattagtattatttggcatccaaatttgatagcctaattgtgatatatacttaagcgtgaacttggggtgtaaccgcacattaacaggacgggttgatagcggacccaactctttagcctaaaaaaaattaagggctgaatttaaaatgaattaggctcaatttctatatatttttatctaaaaatatttaagtagcgggtagggttgtaaaagaatcggttattaccgttggaatgcaatatactgtaatgttcaattggtcaatcaaatatcacatacaaggacaatacgatgttcagtggtcgacggctgtgttcttctcctttctttcccaactcaccactctctctttttacgcgcacgcttttaaacttgtaaactgtgcattttttacaaaagtttactacagaaaagttgctttaaaagtcatatcaatctatttttaaagttttccttttctttctccctgattcttcccccaccatctgtaaatatttctcatgtacattaactactacttattaatatattgcagtaggggtaatatattacagtaggggagcctctcttgctgttttaaccgtaaaaaaaattaattaatcacacgttaataggtaacaccgttttatattcatggaggtagaactaactccatctcccaaagtcagccccctaggtacatgtgttacatgagattaggcgcccgaagtcagccccctaggtacatgtgttacatgagtttaggtgcccgtgcctggccgtacggtcgcatcaaccagctttccgttgcatgttgattcatgtgcgctcagcccaccggccacccacgtaccgcgcgtcatcgcagatatacgcatcaggtgatcccagctcatcaggtgatgatctatctgagctagccatctacctactgatccaggaactagctatatacgcatacacatatacctccattttcttgttgtgctgccgatccaggaactagctatatacgcatacacatacctcctttttgttgttatgctgtgaattcatcaattcaagatgcaaaaagtgttgatgaaggacgtcttctgcatggagggtggacagggggagtcgagttacatcaaaaacagccaagttcaggtaaaacaacaacaaaaatgctgggttacatacctatttagcacaagtcatagtaagttcaaattcagctgctctggaggttatttagagtatttttttttagttttgttactaaggtgttttcagtttgcctgatcgagccaaattaaactggcaatgtgcagtctcgaaacctgcaaatgatgctgccaaccctcaaggagatactggacaaggtccagctccctcgccggccggggaaacatctcctgacggcggccgaccttggctgctcttgcgggcataacacgctcatcgtcgccgatgcgatcgtcgaacacatgaccagaaagctgcgcagctgcatcttcgacgaccaagatgacggtgacgccgctgatccagaattctgcttctacttctccgatctccccagcaatgacttcaataccctcttccacctcctcccgcaacacgctactgctgctgctggcgcggcagtgagcggcgctacttcgctgccgcggtgcctggatcgttccatgaccgtttgttccccaagcgatccatcaacgtgttcacctccaccttctctttg

SEQ ID NO: 1008 - DNA, 1528 bp, Oryza sativa
tgattggtgaacacgtcggcgtcggcgagtcgaaaatgatcatcaacatcagtcacctctgcagacggtgcaaggatgcaaccaggggcatagaattctgatggtaccttgttctcagctagtcaagcgattatctgctttctcctttggtgtcctctcttcctgtatttcctccaggtcgtcgtcttcactacgcttgccagcttgctccttccaataagcaattaacttcttcaacctcatgatttcctttggggcaacatgcttgctcgtatcattgacaatgcaacgcactcgtgaagcatacctgcaagatggaggaaaaaaaatgccagtcaatactcaacaggtgtacacgagcaccaggggcataacacaaaaagacttgtatactggagcaatagaaattcatacatgagtgaattgtaagtctcctccaggttggactctgctggtgagacattcacaaacatcaaggttttcgcattgcctccaagagaatcactcatcagcattgtcaacttatggttccgataaggtatatgttgtccatcagaagataaagccccaatcacatcagccaatgcagaaagagacttattgatgctttgagcttctttcagttgttttcctgctgagccggactttttcaccctctcagaaccagcaaggtccacgaaacttagctgttcacacggaaaattttgacagcttagaatagcatctcacagcctagcttaacatatagtgtgttctgtgcagagtttatttattcttaattaattatagcaaataaacaacacaagaaaaataaaacttagaacatagtttgatgtagatgcctaaatcaaatatgcaagtgctacagcaatgcgtcggttttatgaaatatatattccgacaagcattctgcgatagatactcccagtcaaaactcaaaacaaaaggctgtcaaattacgaaaataactagatgcaaagagttattatgggcaaacaagtgtcatacataagaaggcaaaacttatcaacttgaggtaaggtatggtaatcaatcttcataatacgtccactgaaatatggacatatatggtagatgtttagtttgatatctgaggaacgtaccatgcaaaggtatatgtaaataggtattttgtaaaagcggcaaatttaaacaatatacaggtaagtgatagagacggttaaatggagacaataagaatactcaaatatagtttttttataaaaaaaattgtgaaacaaattggttatgcgacacagcaaggctagcatgaggtttccagttacaacccaccatacctttcctcttgcataagattgagtctggaggttggtactttcaataatgattgaaagaattaaatgagaccttgagctctcaacattcatatttgttccagcggtgtgtcttctctcggaacctcttaaaattatagccctcagttcttcaaaacttgaaatgttcacaactgtcacattttcaacagtaacaaccccctaaaaggaaa

SEQ ID NO: 1009 - DNA, 719 bp, Oryza sativa
gcacgcctgcaggtcgactctagaggatccccacctgctccacctgctgcacgctgcacaggctccacggcctcgccggagatccctccggccgtatctcctcagcgtcggcgggtacaatggccgccttgttcagaaagctcagctgcaacgtgagttatcgtatacacttgctagtacttaatttattttcgttttacataatttactatatattatcaataaaaaaatcaagcatacaatttttctcttatatatgtgaatgatggggggataagtgtcatttatcaagagagttgttggttcgaggatatttgaactaaaatgaaaacttgaaggactaatatggatagattggaatatcaaggactaaactgagccttagatgaaacttggaggaccactttggctattcacccatgtttttggatttcccccactaaaaaaaaatctttcagtcttctactagtagagtagataaaaaataataatggaactgtcaagcaattaaacaagaactattaggttctaaacattatgaaactgtatgcattacaagagaacattggaagctttcctacccgcaagtccaggataggttcaatgtttaaagttttacaaatcacaacacacaaacaggccattaataagaagtttggcacaaaagcccagaagtattttccacgggcacactaattactagaatatttctacaggtg

SEQ ID NO: 1010 - DNA, 1690 bp, Oryza sativa
ttgcctattgtgcatttggctttgaaaaggtttgtataaatctatatatttcctgcatgtcaacattttttgccagtagcagtttcagcttccaaataaaaagctatcttcctctttctggaatatgaaaattttgcatgatgtaccgcccatccttctgttattcgatgaacttaacatctgaattttgggtttgattcccaaatcaattggatgagattaaaatattgggaagaattgacgcaagaagctaagttgtgtgataagtgatctgataggttaaaattttgtctttttttatttaattacaactaggtccaagatatatggattggaggattgcttactctccattgatgaaacctcaactgaacccaagcaacttgtgaatctgtatttgttttttccggataaaaactatgataattttgatagaatattgtccatatattccccacttggttgtaggtcatgccagagaaatcattttttgggcgtcgaccgccagtgcctctttggaacaaggagatacatatcatcgttggagagccagtggagtttgatctgccaagcttgaagcaggcagcaagaacagtacctcaggattcatcttttgaaaggaagggttggccaagcatcatgccagacggactagatgaagcggctcagagatggctttaccagaagatatcagataagatccaatcagttatggagacattgcggaagagacttctcgacctgaagcaacattgatatttggctgtttacttgcaatccaaggaggcacctcctttttttgaacaataccttcttgaaatggtagaatatatagcttcattgaacagtttcagatgatgcaaagacgattgagagtaggcagtggacgctacatctgttgaggtgaaaatttgagacgacggtgagagatagaactcagcatgttagattacgaggcatttctttttcagtaggtcaagaatatttgtcaagcgcctacttttctttttattgtttggaatggtttgccatgtttacgaggcatgaataaagtcatcgcctattcaacttgttagatgttctattcttggcttgtttgttatttctgtcttccccggcactatgtgcagctttggtttaaaacctctttgcaccccagagaagataggtgccaaaaggcccaaaaccgtggctcgcacacatgatctgttagtatagactgtagtagtgcttctgcatagtgtgttgcaagctgtgcccttttttattctgaacctgtggatgaccgttttactttccagatcccagtagtgttggtgttggttgttggatactaccggctcaaggaccaaagatccagaagggacaagttcgagcccagacggacccgatgtgcgatggctttttctgaacattattcggctgaaccgcacgaataacaggtatgtactactagtatatcgaggacgaaaaatgcaatcccacggaccactggatcacatgacgcaacaactgtgcgggcgagcaccgtttgctgtacgcattcgctgttttcttttcctcttttcgaaagtgacccaacatgccgccggccagccagccagccatccagccatggtggaaaccgtcatttttctgttattctgtataggcagaagcagctgtctccacgggcaacagcaggagcagg

SEQ ID NO: 1011 - DNA, 546 bp, Oryza sativa
ttattttctaaattttgaaaaaagaaaaggtgcagcatgaagaagcatcgtcaagccaatgatttgtagaataacaaagtagatgaaactaaatttttatgctaacatatagagcagatagaaggaagtacaaaccaacaccaaactgattaacctatgggacttcttgactaaatgatttgcgaatgttttgagtgctgttgaattgaataataagagcagtggattaaagttgatacttgccttgttgcccatataacccattgcacctacaccgacagttgatactctcaaattctgaatgtgcttccgcaagtctctccgaacccatattgaaagatatattcccaccatttgcttgcttactattcgcagaaagcatggccttttacttttaatcactccattgtcactgttaacttgatgggataaatcatcatttggaaaattcactgttgatttcaaagatgctggagttgctagagccttcagtgaagtgctagcccgaagacactgagccatcatatccaatggctgttcaggcca

SEQ ID NO: 1012 - DNA, 572 bp, Oryza sativa
acaatagcattcaggccagcatgtggatgcaagtactggacttcagcctgaaaccaaacacacggaggaaattatacaggactcaaaattgagattcagcatattgtacaagctagaaaagaaatggcatgtacctttgcagacttctggtagggaaaaggaatggatagaattcccttcaggcctggagtgcccagatcatgaactgtgaatgtagttatcaactggcaaaagagataattaatcagtcactgctacagaaatggcggccttaatttcatgctatgcataatcagcaaaggcatggtaataaaaaagttatggaagagagagaagagaagaagaaaagaacgtgcttttgagtctgaagttgctttcacatccacggacacattgttgttcttcacctggctctggatttcagagaagatggactcatttttcttcgtgccagcaacagtgattgcctagaaaaagcagggaaaaaacatacctcattataatcttgggaaagtttcatatgcaatgctacagatactaagtttagccaaaggagattgacaacaaaacgt

SEQ ID NO: 1013 - DNA, 735 bp, Oryza sativa
ggcctttatgccgccgttgttgggcgtctacgttttcaccgaccggcttgccttcgccgccaccgactggtgtatccgcctgcacggctggcctttatgccgccgttgttgggcgtctacgtcttcaccgaccggcttgccttcgccgccgccgactggtgtttccgcctgcacggctggcctttatgccgccgttgttgggcgtctacgtcttcaccgaccggcttgccttcgccgccgccgactggtgtctccgcctgcacggctggcctttatgccgccgttgttgggcgtctacgtcttcaccgaccggcttgcctccccccctccgactggtgtctccgcctgcacggctggcctttatgccgccgttgttgggcgtctacgtcttcaccgaccggctgcctcgaccgccgccgactggtgtttccgcctgcacggctggcttattatgctgccgttgttgggcgtctacgtcttcaccgaccggccgccgcatccgccgctgactggtgtcaccgcctgcacggctggcctgttataacgccaactgatgctatcttcttcacggctggctacatcgctgtcactactaataggcatcagtatcttcaacacaagctgcctacgtttgccatggctgccgactagtttcttcacttccatggctgcatgattctgccagtgttgattggcctattatgccgctgttgttgggcatctacatcttcatcg

SEQ ID NO: 1014 - DNA, 565 bp, Oryza sativa
ccgccggcctgcctccgtcgccgccgagtggtgcctccgcctacacggctggcctattatgccgccgctgttgggcgtctacgacttcaccgccggcttgcctccgtcgccgccgagtggtgcctccgcctacacggctggcctattatgccgccgctgttgggcgtctacgacttcaccgccggcctgcctccgtcgccgccgagtggtgcctccgcctacacggctggcctattatgccgccgctgttgggcgtctacgacttcaccgccggcctgcctccgtcgccgccgactggtgcctccgcctacacggctggcctattatgccgccgctgttgggcgtctacgacttcaccgccggcctgcctccgtcgccgccgactggtgccctcgcctatatggttggttggtcacaccaccgttcatgggcgtccacgtctttaccgaccggctggccttcgtcgccgccgactggtgcctccgcctgcacggctggcctattatgccgccgctgttgggcgtctacgacttcaccgccggcctgcctccgtcgccgccgagtg

SEQ ID NO: 1015 - DNA, 661 bp, Oryza sativa
ttcctgcagccctgaacaatgaaaaaatgtacacatcaatttcttccccaggttttgcaggtgtgccgctgtcattaacaacatgacgaatgagattagtgttgtaggtctgagcattgtcaggtgttgctccggtctccttagctgcccctttgtttggccaccctgtctcggtgaccatgatcttcagagtcttaaagttcagagccatcagtgcaaagaaaatggaatcgatctgcgcatcgaacatgtttgtgtaaaccagtccggtgttggggtcaatcacatcctgagactgcggcgagaacagcgcgtagttcagcgagacattgcttggtgagttctggtacgcatagtaggggtacaaatccaccatgaacggtgcctggttctccacgaggaactccagcatcggcttcaggaagtaggcgtagctgctgttgaacgcccccgcggacggcggaaacgaccgggacagtatcccgagcgagtgcgtgctcgagatggtgatcttcttgtgcaggccggccttcttgagggcagtatgcacattgcgcatggcaggcacgacgagggcggacacgttgacggggctctcggtgacctcggcgccgacggtgatgtaggtgatcatggtggccgggtagtaggggaggatgct

SEQ ID NO: 1016 - DNA, 717 bp, Oryza sativa
tttcagttgcataaattttgtaggctgcaagagatacagaagctctcaaggtagagaaagggaaacttgaggagcatatagaagaattatcaagccgtttgtgtttggaaaagaaactgagggtaaatactgctccttgaattatgacttatttagagaagaagatttacttcatccatcccaaattaagttaatctactacgggatatgacatatccttgtactatgaatctggacaagtgtctatctagattcgtagtacaaggatatgtgacatcccatattagattaacttaatatgggacggaggaagtagtaggtcatattgttgggtgacattatgacacatatctttttcagagtgacttagagaatagcaaagcaacggaaatttccaaattacagaccactcttcatgagatggagcgtagagtagaagaagccagagcaacacaagaaagagaatcagccaaaaaggttgtggaagaagctctagttctagaaagagagaagatagctttattgactaaagaagttgaggagctgaaggtactttttcctcaatctgagcttattgaatatcctttccatatgtttcttaagaaataaatctctgatatagaagtaacttattcagataaggcatgatatttgatggttatagataaatgtgacttcgacaggtactactgctaaaagaacaagaagaaaaaaatg

SEQ ID NO: 1017 - DNA, 647 bp, Oryza sativa
ttatactcccagggtacatgatcaccctctgatataacaagtccagagaagtcctcatttgcccaatcagtggccattacatcaccttcctcatcggatgatgcgtcgtcgtccacttcctcattatccgaatcttccctctccatttcatcaacaattataccgactctctccccctcatccgccatgcccatagcctgctcctcccttggttgattttcctcattttgcatcgatggtccaacaacatcccctgcattgataggaccctctacatcttcggtttgcattgaaacatttatatctttctcttgtaccgacacaaatataacgaggggccatgaccgttcaaaagccatttccacataccgtctccaagcatcagtgctgtccatcggcattagttcccaaaaataaccttctgttgcacgactcactacaactgacactgacattgtgtagacttcttggtctattctaaatcctctcaacaaccaactataaattgactgaaatgttctctccgcaggcctatcgatgcccttagatgtcattacaaaatctgacagatcaacaccatctggaccaaatctaatatttccttcaccgtgaactatctgaaatgtgaccttacttgacattgtgcc

SEQ ID NO: 1018 - DNA, 2280 bp, Oryza sativa
tttagaagtaagttagggatcattaatatttttcagtccttcacattgttaagaacaatatatctgtccttccaaatggaagtgaaggcttttaaaagtgatgtgttacttttgcctggactaatccttcatacttaattgtgctttgatgtagtctaatccagtccttgaagcttttggcaatgcaaagactgttcggaacaataattcaaggtgtttgttttacactctcagttggaatcttggaagataattaattcacaatttattaagtacagcatattactattcctaagcaagaaacaaagctgcttatcctacgtccccccccccccctctctcacggagaaaaaaaaacctgtggaaccaaaaatccattttgttcttctttttttttgcattaataatatttgctcacacatgtacttactattttttataacatggtcaagccggtttggcaaatttgttgaaatccagtttgacaagagtgggaagatatctggtgctgccattagaacatacttacttgaaagatcacgtgtttgtcaaatcaatagtccagagagaaactaccattgcttttacttcctatgtgcagcaccatcggaggtatatttcctaactcaatgtgattaacaagctgggtctgtgttatttattattgaataaacccaaatggcaggaaattagaaagtataatctgggtgacccttcgtcgtttcactatctcaaccaatctacttgcattaaagttgatgggattagtgacaatgaggagtatcttgcaacaagaagtgctatgaatacagttggcataactgagcaggagcaggtctcaagttccaacacctttcaagccactaaataacaatacaattgttattctatgtgcatatgagtaggcattctcacttatttcaagtaacacactgataatgcaggaggctatattccgagttgttgtgctgtgcttcaccttgggaacatcaattttgtgaaagggagagaggtagattcatctgtaataaaggatgagaaagctaggttccatcttaatgcagctgcagagcttttgatgtacgtctaatgcccacctgttctatagtaatcttcaaaatttctgtttcaaatttcactgtttatactgtattactcctcattgtggagttcttactgcaggtgtgatcatgggaagttagagaatgcactgataaagaggaaaataaatacaccagaaggagtgattaccacaacagttgaccctaattctgccacagttagcagagatggcttagccaaacaaatatattctcgactatttgactggtaatctttataactctgtgatttgttcctccctgaattgtaagtgtatgagactgtaatgtgtgcaggcttgtaagcagactaaacgcatcaataggacaagatgagaactctcaatatttgatcggcgtgcttgatatctatggttttgaaagtttcaagactaataggtaattttttaactaaatgctgattcagtttaccattgaagatcatttatggaagtcatatgtttattcatgactgaaacagctttgaacaattatgcatcaatttcaccaacgaaaaactccagcagcattttaaccaggtacattagtaaaacatgtttggatgttcatgatattagactctttttgctttttagataaagactctcttttcttagtgtttggtaaaatgagagcttctattggcagaatgtcttcaaaatggagcaggaagagtataaccgtgagcagatcgattggagttacatagaatttgttgacaaccaagacgtgttggacttgattgaaaaggtatgtagcatttgttttatataatgtgcttagccttgtacttccccaaccttctggtggtcattgtcatttgtcagcaagacagataaatcattttaagaaaaacacatgaagttacttgttgctaacctgtcagtactctggtactggttcacatataggtatctgttctgttgtttgtgaatataatactggtataaacctgtgcttttctcccagatgtcactttacggatcaaatagagtacaatatactcctcccgtcccaaaatatagcaacttctagtgtttgaaatttgtcccaaaatagagcaacttccccacctacttcctcatctcaaccatccctcatttaatttcatctgtcttcttaatctccgtaaaaactccaaagtgcttatattttgggatggagggagtagtatgctttt

SEQ ID NO: 1019 - DNA, 687 bp, Oryza sativa
cctagtagccactagcagggattcaggaacatatatagttgcccatccctattttgtttttcaacaacttttgaaccacaaaatgttcaaatactaacaaaaaatagtattaatacatgaaaatggctagtgattagagttgatcactcacagtaaggactgggccaatggtcaagtcttcaagcttccttctttcagaaagacttttcattttatcaagaagcccactagacgaccaattctgcaagttaagaaaattaaacaacagattaagatatgaaaagtaacacaagctcaactagcttccaaagctcaaataaaaaagaaagacaaattgtattttccttttctcaggagcactggacctattgtcttgaaatcagtaggatcgatattataagacagtcggtcttaaacctagtgttgatcattggataagttactactgtagtcataaataaccttgtccataagtaaatggctcaaaccatcaagataaaaaagaagcatgtaacataagttatatgtcaagagtcatgatcacagtcaaagactcaagcaaagaaggaacataatactaatcttcactattaccttgtgcatgaatagaatagactgagcagagcacttctgaccactgcaagcataagcatcctggtcgcaaacccatgcaatgtaatcaacctg

SEQ ID NO: 1020 - DNA, 805 bp, Oryza sativa
gaacgtgcttttgagtctgaagttgctttcacatccacggacacattgttgttcttcacctggctctggatttcagagaagatggactcatttttcttcgtgccagcaacagtgattgcctagaaaaagcagggaaaaaacatacctcattataatcttgggaaagtttcatatgcaatgctacagatactaagtttagccaaaggagattgacaacaaaacgtcataacagagatacaggtaaagattatatagacattatgctacgcagttgcagcatgacagagcaattgaaaacactattttcagcatcaccagtacatgataaaggtaagcaccatactaaacctcagtgatctgtcatcgaaagtaccaagtccataaggtcaccaacacatgaccatgagaacagactgaatatacactatacaggagggaaataatgtactaacatgatatatgtaaacaaatgtaaacaacatattaacatgatatatggcacatataggcacctccatactgaggtcacagatgagatacattctgaaaaaacatctaacaacttcatcaacagttccatagtcaagaaagagaaatttaaacacatcctaaattgtcctaaactgcgactgcatattactagcctacatgtagctcaaattcatggcaatagtaaccaataagggaacaaacactgagtccatatgagtagacacagaggactagaaacaaatactccatggatgtagtaattctgtagcaacggtgaaagataagtgactttaaacaaaactaagccatataa

SEQ ID NO: 1021 - DNA, 605 bp, Oryza sativa
cgctgcgcttcttctataccaatgccttcttcattggaaatcgtttgaaacagcaaaaacaagtgtctttgacagtatcctacaagagataaactcagcaatagaggtttgtggctcatttctttgaatatttaaaccttcttgttctgtagctgtactctagtagcacatatcctgcaccttgtaacatgatacgagacatctttatgcagccacctggaatccagaatcattacattgttataatattaactgacattcctcttacttcaaggctcaacatgatacgagaagcctggcctattggttatccaacctgtcaacattgtcagttctcctgcaactctcatttaaaaccaccagggcagcaatctcaaccccacatagacggagattttcctacgagaggatttttcaagctagtcaaacttcaaatagcggacttgcttatttcagtgctcaaccggtggatgggcctagtggattgcaacaaattgatgcaaaatatccagctttgctcttcaagcagcagcttgtggatctgattgagaaggtgtatggaatgataagtgacaaggtgaagaaggagcttaacccgttacttg

SEQ ID NO: 1022 - DNA, 509 bp, Oryza sativa
accacgaaatagttgcttaagtcgtttcaaggttatagagcatgaagaaacaaattcaaacctgttcactgaatcctcaagcaaattgattttcctgtctgaatcctcaaaactttttgttaactctcggtttctactttcagcttcaactagtgcttttgttgtcgaatcatgactttgctttgtctttagcagcaaagactcccttgctgtcgcatgtttctcaagtctaaatttattgaacaaaagtaaataagttagctcataatgctgagaagatagcagtggcgctctaagttacagaacacatatactgcactgtttgaatgaagtagcgcaagaacctttgtgcattctccagaagcttatttattcttttctccgcttcatcaactttctgaagcaattcccagtttctttcctgagatttagaaagtgattgctttgtttcatcgtgctcttgcctttcagctaaatacagggcgtcccttgtggttacattttcttca

SEQ ID NO: 1023 - DNA, 537 bp, Oryza sativa
tgtgatggcattttgcatacatgtttactagggatgcactgatgaaatcaacaagtagcccaagtttaagagctaaagagtgaatctgctttcccttgacatgtcttcaagtcctgtacaggcatttattagattagcaacacagtgctgatctaatggttctccagagtttcttaactctaaaaaataaccaaatgctctttcatattgtaggttcttgacacagcctgccatgactgcagtccatgatatgacatctcgggattgcatagttttaaagattgattccgcgtgaatcaacgatccaatttcagagtatatcgatataagagaattgcaaacattagtataagataaatccccagttctgaaagtataagcatgcatctgttgaacttcctctttggtctgacagatatttatcacagtaaccaaatccccttcccttaaattgagacccgaataaagaagaacctctgcgagtttcacagcttcaccctgacaaccatttgagtgataacctgagattgccaaaga

SEQ ID NO: 1024 - DNA, 542 bp, Oryza sativa
cccgggcgggttcgagtatctgtatgtcgctatcgacaagttcactaagtggcccgaggcttatccggtcatcaagatcgataagcactccgcgcttaaattcatcaggggcatcactgctcggtttggggtgcctaaccgtatcattacggataacggcacccagttcactagtgagctcttcggtggctactgcgaagacatgggcatcaagctctgcttcgcctcacccgcccatcccagaagcaacggccaagtggagcgcgccaacgcggaaatccttaagggcctcaaaaccaagaccttcaacatcctcaagaagcacggcgactcgtggatcgaggagttgccagtggtgctctgggcaaaccgaaccacgccaagccgagcaactggggaaacgcctttcttcctcatctacggcgcggaggcggttctcccatctgagctcaccctgaggtcccctcgggtcaccatgtattgcgaggctgatcaagatcagcttcgcagagatgacctcgactatttggaagagcgaaggc

SEQ ID NO: 1025 - DNA, 3978 bp, Oryza sativa
ctattatgccgccgctgttgggcgtctacgacttcaccgccggcctgcctccgtcgccgccgagtggtgcctccgcctacacggctggcctattatgccgccgctgttgggcgtctacgacttcaccgccggcctgcctccgtcgccgccgagtggtgcctccgcctacacggctggcctattatgccgccgctgttgggcgtctatgacttcactgccggcctacctccgtcgccgccgactggtgtcctcgcctatacggttggttggtcacaccaccgttcatgggcgtccacgtcttcaccaccggcctgcctccgtcgccgccgagtggtgcctccgcctacacggctggcctatcatgccgccgctgttgggcgtctacgacttcaccgccggcctgcctccgtcgccgccgattggtgcctccgcctacacggctggcctattatgccgccgctgttgggcgtctacgacttcaccgccggcctgcctccgtcgccgccgggtggtgcctccgcctacacggctggcctattatgccgccgctgttgggcgtctacgacttcaccgccggcttgccttcgccgccgccgactggtgtttttgcctatacggttggcggacttcgccgctgttaatgggcttcatcatctacaccactggcttggttccactggcgccgactggtgtttttgtcaccattgatggactgctttattcccacatcggctacttctgctgtcatcgagggaacacgacaaagctaagtcatcatttattttattctttatatgatattttgtcttttcctttgcctcactacatcaactggttcgccgttgactagtgagtcgggggctattgatgttatatcatattttttaaacaatttttataatatttatcttgattgcttgcgacataatctgagtacaaaagtacctatcgagttatggagttctatcttcctatgctttccgtttggtttgccaatggatggttgcctttgggccgattcctagcacccgggggctcgttggatggaccgagtaacgcaaggtgctaagtattattcggaataaatcaaaagcatagagataagataaatttattttctgctcttaataattgcaaaagtacctaagtagtaaattctgatccgtgaaactttgttccattaatgacgaactcatgtcactcatatgcatgtttgggaaatgcctaggccgactcccgatgcttggggactatgactagtcgggcagagtgtttaaacgtacagaatcatctgctcggggaaatcaaaattgacaagaggagaaatacatatttataaatattttaaaatacttgattttttctcgagtattatatttatatcagatactactcatcctatatgtttgttctgcaggatccagatccagatatgcataaaatggattcatggctttaagcttatctcttacgctccaggaatggatcagtcagaacatcaccgccggcctgcctccgtcgccgccgagtggtgcctccgcctacacggctggcctattatgccgccgctgttgggcgtctacgacttcaccgccggcttgcctccgtcgccgccgagtggtgcctccgcctacacggctggcctattatgcgccgctgttgggcgtctacgacttcaccgccggcctgcctccgtcgccgccgagtggtgcctccgcctacacggctggcctattatgccgccgctgttgggcgttacgacttcaccgccggcctgcctccgtcgccgccgactggtgcctccgcctacacggctggcctattatgccgccgctgttgggcgtctacgacttcaccgaccggccgccgcatccgccgctgactggtgtcaccgcctgcacggctggcctgttataacgccaactgatgctatcttcttcacggctggctacatcgctgtcactactaataggcatcagtatcttcaacacaagctgcctacgtttgccatggctgccgactagtttcttcacttccatggctgcatgattctgccagtgttgattggcctattatgccgctgttgttgggcatctacatcttcatcgccggtcgtctcgtctgctgctgactagtgcccttacctctacgtctggtttatacagctaccactactgatggacatcatcgtctttcgtcgccgactggttatgctgtcgccgactagtgcttttattttcacaactgcgcgtcttcgctaccagcttgcttctgttgccgccgactcgtgttcacttcatcacggcgatgcaactttgtcatcatggtggagcgacttcatctttattatcttcgtcactggcaaactctattgctgctacttcgcaagttttgcttcttcaccaaccacgacgtctttgtgaacctcgacatctcggcatgcgatgccgtgttattttactacaacaagtggctctccaatattcaagatttctacttggacatcttcaacacatatcttcaatcaagcaatgactattcgatgacaagaagctacagttctcgactctatgtttagttgtttcccaactaatcaaagagtcgggggctacacaaatacaaggctcaaaatttgacaaattttatgtcaagctgaagaaatcaattcatcaacccacgagtcaactccaggagtcattatcttcatctttgcttcggagcagacattctacttcaacaacttcaaatatttcgcacctctgcttcatcgaccctgacatctctgctgttgctaatggatgattatgttttcgccgacttattatttcaccttcacggttgacctactatgcaaatgctgatgagcgtctttgtcattatcattggttgctacactgctattggctggatcaccgacatcgtcatcttcatcatgtcggttgcgtttgtcgtcgtcaagtattttcttcatcttcatgattggtggatttcgtcatcgtctttgatgcgtgtctacatcttcaccgtcggcttgctttcatcaccaccgactgattatttcgtcgccgccgactgctctgtcgttgttgttgggggccttcatcttcattgctagctgacctgattgctgccgactggtttcttcgcctctgcggctgtgcaacttcatcacttttgattggaatcactatcttccctaccaccaatatttttgccacctctggtgggcaatattctctctatattggttgtcttgtctatatgctaactgcgtcagctaccatcaatgaacaattgtgactacgtgctcaggggcttactagctcaaatacaagtattatatcttcaatttggacttgctccggatacatgcaacatgaattcatgatcatgggtctattttatatgctcaaagactggactatttattattccccgtaagggctatcaaccgaatacttgcgccagtcgggattcaattattatatttattttggagtatcccataagggataatcattcagatcagaagctattcatatgagctacacttggtctatattacccggaagatttattactcgggagcatgttacatgcgtcatcctttaaagggtgtcgaaggcatattttttggcctaggcctaatatgtctgcagcccatattttcaggtgtggcctgtcacgttcttttagggacttaggcactttttgcttaggccaaagtgcgcgtgatcaagtgcccaataccttaaaatccttttataccgcagttacttaactttttaggagttggtacaatgcatcttaaaaggtgtcaaacagtaaagctgtcacatcctgattttcgtttcaagatttataaattatttaataaattattaatagaatttatattaaatgttctttaagttacaagtgaagttaaatgtgggaaaataaatttcttaaatctaaaacatggatggatttaatttt

SEQ ID NO: 1026 - DNA, 762 bp, Oryza sativa
tcctgcacccccccgctgcctcgacccggcctgcgtcggcttctcccagtgcctcctcaacttcaagggcttcctcgccatccaggcgcaccgcgtgtcgcacgtcctctgggcgcagcagcgacgcccccttgccctcgccctccagtcccgcgtcgccgacgtcttcgccgtcgacatccaccccgcggccgtcgtcggcaagggcatcctcctcgaccacgccaccggcgtcgtcatcggcgagaccgccgtcgtcggcgacaacgtctccatcctccaccacgttacactgggtggcacaggcaaggctgtcggtgaccggcaccccaagattggggatggtgttctgattggcgccggggcgacgattcttggcaacgtcaagattggagccggggccaagattggtgccgggtcagtggtgctgatagatgtgccggcgaggaacacggcggtggggaatccagccaggttgattggcaggaagaacggtgaggttgagaaggatgaggacatgcccggggaatccatggatcacacatccttcattcgacagtggtcggactacaccatttgagggcgacgcgccgaggtctatttctcttcctctctgtataatccgtagtgttgatatgccaaaaactgatgtacttgtcgtgctttgggtaatctgtactgtagtgttgtatcatcagccgttttatcagtcgaatgcccatgctcatgtactgataactggtgattgatgaaatgatgagt

SEQ ID NO: 1027 - DNA, 902 bp, Oryza sativa
ccagcacgtaaaggacgacgcggcgaactcaccggtgaccaaaacggcggcggaagaccaacggacggcggcggcgacgaggaggaagcggcgaagctcttcgggtcgacgacggcgacggcgctccgacggtcttcggcggcggcgaagcggtggacggggacggcgatgacttggcgaacccgatggtggcgacggcgaccgacgacggcgactgcaacggcggcgcggcgcggctgaaccgacgacaatgacggcggcgactagggctacgcggaggcggcgctagacgcgacggcaggctaaggcaaaggaggcgacgggtagaggggagctcgggggtccttatataggtgcaaggaggcggcggcaaaggcccacggcggccggcgactagaaggaaagctcgcggcttgaaggaaagaggccgatccgaatcgaactctattccacgaacttccaaaacgatttagccgatgtttccaaaggagaaaaggtagaggagatcccggagattgtttcccctcaatcaattcggccggagaaggaaaggagcggccggatttggaaggaaacggcgacggcggcgcgctagggtttcgggcggcagcggcggctcgaggaagacgaacctgacaggtggggcccacctgtcagcggctgagagagagaggagagcggcggctcggcggactgggccggctgggccgagggaaagagagagaagggttttgggccggctttcggcccaaagccaaaagaagactttttaaaacctttttcaattaaattatttcttaaatgcaattccatttattaaaaatacttccttagctcaaataaatcccagaaaaatctaggaattatagaattaagcaaagtatttaatgaaattttatctg

SEQ ID NO: 1028 - DNA, 557 bp, Oryza sativa
accctgtatgtacttgcctagttacttatttctgaatattcacattgtctttggtgatactctcctgttatattcactggttatgttaattgctcaggtatgtggctgttggcaatgagccttttctaaagagctacaatggcagcctaatcaatgtaacctttcctgcgctcaagaacatgcaaagagctctagacaaacttggtttaggtgatcatgtaaaggcagttgtcccactcaatgctgatgtctacaactcccctgagaataaaccagtgccatcagctgggagcttccgcaaggatatcaatgccctcatggttgacattgtcaatttcctcaatatgaataatgcaccctttgttgttaacatctacccatttctcagcctataccagaatccaaacttcccactcaatttttccttctttgatggtggtagcaagccagtttatgacaaaggtgtggtctacaccaatgtgtttgatgccaactttgacacccttgtttggtcactaaggaaggctggtgtgcctgacatgaaaatcattgttggt

SEQ ID NO: 1029 - DNA, 677 bp, Oryza sativa
ggggaggcaagccggtcggtgaagacgtagacgcccaacaacggcggcataaaggccagccgtgcaggcggagacaccagtcggcggcggcgaaggcaagccggtcggtgaagacgtagacgcccaacaacggcggcataaaggccagccgtgcaggcggaaacaccagtcggcggcggcgaaggcaagccggtcggtgaagacgtagacgcccaacaacggcggcataaaggccagccgtgcaggcggatacaccagtcggtggcggcgaaggcaagccggtcggtgaaaacgtagacgcccaacaacggcggcataaaggccagccgtgcaggcggaaacaccagtcggcggcggcgaaggcaagccggtcggtgaagacgtagacgcccaacaacggcggcataaaggccagccgtgcaggcggatacaccagtcggcggcggcgaaggcaagccggtcggtgaagacgtagacgcccaacaacggcggcataaaggccagccgtgcaggcggaaacaccagtcggcggcggcgaaggcaggccggcggtgaagacgtggacgcccatgaacggtggtgtgaccaaccaaccatataggcgagggcaccagtcggcggcgacggaggcaagccggcggtgaagtcgtaaacgcccaacagcggcggcataatag

SEQ ID NO: 1030 - DNA, 7465 bp, Oryza sativa
cttcaggatcccgtgtatccctgcagcagcaaggtgagcggcgcgtttcgcaacgatgtcgcagacatccaccacaagccttcttgttttaagggaggtgttttggacctgcaattttgtattgatatgcttcggtgaatcgattggaaaaaagatatgcctgagaaactttgacaaaaggttaaggtgagtacccccaggatatctttcagtttcgctccaactgttctgagatcaggtgatctgtcgcagtgcatcattgacatgtatggagtcctggagatgaaagccttaatctgtttagttaaagataatctttcgggggaggacaatgatgatggggactgcaggcattctttggttcaacttcttcaaagaatggagtgaacaacacaatacccaggctctagattgtaaaaggaatgaaattcatatataaattattaaaatttgaattcgtctaccagcttattcaaagatcaatatacatcactaccactaccactgctctgtataggatgccatggttacggttttgtgtggctaccttttacaaggtaaacacaggctacacagcaatcaagcaatatgatatttttctcttatgtatgtgcatgttcggctgtgatttttgaagcaacgcatattcatgatggaagattagaagctggcaaatgaacccaaaactaagattacctgataataaatggaatcttgagttttggtggtacttcatcaccaaaaagagaagcttcttcagccatctttaataggactctacgaacaatttctcccaaatacatgccagagatcaacttttcgtaaacctacaaaataatgaatgaaatgcttcgtcctagttggcaatgaaatacgagatggatctttttatgttacctgttcaccaggattcaaactttcagcatctaatgcttgatcaaattcagtcaaaggaagatgggatgacctgaagttcccccattccatatttattacctgtgacagcacaaacgctgatgagaaccctgaaaaccatctaaagcttatggatgaactaaacatgcacaagtgactcatgctaacagtacagacaatgtttctctccttttgcagcgtcatttgtatatcatgtcttagtaacccgaatcacatgaccccagatattataaacagatttcatgatttttcgcaacatatctattatctaatgagtaatgcctcatcaccaataagctaggtagaagcaaaagcactcaccatatctcctgacttcggcaggaggtcatgccatttaggaattgcattggcacgttccacgtatgctgcattagtacctgttcccagtataacagcagcaatgacatcattatcatcatatctcccaccagccaatgtccctatagtatcatttatctgcataagaaaaggagttgtgtttggatttcaggttacaagcatatcttcatacacagggtatttaacaaagttctatcataatttgtcaaatcaaaagaagctcaccaatgctgtgactttcatatcaagcccctggcgttcaagagccttggttaattcagtcacaacatcttcaccaacctgactttacagcaataagcaaataattcttacatcccagaggaatatgtaacaatcatgagcgagaaggttttccagtaaagaattaaatagtttccaatgggaaaaggaaactcttgtctatcctttgtaagagtatattgctacctatatgcatatacttgttaagatcataataataagatctaaccgtttcatcaatcgaaaaacccttagtccaattaataagagtgccagatgcaattgaagtttgctttactgggaaagagaacgtaaagccaagttctctctgcctcccctcagcaagatgaaagtcttcaccctctgaagcaacaaattttgctaaagaagaagcaataaaatcaaatagttcctgaaacaaaaaatatatgacaacagtcatacttagcatttaattgaatacggaatgaatgaaccagataggatacatggagcaattcttacatttgaaccaccagtcatcagatgcggaggaattgaaatctcgtcatgttcttgcttgataactctcccttccttgccacctaattgaacccgtaaaacacggaaatttgtacctccaaggtcaagcgcataaaacacccccttctcttccctgcaaatgcagcctttgacatatcagaagtcaatccaaagtacaactaagagcaatagttcaataatttgatcgagggtgcgcctcggcaataagtttgaactgcctgtggtacacgttagaacaatagaccccttcttttattcagtcttcggacaattactatgacaccctttctgtaatctaaaatatctatagataccagaattatttctgatgtatatgtgaagtgatacagtaattgcaaggttatagtaaccacatcagatgcaacctaaaagtgcatagaagttggctttacaccaacagacttaggagagactcatgatattcaataaggttggtttcttatctaatgccataacagctgaattcacattttgttcatttttatctaaagagaagtaatatatacacaagaaagaaacgtactttcctgagtagtaatcagtagcaaattagcaaagacatatatgacttggtttgtcaagttcacatctttcagaccaaatcaacattactgcgagtttccgacatcaaaattatcaacaagaccatgtccattacacaaaatcagacgcccgccactgcaaccaacctagcagcatcacattaccgtgacatcaatgcgcaaccattcaacgttttgcaggcgctgctagaccgcaacaccgttcaccgcaatcaaattaaaagaaaacattaaccacctaacgtttcaactttgaagcagatctgtgggacttcacactgttccctcgcagcagccattatccaaacgaatcaggcgaagaaaccaactcttcagactacgcctccccatacaacacaatgatacatgcaaatcgcgcgagaagggggcgagccattttacccggaagggagggcgtcgacgtagctgatgatcatcttgagtttgctcccgccctcggaggcgagcccggcgtgcatctcgacggccatcgcgtccgccacctgccgcagccgccccggcggcgccgcgcaccgctcctccagctcccgcagcaccgcgtcggcccggccccaccgcttcgcctcccgcagctgccggcgcaccagcagcgccacgccgaccgccgccgctgccgcgaccgccgccgccgccgccttcctcatcgcggtcgcccagcctctcctcggcgagatggggcccttacgtacatatgtgggcctcagccaccatcccgtaaaggccgcgcggcgctgcagtgccgttccagcccagcccaactaaaagacgtcatgtggctagagttggaaaaggtccactctacatccctcagctgtggattaattttcaacccaaaactacacgaaatgagcccagagagtccccaacttgtaaaaccactacaaatcgagtccttaacagtatagagggcggtttttgactaacattgcgcctacataacttgttgatttggccttctttcacatatgttgcgcttacattatgttctagtctgcaaaaaatgagaaaataattcaaatgaaaacgtggtgtttgaatctcctgaagatgaagataaaaatttaagtgtttcacgtaaaacgaggtggtaataatatgtgattaattgagttttaattattacaaacttgaaaaatggattaatcttatattttagaacaactttcatatagaaattttcgcacgaaacgcactgtttagcagtttgaaaaacataccacgagtatccaaaagttaatccaacctttgttggagaaaaaaacaggccctcaatgggctccacatctcagtgacaatcttcatccccttacctgcctgagttgagcttgagctcaaccatccatgtgggctagtcccctccctccatctgcctcccgttccatgttcctgcccgccgcgggtgcctctccgtctagctctaaatcggctgtgggaaaagaggaagggaaattggtctgaaggggacccccacaactgatatgtaggtcctatcgagtttattattatttttattttttttccttacaatgatatgtaagcactacatgggacaaagataagtcaacacatcacgtatgaggaaaccaccattaaaattgtcgagagacttgatttatactgattttgattctcgaacgatactatatatatttatatatttggttttatggttaaggatacaaatgaaacttgtcgaaacatggattcggcaataataaaagggggtagcgcacgagacctaaaagtggatggatgcggagacaaaggatttagacaggttcaggccctctcaatgagaggtaataccctactcctgtttggggatttgaatccgccgggtgtgtattgatttgatgatcaggttgtctcctgcccctagagggggctccctgccctccttatataggttggggggcagggttacaagatagaaaccttaaccaatacggtatcggtttcctaaatctactttacaatcttatcaaaccaggactttaggccgttccataatatacagggaaacgtaatacccaagtcatgatctgttacatatttcatatatataagttatcccctataactagtcggataaccatgccgtgtgggtatggggtacccataatctccacagtagcccctgagaccttcacagtcggaaagataaccttctctcgaactagattactccaaagccgagtgcttcaatcatcttcgccatggtctcccgagtacttttaccaaatctgaagactgtggagggctgaaaaatatagtcaggtgcatcgactagatgcacctaataggtgtaaacccccgactatgtggttaatcgaacaaaccaaacatatagtcaaggaataaataatccaaccaaccgagtggttttgataattatagtcaaccaagtgacttgatatcaatatatagcatatgcggtgtgaatcctccaaataacatgatccgagtgatataccaattgctttgtaaaatatgatgagtgatatagcaaaatagctataaagaagcttgtatattgtgaataaaaaaatttccacagtattgggcatacgccatgcgcacactgctttaacagatgtgcttaagtccctagaagacacatggtttcaccacacctggaaatatatggcatatgtggtgtaaaatccgagtaaataaactcataaaggatttaccaaccgcctagacaatgaccacaatatataatcagcctaagccataatattggtcaataaaaatgcacacttacgtggcgaaaagcaatgatattgtatccaatcaattgcttaaaaacccaaacagcaccttgacttatataaaaaagtcagcgggacagctatataaagcttttgtcacgcccggaaattcaccagtaatttccgaacttatttgtgcataaaatcctcgtccaggaatcagccgaggtacacaaactgacaatttaatatacagattcatcaataactaaagcgaataaatacttacttaagaggcacttagtcctcaacatgaagaaaactgcagcggaaaaataaaatctagcgaagctccggctccactcccacaggcagctcaactggggtataagccaaacgtcttctccttctggatcctttttcttcaactgaggttgattgattattgcaaggtgagcatatatcatattcatcaaccacgacatcaaataagcaagtgcccaagtataccaaaggatggcgtaatattggctcatttgcaaaaacagcatttagcaaaacatttaagagaagtaaaatagtggagtaattaatcaggaattttaatcaacactgaacagcacacccatgctgcacaggcccaaccatcctgaacaaccatacccggctgtacagatctaatctccaaaccaggagctaagcaaattattaccaggtataacatccataactattgtgagaggtgtgagactaatcacgaaaaacattgctcaactcgcccataaccgcgggcacggctattcgaatagttttactctggccagaggtgtaccactgtacccacaagacacagcctcaacatcatgtctaccatgcgtcgcgatactggaaagtacccgaatagaggctgtgacaataccctctgcataacacaactcaccacagtgcaccattcctggatcataatcacccccttataaaacaaggcatggactccccagcgacccccgtgggcttatctccgccacttctcagtctggtgctccgcaatgaatcatgttatacaaaaggtaaagccgttgcccacgctggcttgtggttggcacggttaatgtttcacaacagtagctcgcgaaccggtccttaattgtcatgagcacgactctcaaaaccatgtgctcacaacccaccattatcaagttttagttggcaagtaattaattaaccaatcacgattgaccatcgtgagctaccattaaatataaccataagtgatagtgaaacattagttatcccaattgtgtgctaatgtttctaagcatggctaagcaattatatctaatatctagttgaaccaatatatataaagctcaactagtccaattataataacccaaggtatcaaggaatagaataatcaatgcaaacaggccataacaaaggaataggttcacaccacccagtgacattcgaaaataaatgcacagttgaaataaatagagaatttaaatataggatcaatatgctcaaaggattgtgtttaggatctgtgtgacttgccttgcaataatcggtcttcaattaatcttcttgaatacttccggcgcactcgcgaacctttgcaacgacggaaacgacaagctatcacgcaaaacgaggaaaaagactaataaaaaccaaataaacaatacataaaaagtaaacaaacatgtagatcataattttagatgaattatgagacttgaacggcctcattctgacttcaaatgaatttattataaattttacaagattaaatctaattaaagcccatttaaaaagaattaaataaatttattcaatttatggacaattttaatatgtagatctttattttacacaacttttgcaacttgaaccacattaaactgagctaagatgaattagatatgaatttttaaagattaaatcggattaaaacctttatatggattttaattgaattatgacgcaataatgaattatttttgaaaaggaaaagaaggattattgcgtcagcggctaggg

SEQ ID NO: 1031 - DNA, 10434 bp, Oryza sativa
gcttcagcgtcggcctaatcaagaatcaatactgcgaaaataaaagatgtagccatattaagcgtcgaaccgggaaaaatagcgaaacaaagaagcgcatagcgaaagcggagtctcaccgttcgtcccctcaggaggaaccagcttcagcaaaccgtcgacctcttcgtcttggtcaaccgcgacttgccacgaccgggagaggggaaaaaagcgaagcatgcagaactcctccaccaagtcgcggcagctgaggcgggagcagaccttgcgcagcaaggcgaaccgtgcctccatggcgccgtccacggtgatcttgggtttccggttcggcgcaatcgccctgcgccgacaccggagggccttcgccgactcggacctagcctcgaaggggatggtgtgatagaaccacctcgccatccagtggtgatcctacttccacatggcggcattcaccggccaaagatcggagcgctcggggcgaacgttgaagttcatgctcctgaacaccgtcttcttcgttccgaccggggtaaccatcgtcttcgaattcatggtgcaaaaaatatggcaccgaagagttcggtgctaggttcaaacccggaggtccggcacgcccagtcgaagatggcgaaggatctccgacaacaacacgttgcacggaaaccgaagccccgcctcaaaaaagacggcgaacaccaccgtccggttgtcgacgagcttcggtaccacggccttccccggggcgaaagcctgcccctcaaccaacgccccagagctgaccaacttcgccagctcgccgtcatccatgagagaaatccccaaaaaggtggtggtgtcgtcgtcaatccggccgggatcgggccctttcgccgaagcggggtttggcttgcgaggagccatggtgaagggtgtgtgcagtggcgaacaaaaagaaccgacggaagatctaaggggtcaaggggcaccatgaaaggaaagaacggcggaagaaagcgcgcgcggtgaaaatgacaagtgtggcggtgaaaagggaaaagaggggagaatatatagcccacccaggcaacggttcgcctacccaccagtaataaagcgcaacgtcgcgagggtaggcgaaatggtaaattcccatcgacttagccgcacagtaataagcccatgtagggaaagcccattactgttcctttcggcccggggaaaataaaaagtaactctaccatccgcaagaggcgaaagctacaaaacaataccaaccgaaaagacacaacacactttatttgcaggaataatataggtttcggcaggagcatcggtcgaaagggggcgccacataccataccacatggcttgcacggtctcggccgaagctcctatctcacccttgcccgtgaggggcttgttggcggtatggcatgaggcccttcgaccaaacctgccgaaaccatgcgaccagtgaggattcaagcctgagacgtcaagattagtcagggcgaagcccccatggcgaagactatggaacaaggacggcgaggggcggagaatcgcgcgggtacctcgccaagccaaaggcctcttgggcgaagaatgtgaggcgaagagtgtatgtcgaaggaagacgacttcgccatagcaagttcggcctcacgaaggccgatgaggccatcctagcatatcaagcctagcggccattgggccaacaatcgcctgacggcccattaagagcccatgtacctcaattacacagtatacccatgtaaatgtccctttcataagggcaaccatgtaaattcccctgtataacctaaaccctagtagtaagaacctgtaatgaggctataaatagtctcatagggccatgtaatggggggatcccaagaaaaattctcaattcaatacactttactttctttccaaccactgttgagtaaccacgtcttccgacgtaggcagttgtcatttcgacaacaacttatataggggaggattggattaggaaaggtggagtcgtagtgggagtaggactaggagggaggggagggagaccgactcgggcaaggggagggggaggcgcgcgcgggaaggagagggggagggcgcggctggctagggagacggggaggaaaaaggaaacaagggggctaggactttcccaaaaagaaaaaaaacaatgcggtgccgttttaggaaaggaatgaaaacggtcccgtgaactgacactgatacggttcgtcatgcaaaacgaaactgcggactgagaggggagagaattaggcacaattcacaaccaaaggcaaaggaagaaaaaatctaacttgacacttttaacttagcaacattgcctctggtgatctaatatttactctttaagtcctgttagtgattttcagagcaaagagaatttggaaaaaaagtttctacctgacaattccgattattaaatgcatggttaacaggggttttctcctggttaaccaaagcaaattcttgaagtcataaaactccgggtgtgacactgtactaccatttaaaagtttactcaatatttgctgctgacaatatgtttgatttaatttatattagctgctgccatgattgtaaatgctgctaagcatttgttgctggccagctaagggcctgattagatcccttggtaaaattttttaccctgtcacatcgaacgtttgaacatatgtattaagtattaaataaaaacaaaaaaataactaattacacagcttgtatgtaaaattgcgagacaaattttctaagcctaattagtccatgatttgacaatgtggtgctaacatttgctaatgacggattaattaggcttaataaatttgtatcatagcttatagccaaaatctataatttgttgtgttattagtctatgtttaatacttcaaattagtatccgtatattcgatgtgacgcgtcaaaacttttcacccctgcatctaaaaacagcctaactctatggtgctaggcaaaagaaaataatcacgtaggttccggggcaaggaaaatcgaacttgtgatattttccttacaagataattttaccaaacaacattgtaccacaaatttttatacctcgagatactttttagtataaatttgatatctctaatataaaatttagtgccccaatatatttagtatctggaggtaaaaagaatttttgtgtgcaaaatatggtgttgatggtaaaacacgcgactgtgtactactgtaccagctcgcttttttgccatatacacacaagttgcatataagtatacaattacaatctattatattattaagacagctcgaaaagaaggcaccacgttcactgtgggggctagaaattcccacattaatcgaagaaaaagaaaaaaaataaaaaggagagttcaagtagaagtacaatttaaaaatagctgaaattcggaattaaaaataagcaatattgaaagaagtttctatataagaacccaatacgagattaatcaaaattcgaaataaaaataaaatctattatattattaagacagctcgaaaggaaccacgttcgctgtgggggctagaaattcccacattaatcagagaaaaagaaaaaaaaagaaaaaggagagtccaagtagaagtacaatttaaaaatagctgaaattcggaattaaaaataagcaatattgaaagaagttttgtcacgcccagaaattcactagtaatttccgaacttatttgtgcataaaatcctcgtctaggaatcagccgaggtacacaaactgacaatttaatatacaaatccatcataataataacgtttcacacttacaaaagaaaagaaaacagcagcggaataacggtctagcgatggcttcagctccactcccacaggcagctcaactggagtataagccaaacgtcttctccttctggatcttttttcttcaactgaggttgattgattattgcaagaatgagcatatgacatactcaacaagccacacagcaaatatgcaagtgcacaaggataccaaaggatggcataatataggctcatttgcaaaagcagcatttagcaaaacatttaagagaagtaaaacagtggagtaattaatcagaaattttaatcaacactgaacaacacacccatgctgcacaggcccaaccatcctgaacaaccatacccggttgtacagatctaactccaaaccaggagctaaacaaattattaccagttatagcatcaataattattgtgagaggtgtgagactaatcacgaaaaacattgctcaacccgcccataaccgcgggcacggctattcgaatagttttactctggccagaggtgtaccactgtacccacaagacacagcctcaacatcatgtctaccatgcgtcgcgatactggaaagtacccgaatagaggctgtgacaataccctttgcacaacacaactcaccacagtgcaccattcctggatcataatcacccccttataaaacaaggcatggactccccagcgacccccgtgggcttatctccgccacttctcagtctggtgctccgcaatgaaccatgctgtacaaaaggtaaagccgttgcccacgctggcttgtggttggcacggttaatgtttcacaacagtagctcgcgaaccggtccttaattgccatgagcacgaccttcaaaaccatgtgctcacaacccaccattaatcatattttaattaccaattaattatcataacacgattaaccatcgtgagctaccattaaatataaccataaataataatgtagtatatatgattcatcccattagtgagctaatgtttctaagcattgctaagcaattatatctaacatctagttgaaccaatatatataaagctcaactagtcaaattataatatcccaaggtatcaaggaatagagtaatcaatgcaaacaggccataacaaaggaatagattcacaccacccagtgacattcgaaaataaatgcacagttgaaataaatagagaatttaaatataggatcaacatgctcaaaggattgtgtttaggatctgtgtgacttgccttgcaataatcggtcttcaattaatttcttgaatacttccagcgcactcacgaaccttcgcaacgacgaaaacgacaagctaacacgcaaaacaaagaaaaagactaataaaaaccaaataaatagtacatataaagtaaacaaacatgtagatcataattttagatgaattatgagacttgaacggcctcattctgacttcatatgaattaaatatgaattttacaagatttaatctaattaaagcccatttaaaaagaattaaataaatttaattctatttatggataattttaatatgtagatctttattttatacaactttagagacttgaaccaactaaacccgagctaagatgaattagttatgaatttttaaagattaaatcggattaaaacacttatatggattttaattgaattatgacgcaataaagaattatttttgaaaaggaaaagaggattattgcgtcagcggctagggtttgcggtggaccgggtgcacagcggcggtctacggaacggacggccgagatctaccctatccaaaacgaacggccgagatcgatcggtccacggccggaccacgagagacgacgacgatgacgtcagcgacgacgtcaccaccagcggcggctcgggcgcgcatgctcgccggcgaacgacggcgcggcggcgcgaacggagagcacccacaggtagcggacggcacggctacctcaccggtgaccaaaacggcggtggaagatcaacggacggcgacggcgtcgaggaagaagcggcggcgaccttcggcttgacgacgacggcggtgttccggcggtcgacagcgacggcggaggggcggacgaggacggcgacgcgacggcgaccacgatggcggccttcccgagcgacggcgacgactggagcgacggcggcgcacggctggagcggcggtgacgacggcggcgcgaggtctcacggggctagggcgctaccgacggcgagaggcgaaggcaagagtggcgacgggtagcggcgggcttgggggtccttttataggggcaaggaggcggcggcgaaggcccacggcgactggcgacgagaaggaaagattagggttcggaggagagagatcgatccgaatcgaactcgaatccacggatttccaaacgaaattagccgacgattccataagagaaaagatagagtggatcgcgaggatcatttcccctctatcgattcggccggagatggaaaggagcgacggaatttggaaggagacggcggcggcacggcgctacgtttcgggcggcgggcggccggaggttgacgacgaccctgacaggtggggcccacctgtcagcgggagagagaggagagcggcggctcggttccggcccggcttgggccgaggagagagagaaaaagagagaggttttgggccgactttcggcccaaagccaaaagagacttttaaaaacctttttcaatttaaattattcatgaaatgcaattccatttattaaaaatactttcttggctcaaataaatcccggaaaaatctaggaactaaagattcaagagaagtatttaacaaaattttatctagcccaattttatattgagatttagcaaattaaaattagatcttctcttttaggcttttaagatcatttctaataattccttttaaacaacaatttataatttaaggatttttaaacaagaaaagctcttaacaattataattagatcattaatgatcaaataattactaaactgttctttgtatcatttaggaattgagctccgaaaaatccgagaaaatttcagagagtatacttaatcatggagaatttaataaaaattagatccatccatgctttaaatttaggaaattttatttcccacatttaacttcacttgtaaattaatgaacatttaatataaattctaataataatttattaaataatttataaatcctgaaacaaaaatcaggatgtgacaagtttccacataagaacccaatacgagaataatcaaaattcaaaataaaaataaaataaaatccaaaattagaaaaggaaaggagagtgcaagtagaaatacaatttaaaaatagctgaaatttgtaattaaaaataaggaatattgaaataagtttccatataagaacccaatacgagattaataaaaaactgaaataaaaataaaataaaatccaaaattataaaagtaaatgagagttcaagtaggaatacaatttaaaaatagctaaaattcggaattaaaaataaggaatattaaaagaagagtccatataagaaccaaatacgagattaattaaaattcagaataaaaataaataaatccgaaattagcaaaagaaaataaaataagagttcaagtaggaatacaatttaaaattagctgaaatttggaattaaaaataagcaatattaaaagaagaatccatataagaacccaatacgagattaattaaaatttagaataaaaataaaataatatctaaaattagaaaaattaaaagagagttcaagtaggaatacaattttgaaacaactgaaattgaaaaaaaaaataaaaacattaaaataacacaatacgatattaactaaatttttttaaaaaaattttgaaattagaaaaagaaaattaagatttcaattaggaataaaatttagaaataactaaaatttgtgataaaaataaagattattgaaagaaaagaccatctaaaacacatgatgagataaattaagtaacatgcctataaaggagtagagtggtggtggttgatacgagatataaaaattgttaataaaacaccaaatagaatcctactgatgattaaaaggagggacttcaggcaggccatgaagcaaacgtgtaaggcggttgtcgggacttctagaaagtaaaaaaaaacaaaccccaatgataataatatttaattttaaaaatctcaatgacaataaaaaggagaagcagtgggcggggtgtataagagtatagttgcagagccgccgacggttgatgggacttctagaaaataaaaaatgaattcctacgatagttatgttcgatggttagaatcacaatgacaataaagagttggcggcggacgggctgtagaggggcatagtggcatcgacgggatttctagaaaataaaaaatgaattccaacgatagttatgtttgatttttagaatcacaatgacaataaagagttggcggcggacaggctgtagaggggcatagtggcatcgtttgatgggacttctaaaaattataaaaaattaaactgcaagtccaatttttaaaggtttggaacttctaaaaagtaaaaaaaacaaatgataatcatatttgattttaaaatctcaatgacaataaagaagggaggcagcgggcgagctgtaaaggagtacaatggcaaagccactgacggtttggcgggacttctagaaagtaaaaatgaacccaaacgataattatgttcgatttttaaaatctcaatgacaacaaagagaagagacatctagaaattacaatggcaacgtttaacgggacatctagaaattataaaaataaaatccaacgtgacaataaactctaaaaattataaaatccaatttttaaagattccgagaagaatgaatagaaatagtggtagattgagcaagcaaataaagaaggagataacataaggggtagcaactggtgtgacttttgaaaactatataattagaaacacgaggatgataaggtttggtcttagcaactggtgtgacttttgaaaactatataattagaaacacgagtatgataaggtttggtcttttaaaatcttaagacgatgagatagctagatagctatttaataaattttaagtaaaatcatactaaaaaatatatgattttgtttgggtgctagccgcgcaattgcacgcgccacccaactagttacaatacaaataagctccaattaaatgttgcacagatactcctttatttttctgtaaacattaaatcagacgggccaacaatgtcagaggaaagggagtggagtaggaatcttggtgatcataatttcacaggctcttatttctctctttccttgactctctctcccggtctcctctctctcccccacacggcttcaccggcgacgcgagctcggctccggcgactcgagcttgactctggcggcagtggcgggcggcgtggccttgcgatttggcggcgggtgcaggctggtttgatcgtcggcgtcagcgcgggctcgatttcaactgtgcaagctcgagatcgccggtgtagtgggctccacatcggccgcgcgcgggcgcgagcttggacttcggcggcactgctaacgtacagttcctaactcctaagatcaatttgttgctctctctttagtatgcctggtcaatttttcattttccatgaattttggggtaattcattttttttaaaaaaaaaagagaaaatttgggtaactagggtgagttcaaatataaaaaacatgatatgttgacctcttattctaattcacaatgtaagttaactttccgttattgattccagagtttcatactaattgttgcaacagtagtgctgctgccattgaattagtttggtctaaaactaaatgtagttgctccttttgcaattccattcacaggggttaggcaagatactttgaaatatgagtggaatggaagctgctgtagcatctgggctgttgaaggtcgcaggacacaagttagtttcactgataggcagcgagtttgctgccatagcgcgcgtggccgaagacctatctgagctccatggtatacatggtgaaattactagctggctgtccacagttcgtgatggatcaatagagtgtgatccacagttccgttgggtgattaaattgaaggatgttgcttatgatattgatgatctactccatgaagtccaactagaatatgagaaacacaagatacacagcaatggtgacaagcatgctatatttgacacgttacgtgaaaaaccaaagtgatttatgttccgtcgcaagatggcccgtaagatcaaggatatcaaggtgaaatataatgagattgtgcgacaaagaagggatgccaatactatacgcagtagtttacaagtggatcaacctattcctagcagtaacatgataatcggggagttgtccttgttgagtaatgttgaagaatcaaaaatacctatcagggaccaggagatggatacaattgtatctatgcttgtagactctaatgagggagagaattgttggatagtttccgttgttgggctaggcgggtccggca

SEQ ID NO: 1032 - DNA, 16445 bp, Oryza sativa
  unsure (1)..(16445): unsure at all n locations
aatcggagttgtgagcgtatcagtttgtcgctgaaattgctcttttgctctggatttgtcaagccctaacaaaaaaaaactaacccttatgtcttttttgtgtgatggaactctcaagccgtaagaagcatgttggttatctagcttacaccacgcttaattagttaaagtttgaactaactgagatccatagggaaaaataatcagaactattattagtgcttgaaaatttgttgtgtgtttaattttttagaagcattatgtgcttttttactttcggtttacaatgcataggtaaaataacataaagaaataactaccatatgtggttctatgccatttatataacaagccacctaaatggcatataacaagccacctaaatgagactgaatataggttttcttctctacatgttcatgctagactaatggatttggtatgcaaggaacaaggtaaacctctatatgtcctcagggacattacactattgttttctttttttgcaggcttttcatggagctcttgatattagattttgcatggcaatttatcctatgttttgattgctagaatcttagtttgagttgaaccgctaaaataacatgtttggaatgttttatatgagtaagattttcaaattttgatacctttgatttggttctcttttcctcagagacctctaggagttcttatattggcatgcttttatctgattgcatacaatattttctctaacaaaatgttgtaaagactgtttttctcttggaggttggagctgctatattacatattttatagtgccacattccatccaaggttttcaaatttgttaggcacactaatatgctatcagcaattatagcatataaggaccaatttttgcgaagcacgtgatctgttagctacatgaaacaaagtatggtaattttcatatccttaattttctgttagtgtttatgaactccatttccagtggctgggatcttggggtttcaagatggcgatgatactccccatcctcccccggcatgacgactatggtgctctccgtcctccctcactacgaccccaggctagaggaggagcagtaggacactcaccggcgatgaggaaacaatagggcaggtgtcgaaggaagcaacagaacaggcggcgcatggaaaacggtgaagaattgtgtgggcagagaagagcgcaggacacttgttttttttttggcgcaatatctcatccctatggcattccattgtgtaaattttcggattattagatgtagtgcttttcctatggcatcccattgcgcaatatctcattcctatggtctcccattgtgtaaactcttttccacaaatgagttttttttttctagaagttgtatttttcaatgtctccagttcactatagttgtttagctgtgggcgtggtgccatgctacgccctatgttctagtgtttacaatcgctagcttatataccttatatacccaaatgtgcacatgttgtgggctagttgttactaatatcctgatgatcgatgtagcctaacaatataggcaaaatgtactgtatagaaaacacaaacaaacccatacttgaaagatatgatagaaatcctcaatcctgatatagatacaacatatatatgccttgtacgaacacacattatgaatccattgtatcaacacaaacgtatggagtctccctctaattaaggtacactaccaagttttcatcatcacatccttctatataacacaagaatcaattcaatttcaacatgatggtgatagacggatgttgatatgcttggtgtcgtcgctatgggccagcgagaaggttccctcggcagtgaggttgagataggtgaccgagagcttgtattctcccaagaaggcagaaaagttgaaggagccgcggtcattggtggttcccagggtctccttggtttgccactcccccagcagcttgtccaccacatctcccgcaggaaggttggtgaagttctggttggtcaggcacatctggtagcagctagcattggtgtccattgccgtccacagcattatgccatccacggatggatgggcaaacccttctcggagcacctcttccaagtatgcagcctgcaacatcatatcatcgtatagtacattaacaatgagatatataggttatatactacctccttctcatgtagctacctagtattggatttgacactatctacacatgtccagattagtagttttaggtagtgttaaatccggtactagatagctacgttttgagatagagaaagtatttcttatggtctgtcactcgagttttacatctagtagatatatatttgtgagtatgtaactacgtacctgcgttttggggtcgaaggagctactgatgtcgatctcggtaagccaaatggggagacgcagggtgccgagcttatcgagcacggcgcggacgtaggggatgttgggcttgccgaagtgtccctcaaggccgatgccttcgaaggtgacgccgccatcggcgagttggcggaggcgggagacgtaggagtcggcactggagctgaggtcatcgcagacctcgacgacgttgaagtcgttgaggaagagcgtggctagcgggtcggcgcgcttggctgtgtcgaagaagtcgacggtggcgttgccgccaaggcggttctcatagaagtcgaagtgcagcatctcgttgctgacgtcccaatgcacaaagtcgcccttgtaccgagagaggaggctctcgatgcggccagagacggcagcacgtagctgtgaccccgtcagattcttcacccatgctggcgtgtactttgggtcctcccagaagatattatgcccgcgcgccactgcgtcgttggcctgcacaaactgcaacagctggtccgccaccgtatagtcctccttccccgggtatggctccgttgcataccacttgagctcgttctcgaacaccgccgcattgaacctcttgttgaaccattcctacaaattcattaattaagtacattattattactaaattgtcatatattatatatcttaacaccaaaacaactaaataacatttaatgtctatcgctaccgattggatatagcgagctgtaacctagcagccgctatatgagctgagttagcgatccgtggtagcagtcactgtatgatataacaactaaaggcgtcgatggtgccaactccgacgcttgctccacgaattacgaatcaacacattataaactctttaatctatgttatgtatcgaaatatcactaatttatttctcagtttctttgttaatgtattataaaatcattattaatgatacacatactcaaatttatgtgtgattattaaatttcgttattggaacttagcttcagttatccgtggttcgctacatagacacctgcaatccgctacgaacctactgtccactatttgttttgttgcttaacacacggtttaatttcataaatcaatgctaaagttcgtcatatatctcagaaaaaaattaaggaaagaatcatgaaaacaataacctgataaagtttgttcccaaggattgtcctgctgatggcagagccgaatgggaaatccctggtgatctgatgcaccgcgaccttggcaccaaccacgcgactcccgttgctgtccgccacgtggacattgacaaagcgcttccggttctgttcgtgaaaaagaattacatgctggcatcatcatttgctccacacttcctcacaattaagttggattttttttaaattatccatcgtgtgacagtttttttataatggattaaaccggtctctatacccaaaagagttacacagcctaagagtcgacgaaacagtataagtacattttattaccagctgaatacggtcctccctgtgctgattccattgttcaggtgaaaatggttgcaaagaggcacttctgatcgagatcgttgaagcatttgggcttgcagtctgcagtgaataaattgcaaactgcatgacgattaattaattcaccaagtcaagatctaaactaggttcagctaaatttgtatgccaatatattactgtgctctctgtgacttaaccgtgaggaattaaattaagtatatcacctggaaatagaggacggaggtttctgaagcggagttgagggtgaaaccacccttgaggaaggaccaacagtcgtttcgcaccagagccgtgccaaggcattgagatgcagcgtttgctagcgtcaatatcttggctttcacatgagcagttgttggcccatcgattttcacccagcgtagagaaaatcaagcaagcaattccacaaggttaattttactcccaggaaatgacaaaattaagccagtagaattgcaggtccatcagaaatctgaataccaataacaaaatcaaattaaatgaaaagggaaacaattatctatttcacttgaatatttgctagtccaataatttttaattcacctaaaaaataacgattgcttgaagaaaactttcaagaaaatgctcaacagaccagtaccaaatagtaaagtcataaaatcagtaccatgccaaaaaagcaggggagcatgcatgaaaatgtgcgtgccaaacagtagaaaacagggcaggaaaattcgcatcgctggttcaatatggcagcatatatatgcacgatacgatgtttgggactccccgttttctttcgtttgtacgcgggcaatctgcacgaatctttggccgccccgcgcccaacatatgcatatgcgcatgcgcggccagggttgagacttgagagaggacgatgcgatgccggcgagatccggctatatgcgtgcggcgtgcccatctcatcatcattctccctagtttcctccgtgtgtcttgtagctcttcttggcttgttctcttctatggtgggggcctgctcacgctcacgtggtttctttttgctcatttctggctgggatacattgggtcagggacccctactgcagccacagtccttttggttccaaatgttagggtgtgtttgattgggtggatgtgactggatgggagatggctgtccgattatatgagttgtttgattggagggcagggtggatgggatggtaaaaaaaagtaaatattctctcaatatttttaaattatttttcgtttttgctagaattgtggcgtacgcctaggggtcttaggttagctccacaagctaggtggtgtactagacgacctggattcgaaacatcatcaattctaattatttgatattaggtaattcccaatattttgctcttttttgataaacgcctagggaatttccgaatagctccacaaggtggttggctaaacgacttggattcgaagtctcaccccttctaattatttgatatttggtcattccctaatattcgcgcacatcggttggattacaatccatggctgtttgcatatgtcaccaagtgacttgacactttttcctgagccattaaaaacaatcagcccacttaggatcagttatattttgccaaagctaatcaactggaacctactcctccattttaaaagagtgtagttttagtcgaagaatttgtctataggatgttatatatcatagctatatacgctactacagaatcccattaagttctagcttgctcctttatatttaacctatctagatgtgggggaaatatccggtgaaaaccatcaaataagtaaaaacccgtgaaaaccatatctaaaatttttataaatttatgaaaaaaaaatactagagataggtatatgcataaaatacatagctttttttttcttccaaatggagttgattttggactcgagatttggtataaatgtatttcatgcatatacctatctctagtaattttttcataaatttacaaaacttttagatatggttttcacgggtttttacttattcgatggttttcgccggatacgtccccctagatgtgaacgtgtatgtatttgttttcttcatttttatatattttttacgttttcaaaagaaatttagagaggtcaaatatttatcatggaactcgtcgtctctgacatgtattaggggattccatttaggctagcctgcaagctaatgcatagttcgataacaatgcaagcatgcatgctttatccatttttttcttttacgcgtacaatatgatcgaacgagtggccggggaaattttagccttttctacagttaaattagcaattactagcttttatactttagaattaaatggcggtctctgagagagctagtacaaacaaacaaaaagaaaaggataacggctggaaacataccatgcttagagcaggtataatagggtacagtcagtagacggtagaactgttcatctaaaagtaaatcctacatggaagagtgagaaaacatcagaaagagagtagccggcccttaatctatcgccaggctagccattaaaaaaacagcacgaccaatcggtcatccatgcatgcttcagctgcaagatttttccactaattacacgcttcccaatggcctcaatgagagagaatagagattgtaagagaataatttttgctgagctggactttttatagcccgctgctagctatatactattatgttttgtgttggtgggggacgggacgtaacaattagtaataaatattttctataaaaaaatattacattacatgatgggtgcatcagacataaagagcattgtgtgcgcaaatgaatgcctaaggcaccaaaaatattttggagcatgcacatgtgaatattcagtgaacttgtcctcattcgtgtcatattacgtagagaatctattctatgtaaatgaatttactatagttaaatgacttaccattgactttggctctctttaatatgccactaactttactatttttttctacaatatatcattaggatggagtacttttaaaaatacctaaaatacaattcgagttacacaaggggttaacaaattgattgaccccactacaagtttcgaaaaaatataattttttcatgtagcctccttccaaaatatagaagtgtatgtatatttcaagattttgaatttacatgtattaactgttttgagaatataaatatattttatatgctaatagaatactctttttattgatgttcttttatgtaaattatctttcatatgatataaaatattttttatccggataccttttgtgtatgtgattccgctttcataggctatataaaagtagttttccaaacaaaaaaaaggaaatcacaaaatatacacaaaaacttctatattatataaaagacaacacaaaaacttttatattttttcgaaacttctagtggatcaatcagttataacctcttaggacttgaagggtattttagacttttttgaaaaatatccattcaatcacacagtagaaaaagttgacaaagttagtagcatattatagagagagaaaaacgttaatggcaagtcatagtaaactcgatggtatataataattctctccatattataacataagtgttgcatgcatgcacaacgctagccatatcaaaaagccaacaaccctcaaaattattagaacaagtttttgtcgagttactaatgcttgaagtttgacaaatatcttcttttttgagtcccatagttattttttggaaaaattggttatatagcatcgaaagttcatgtttttggttttatagcaccgaaagataccgattcactttaatagcacccaaagttcaccatgttcccatttttagcacttccatcaattctcgatcgttttccgtccgtcgtgatccagccacacacacgatatgacgtttctacccctcacaacgtttctacccctcacaagtacaagtagaatgcatgtcaatgaggggtagaaacgtcatatcgtgtgcgtagctgggtcaataacgatcaagacggacggaaaaattganggaagtgntaaaaatgggaacagggtaaannnngggngntgnnaaagtgannngganntnnnnggngnnatnnnnccnnnnnngnngncnnncgatgctatataaccaattttgccttttttatcattttattttagggtgttgatacctctttcatacagagtttatgcttcacaacctcctataatatggttcaggcaattgttcgccaagataccctttgccgtcattcacttcaacataaaattactacgtactcattcaattcaattcgttatctctagaatttgttttcaagataatccatttggtaattaatatttaatgtttaagactatcaattgttgtactgaaataaaattataaataaatctaataaatttgtgatagtatttttcaaggtaaatatatgtatagctttttaactaagcattttagaaactactagtcaaatttaaagggtttgatcatatctttttttctaaacatcaaatacttcctactagagggagtacaagataagcaagaaattctgcatttgtggatagcaccaacacactgcaaagttgcaccagctccatgtaaaattttcagatcaactagtcaaatactcattctttgaaaaaaaaagagagaagaaaatcagtttcactagttttgaaaacacgagcacaaattagaagacagaggaacaaaaacagaagtgacgaacaaaaaatgaagtgtgatatatatactcacaggagaagctgtatactgttgccgcggacatattatacagcacaaatgccggcgaatagttgccatcgtcctctgttctgaagtccgtcactttgttcgcccagcgcaggatgccaccgttgtacagtgcaggttcaggatgcgatttgcactgaaaaagaaggcgggggttcagagctcagacgcatacaggcccatagttttgtttatgcttatacttataagctaaaataaattttcgtcatataacatttgatttttaatcgtgaagttcgtttataaaaattttacacataattcttttttttacaaatgtgtaagtataagtataggcgaaacgacgaggctggtaaatcgatcagcataggagatgaggtagagaggaagagatctagacgatgcgttgcgtacctcagtgtaagctctgtaatcatagcgcactccatctgcaaaacagcaaatttgttttccttttctgtcaggcgaaatccataaagtcgggtgccaaaatgagcaggattaattcctcccatggatcgattggttaactcaccggaggatgcagcagggcgagctagcaagacgatgagcagcagcagcagcaagagcaaagccttccgatctgcagggagaagaggcgatgatgatgacgacagtgcagcagcctccttgtgcttcttgccaatcgccatagttcccgtcgtgagtgagggtaacacgagcacacagagactagctctctctgttgtctctcgtgatttcttcttggatcgacgtgttgatgtgtgctcacacggtatttataggaagccaagcaactgtacagctagctctagctagtgtctagataagttgaaaagaaacgcaaattttactacaagatattatggttttagttctgaacacgataaaagttaacttttttttcagaaaacagttttaaagtttgtgaaaatttgctactttacattgcacacattaaaatatttatttctagttagataggagagaaaaatgatgtgagaggttaaaaatacccattgcttccacatctcagctctcttattcctcttttcgataagtttgaactttcatattttgactaccaataatttgttaatgcttacttttactatggtaaccctattaaattttataaacttattgtaattgaagttaaagttctacagttttgaccgaacgagcagggcactaagtttaaaatatttttaaaatgactatattttgtagcttatttcacatggcatcaaaagttcaaaacccatataatcccactgataaacgataacccataaataacatgtagccatgtaggtttgtaacgtgtcagccctacatatgttggagcgcgctatcaagctgcatgtagctgcactaaaacttgtgcattttgtaagaggtaaagcagaggagcaactatttttttttctccaagcatgaattttagattgaaccctcttttcttaccaaaagtttacgttaaacccctgaaacacatatttttgctttgacaactttgtatttgaatcttttttttcaataccattcttatctttgggtagacgcaggcagagacgccgagggtgtcaacgcagacacgcagtggtgaaaagatcttagtggggtacactgaggcctagttgccgttccggcttaactgatcgcgtgaaaaaatccgctaatgattaattaagtactccatctatctcttaatataagagattttaacattttacttgtaatatttgaccattcgtcttattaaaaaactttaaaattattatttattttttattgacttacgttattatccaaagtactttaagcacaacttttcgttttttatgtttgcacaaattttttgaataagacgagtggtcaaaaagtgtaagcaaaatgtcaaaatttcttatattatgggacggagggagtattaggtattataaatttttaaaataaatttatttagctttaaaaataatttcatatataaagtatttcacgaaatatgctgaaatgcacctaagactaaattagtttgatgacaacagtaaaaagatgctataaagtaaaaagaaaaaggaaaacgaaaaaaggaggtccagagtgcaagggtaaaactttggcaaagaacaggtgtcaaactgaaattcactctgaaagctaatgagcatttgactttcttaaaagttttatacagcatcacttactactaggtactatactcctacgtgtcatttttacaaagtactatgtggtcatacatcacgttagccttgacagcattaattcttggcagtttatggacgtggaagcagctgcgctgaatggggcctgcagcatgctagctagccttgctagcttccggctggatagaacgcaatatgcagataatggtgaaagaaagggagtttggaacgtgaagactaacaacatgtgggcgtgaggcaacaacgagagacaggtagggagaagtatactgactagtgcacatgcatgatcatatatcacagttcacatacgactcgcaagtgcatgtatacccaactttcggtgtgacatatattgcgcgtgcagttgtcacgcgtacattgaaattaaactagatgggttctgttggtatgcaccaatttcagctcatatactccctccgttccaaaatgtttgacgccgttgacttttttaaaaatgtttaaccgttcgtcttattcaaaaaatttaagtaattattaattcttttcctatcatttgatttattattaaatatatttttatgtatacatatagttttacacatttcacaaaagtttttaaataagacgaatggtcaaacatgtttaaaaaagtcaacggcgtcaaacatttagagaaggagtaagtactaaatatggtttattaaattataaactaatatattacctcaaatatgatatgtaaaaaaaatacgtaaggattcaggatgtatttgtgtccgtccctcctcacgtcggcccaggtggcgcgactcatccccctctccgcgtgcgcctctacctccacctttgtctccctcccctgatcttccctccctcccggcggcctccatctctccctcgcgatcccaaaaaattatttgatccggcctacctgcacgcgcccccttccccccacggcctctctcctctccctcacagcccctctcctctctctggcgcccctcctccctgtcgctcctttctcccagcgcccctcttctcccttgtgttccctccctcgttcaacgagaccggaacccactcgtctaggaatgagttttgatgcactcacccggctgcgatcaccaccagagctcctcgttgccatttatctctctctcgggaccacatagtcgttgttcccgctattatagttttcttcattgccaactgccaccatctatggacgagtcacattgtgcgacacgtccggccatcttactcactattgtttggttgcaggaggaccggcgcccatcttccctcctcttctctttcttgttttgactaggaagacgatgaatagtgttagtaatttttatctccatctttcgttcttccagcgtgttcaaggaaaattgaaccccttcatctggaacgtattttgatgcactcatctggtcgtgttcaccaccaaagctcgctgttgccgtttctctctctattggtaccacatcattctaaccgtattcatgttgttctgattttcttcgttgccaacctccaccatctgtggatgaagacacaattccttcctggtttagcctgaacatgctcctggatcactcacataatattaagaccataggaactatgaatagagcatgaaaattctaatatgtcaatgaaacgggtactcgttcagaattaatggatcggattttcatttatgggctaaaatatttttttttaatttctagctaatttcagtagtttttccatttacattattaattttagcactatttgatccattcaaaattgttgtaacttataatattgaattatttatagctaaatgaaaaaaagaggatttagttatataattttcattaaatatattaaattatcgttccggccaaagttatttttagtttcatgctgttatttatatgattatatttccttcaatccaatcgtgatatgcggtttaggattttaatttaatcatatttcttcagtttaattgtgatatatggtttagaattttaatttatgtcaatgaatgttatttagaatccgttgcaatgcacgggcatcatgctagtaataataataagaaagaatgttaatgcgaaagcggatggtggaatggggcgcagtgcatactaaggtaggagaagctaaaatgcggatagttgaaagagtaggtaatgaggtaaattatgttataccaaaggtttgggtccattttgtcttttcctcgatgaccctcatttccacaatcatatctatatgatgtaaatttgctatcagattcttttttgtctgtgtacctttttcctgacttcaaagcccttttgacctccatggctatgccaaaacatctaagcctcatctgcgacttttgaattccattccaacatgaggtcccaaacatggcagtggcatatcttcatacataaaaacagtagcaagtatggcactagtgtatacgcatgatgataaaaaaactgaatacacaagcatggagttctattacaaacctatatccttccatcttacgagtatgatggcctagacttgattagcatctgcaatcaaatgtttttttttccatgggaaagggatcgaaaagcttgatcaaaggcaacctaatatgaggaattgaggagtttgatcaattctaagaagccattcatagggatatggtagaagagaggtagatagttaacactaatgatcaaagtgaacaaaagctcttattgtttgccgaccctcagaacaacagctgacaaggattttttttcccctccatctgacagggatggcaccctttttccctccagatgaccgggcggtgaatgggcgcgcggcggccagggcgagcacgaggttgttcatgggctgattttccttgcatgggccgagtgcgagatcgctcgcctgagttgctcactggttcgtgcaacgcaaaagggatgaagcagctacgatcatgcgatgcagatcgagcagtccagcgatgtgcgacatccctctgacatcagttggccaaagtcagacggccgagttccgtactatgggaccttagtgttaacggtttccctctgtatcatattatattataagtcacttgacttaattaaacttttttatgtttggtcaagtttgtaaaaaatatatactaacgctttcaatataaaacaaatatattgtcaaaatatattcaatgttagatttaatgaaactaattttatattatatatgttattatttttttctataaatttggtcaaatctaaataactttaactaagaaaaaagtcaaatgacttgtaatgtgacatagaaggagtactagttaagaaacacatataaacatcacgaaggatataatttaaaaacattaatttggtagcaaatgcagaatcagcagaaacaacatttagtcccaactcccacgagccgcacaaactgaaagaagatcattcgatgagaaggaaataaatagagaaaataagcaagatgtcatggagtgaagaaaaataaattaattgaaatcacagaaattgcaagggaaacgaagaaggatgatttttttttaccatccacttgccctcctcgggtggaggttgtggctaagggagggggctgggatcggcagcggcagtgggggcataaggtcgttggctgcctgacgatgaggtacggcggagtcagggtcagtggtgtcagctaaacacaggacacgtggcagatacatagggatcatcagtgatctatattcctcatttgcgtgacgcgcgcagagtggttgattcaacgatgaggtcctggcaatgatggatcgaggcggaggggctgattcagtgatgggtcccgactgatggatcaacgtggaggggctcgaggcaactacacgatggtgatctaggttgatgcatcagtagcacctgaaacaacggcgacgtggcgcgcttgacgacatcaacgatgatagattgatggtgccactgtttgaagcggagtgaactgaggtggcagcacccacgatgagtgtatggagtgctagggagaccaagatagggaattgggggagatggaggcggaagtgcaggattaagggtgtgggaggtgggagcgatctaggatgttggatttgagtgacaagatcttgactgtttcatggtggatttgaaaatgtaagaatgaaagataagtataataagttggtgaattatagaggagatagatacataattaatacttggtccacctctctcttttatatagcttgttgaaacctgtgttgtaactagctataaatttatggtccgtttttcttctccattctctaacaaagaataaactaatgtggcaatttttatagcctacttacctcatcctattgtactcagcaaacagaacttagatgagtcatgggagtgctctagtcatgctttgggtcaggattctccgcactgaagaacaaactgcagagttacagtacagtgcattagggtatgatttttgctattggatccacatccaacggttcaaaacaaagtgctacaacagatctaaacactaaaccttaatcagtaattgcataacagtaaaacggatactgttcatgtacttttgctatagtgctactgcacttcactgtagcggtagacacaatgcacttttgacaaagtgtccctatgaattacaggggaggatcaggatccatcagtgttacgtgcccccgcccaaagccacggagacctgccgttgggtatggttacccattccgcacacccatacccacttgaaatggtagggtatggtcatgtcgaggacaacttatgttgcccatcatgaatgtgttgggtatgggtaacccgtaacccctaatagaaacattgtaagggagaggtttgtcttttttatctaacataaggatgatttttccccaaattgaatacccaaattgaaatgtgacatgccgagggagatatgacggagtactaagatggcagcgattgtggggtccaacgtttaataaatagcgtatatcgcgtcggtagtagattgttgcctatgtagcggatcgtggatagtgggtgctaagttccaatagagtattacaaataacgactttataaaacattaacaaagcagctaagaaataaattaatgatataacctacaaggataagtagagatttagtagcactcaaaaagttgatgtattatttcaacctaaactaaattaagaagcatacatgatattctattcattagatgttatgactcacaggaatataatgttttggaagacaaaacaactaacaaactcgtcattaatttgttatgggttagtggttatataaaatatgctcacactatagcggcccgttaaatagaattgcagaaatagtgctgctatattccaatatgttacttctagtccagtggcgaagctatgtatgtgtgtttgggggagggggggg

SEQ ID NO: 1033 - DNA, 1687 bp, Oryza sativa
attcctaattcccttaacccatgaacccatgacagatgcgccttgctctaccttctgtggaattacagtcagatactactactgacttcattatggtctactttgttattttctgactgaaaatacatattgaattattgatttttgcgggcagaccaaagatgaagatggcaaagcagataaagagatggacttcaacgatgagtatggacaggacacaggtgatggtgaaacattcgaaggtggttatgattatcctgattacaactatgatggctatggtgatggagcctacggcgattatgatggtgttgatttttaatacccgatatatcaatgctgggtagaattgttacaattttatttgtgtgtgtatggcaacaattatcaattttacatgaatagttctgattagttgacgaaaacggagttaatcagtactcagtagacagtatagcagtgtagctcgttgatttctctggtgatatgttgagaagctgttgtagtaactgtattatttcattcagcgacctatacttgcaagttgtatattaaaacaggcctcgaagaaaaaggaaaattttgaatgcctcatgaggtatcatggtctacacattcgacaggagtggtgtgcatgtcgtcatttgcgtgaaatgttgacttaagctgtcctgattggcgagcacgtctagttttgagttgcagtgcacagttctttttttctttaatgcagcgttgaatgtttgtttgctgttgttgatgtagtctgatggtgatgaaagtagtgtgcacttcgtcgtttgcgtggctgtgttcctttcttcagctttaaactgtaactttcttgttttctagcacgttttgtaaagtgttttttgcaaataactttttatatagaagtttctttcgatgattagggctattaccttactagtggtctgaaccagtataatctatgtcttctatgtgtttgatgtcgtatcgtgtaaatcatcgaatcaacgtacctcaataccttcataatacggtccgtgggtatccctcatcgataactgttcatcgtcttccttagccgaaggcgagaaacaaaagagggaaagtcttcctcagccgaaggcgagaaacaaaagaggggaaagatgggcacggtgctttgggtttacgacttcacgagttgttgtcgccggcaaaatcttggtgagagagaaggggagagtggtggagaacggtcatgtggagtggggttgacgacatcatgagttgtcgtcgctcggtgcagctagatgaggttggttttgctggattcggcctcttcctcctctctactgcttggatttggtcttatttggtccaccttgtagctcccgacctctcgcgcacaaaccatcagtgaggatgctgccacctcaaccggcccactcgtgttggcagccgggcacctcttccatccataaagtttactgagaaattaaagttccccaccttttccagggcgatgcgtgcgaacgaattcgtaggcggaccacggacgtgaacgcgtgggaaccgtaggcggacgaaaacacaaacgcgctcctgaatcggatgtgtgcagtggccaacggtgcaaaagcgaaaactaacgacaagggcaagcatgagagtcagatgacgtacaaagaaataacgcagtttcctttgcatcacc

SEQ ID NO: 1034 - DNA, 1405 bp, Oryza sativa
ccatgtctcccttgtgctaattcacttgtttggttaagagggtatttggcttggattacacatacaacaccaaattattacagagatcattcttaaatttattctaaactacaaaaattcgaaaaaataaaatatttttttaaaaaatgacaaagtagaaaaccatgaaatgacaacagaaattcaaggaacttcaaaaatatggcccaaaaatctgaaaatattccaaaatgttcacaaaataattataaaattctagtaaaatatgctgagtagaattataaaattttagatggttatataattattttataattataaaacatcatttactcatgggagcaattgcgcgatgtctttgtccttaactttcgaggcacctacgaggagccgaagacacagcagcatctactaggcattcgccagaggccggggaaatcgataagggggtacatgcgtcgcttctcgcaaacccggtgtcaagtacaagacataatcgaggcgtctgtcatcaacgccgcttcgcctgagctactcgagggcgaactcacaagaaaaatcgccaacaaagagccgcagacgcttgaacacctgcttcgcatcattgacgggtatgcaaggggtgaagaggattccaagcgacggcaagcaatttaggctgagtatgataaagcctccgtcgccgctgcccatgcccaagtacaagctcaggtcgccgaaccacctcctctcgctgttcgccagcctcagccggcgaaccaaggacaaccgccaaggcaaggccaagctcccatgacttagaggaaattcagaaccgaccgtgcgggcaaggttgtgatggctgtcgaagaagttcaagccctccgcaaggagttcgatgcccagcaagcaagcaaccatcagcagcccgttcgcaagaaggtccgaaaagacctttactgcaccttccacagacgctatttgcacaccacagggggcagctgtcgaagcacctcgcgaagccgttcaagaacaagcacccccagccgaacagtgccaagatgtgcagcgcagagtaatccaagtgattataagggccgacctgacgaatcagctgtcgaaatggcaaaagaagatgcagctccgaatggtgcataacatcactttggcgggcgaaggggccccgcaatatctaagccagcaaatctctttcgggccggaagatgccgaaggagtaatgttcccgcatcaagaccctctggtgatctcggccgagttagctggcttcgaggtccggcgaatcttagtcgacggagggagttcggccgatgtcatcttcgccggagggagttcggccgatgtcatcttctccgccgaacttactgccaagataaccacgaaaccacgaaaccacgaagcgagtttt

SEQ ID NO: 1035 - DNA, 6642 bp, Oryza sativa
ttcggcggagaagcagtccaagttctaggccaagcgcaattgctggtagcttttggcacaggcgaaaacagacgcgaagagcaaatattgttcgacattgtcgacatcccgtacaactacaatgccatcttcggccgtgcgaccttgaacaagttcgaagccatttcccaccacaactatctcaaactcaagatgcctggcccgacaggagtgatcgtggtcaaggggcttcagcctttggctgcttcaaagggcgatctggccataatcaacagagcagtgcataatgttgaggccaaaccacatgaccgggcgaagcacgcgccaaagcccgcccctcacaacaaggtaatcaagatacagattgatgatgccgatcccacaaagcttgtatcgctggggggcgacataggcgaagaagaggttgagaacatcctagaggtgatcaagaaaaacattgatatcttcgcctggggccctgatgagatgggaggtgtttcgacagatctcatcatgcatcacccgacagtcaagccggataccaagccaaggaacagaagctacgcaagatgtcagttgatcaccaagaagcagcaaaagccgaagtccaaaagttgctcaaggctagggtcattcaagagatcgaccaccctgaatggctggcgaatccggtaatggtgcggaaatcaaacggcaaatggcgcatgtgtgttgatttcacagacctaaacaaggcatgtccgaaggatgatttccccttgccacagatcgaccaactcgtggactcgacagctggctgcgaactcatgagctttttggatgcgtactccggctaccaccagatccacatgaacccggccgacatccccaagacagccttcatcacaccattcggcaccttttgccacctcaggatgcctttcggcctgaggaatgccggggcaaccttcaccaggttggtgtacaaggtcctttacaagcagttggggcgaaatgtggaagcttatgtcgacgaaatcgttgtaaaaagccgcaaggctttcgaccatgcgtcctacctgcaggagaccatcgacaacttacgcgcggtgggtatgaaactaaatcctgagaagtgtgtttttggtgttcgcgcgggcaagttgttgggtttccttgtttttgaaaggggtatcgaggagaaccccgagaaaatcgatgccattcagcaaatgaagcccccgtcgagcgtacgcgaagtacaaaagctcgcaggccgaattgcggcactcagtcgattcctctcaaaggcagccgaaagaggtttgcccttcttcaaaaccctccggggcgcggaaaagtttacctggacacccgaatgccaagcagcgttcaacgagctgaagcaatatctgcaaagcccgcccgcttagatcagctctgcggcggagctatctcccttcggcttgcattttgtcgcccgcactgctatcaagtcccaagtgctagctgacttcgtggccgaatggacaccggcattcacccctgagcccgagcccgttgaataaccctgggtgatgtattccgacggttcgtggtcgcacaagggggcgggtgttgcggcagtactcacttcgccggggggtgtgccgattcggtatgccgcaaggctgcagttcaacacaaccaacaacgcggcagaatacgaagccattcttctaggcctaaaaaaggcaaaagcattgggggttcggcgcttgctcatccgaaccgacttcaagttggtagcaagtcatgttgataagtcctttgaggcaaaagaagaaggaattaagaggtatttggaggctgtttggtctatggaaaagtgcttcgccggcataacggtcgaacacttacctagaggccagaacgaggaagcagacgccttggcgaaatctgctgcttgtgtggcccacattcgcctggcatcttttttgaagtcctatacgcaccaagtgtgcccgtagagagcctggatattatggcaatcgaccaggcagaactgggcgaagatccaaaagactggcgaaccccattcgtaaggtagctcagaagcggttggcttccggaggacgaagcagaagcaaagcgcctacagctcagagccgcaaagtacaagatggtctcgggccaactatatcgctctggggtgctccaacctttgcttcgctgcatctcttttgccaaaggtgaggaaatggcgaaggaaatacactaggggctctgtggcgcacaccaggccgcaagaacagtagcctccaaagtatttcgacaaggtgtgtactggcccaccgtgctgaaagtctgtgttgagcaagtcaagaaatgtcaaagctgtcagcgccatggccgaagccaaactgcgccccaatacgagctgaagcctatcgcaccaatttggcctttcgccagatgggggttggacatcattgggctattcccggtggcgcgaaatgggtacaagtttgcaattgtggccatcgaatacttctcctgatggattgaggccgaaccacttggcgcgatcacttcggcagcagtacaaaagtttgtatggaaaaacattatttgtcgtttcggagtgccaaaatagttcatcactgacaacggcaagcaattcgactctgacaagttcagagagatgtgcgaggggctaaacctggaaatcaggttcgcgtcggtcgcgcacccacagtcaaatggggcggccgaacgcacaaatggtaagatcctataagcactaaagaaaaggcttgagggggcagcgaagggtaaatggccggatgaaatgctatctgttctctgggtccttcggacgacccccacaaggccaaccaagttcagcccattcatgcttctctatggcgacgaagcaatgaccccaacagagctaggggctaactcaccaagggtgatgttctctaggggcgaagaggggcgcgagttgtcacttgaactcttggagggggtgagagtcgaagcacttgaacacatgcgcaaatacaccacaggcacttcggcaacttacaacaaaaaagttcgaccgacggagctgttacctggccatctcatcctaagaaagaaagcgaacccagtggcggttggcaagcttgaatcgaagtgggaaggaccgtacctcatcaagcacaagtccaggacgggctcctttcgcctggcgacactggaaggtgaagagttcgaccattcctggaacactgcctctctcaagcgtttctatgtgtagaatgggtggcacccaaatcgccaacttgtaaaaatgtacatattgttatgtaagcctttcggcactatgtaagcccttcggcacaaaaatgcaaaaaaaacaggaaaatgaaaaaagacaaaaaaaaactggatgtgggctattatccatcccggaggcccgaaccagtataaaatctttgtgtcttttgccttcttatttgtatgattgataatttgtggaaaaaccctaaggcaaacgcctgatcagcaaaaatgccagggggcgaaacgaatcggccgaagcaccgttcgccgaacgttgaaaccgcaacagcttgtttcgggaaacaactaaccgaacaccgttacattcgatcaaaatgaaagcacaagtgcttccttgaacgtagaataaaacagatcgaaaacggaagccgaaagctaaaaagtcatagacctatttcgctaatacacgcaaaggggccgacacgttccgacctaacgaaagcacgagaagtgacaatgcaaaaaattgtgaaaaggaaataaagcacatctttcttgacttcgaagaaaatatatatcgaagaatacaaaccctacatcatggtacaagtaaagaaaagcgatggctctacagcccagcttacagataaattacatcttcgcccccacaaccgtccttactctctacggaatggtcggacgaactaggttcgtcatcactaccaatatcatacacaaccctgagaggagaagggggcgaaacacagactagactgtaacgacgctgggaaatcgcctcctgccgatcagacttctgatggtttcgccaaaagcaaaccatatcctccaaacattttgaatgaacactatcgtaatcttccaagctttgcccggggtgcgcccgcatccagccagcaaccttaaaaaccttatagctgtggccgttattatcatttcacgataaacgggccgaaacgggcatcgcacctttggcagacccttcaacgccacaaacttctcgtttttgcttcgccaattcccagaggggggccaaatgcacaattttcagcgaacatcctgataaacagtgcagaaagggcaaaaggcaaatttcatagtaagaatgggcgaaaaagagtaaatattaggtaatgcgaaaatggcgcaagcgcatacgccaaaggcatcgaccataaaaagtgactaagaccgagtcatacattccaaatatccaaaaggccattttcggctacaataagaagggtaaggggccatcagccaaatatacattgttcgcctttcgtggcaaacgcaaaaagaaaaactacaaaaatctaaggaaagggcggagggcctcacacctctaggtgatcctgggcatcgcctccaccccctccgaccgccgcatccttgccttcgccctggtctaccacctctgccttcgctagttgctccaaaaggcgtgccttggcagtggatcggacgtccttctgccagaactgtttccgccatgcgcggagcgcgggcgaaacgtcctgcgcactaacctcccagtcccccttcgcatagttagggaactcggcgacgtgctcacagccgaactgttgcagaacgcccatagtgaaggccgccgatacacgtgcacagcaatcactttacgtagtggcgcagtccgaaaccacaccaccagcctgctgcgtccactccgagaagtcaaaggcagaggcatctttggcggggactcctcgcaccctcgcacccatgtcgaaaagggcaaggcggagcgtttggcacgccgttttcgcggactcggtggctttcgccatctcccacaaaaaccgctgccactcctccgcaacgcttgcctcagccttgctggcctccaggcgaagagcctctatcttcggctcagtaagattgtaatagtcggtcagcgcagcggaatgggctttttccttctccagtttggccttaaggcgatcgacctcagctctagcctttcttcccttctccagttcagcttggagtcgcttgttttccccttcgcctccttgagggtgttggagagggcctccatctccaaactcttgcggcctatctcgtcatccttggcccgaatacggctcctaaatccgtcaagatgggcccgcatggttcgctctgtcgaacagtcagccgcaagaatctggatgtaaggtaaagcggacgaagagagcaaatgttagttatgggatctgtaagaagaaaataaagacaaacaaaaagagagagagcgaacagcatacctgaaccgccaagcttttaatagcagaacacccttcgtcgaactcattcagctcggtgaataggctcggggtgccgacaggtgagacaaggttgcttacccccacgacaaagggaataagttccacccaagtctcgaaatcgccaggggtgaagtggggcgccgcgagagaatactccgaggcagatgtttcgacggccgcccccttccccttcgacttgactagaggcgaaacaaccggctgacgcaaggggcttcagaaaaccctagccgcaaccttcatgacacgatcagtggaggctgaggccccggcggcggcactgccacccgctccgccagcgtcgatcgaaagaacgggggcggtcgaaagatctaagctgcgactagcgggcgaagttggggtttcgtcagaagactcatcgtcgctgaaaacacgagcaacatcaacgagtcctttcttcttggcggccttcttaaccggaccccccttcaccaccttgcccgccgaaaacacaactagcgccttcgccccctccaaatcctttcgatgaaggggggagctattcgactccacctcggtctcgttatgccctagacttggagtaggagtgtagccaggggtcttggtgcggttttcgaccgcctcgtccgcagcctttctggccgcagcctccgccccctcttcttcctccccttcctcctcgccgtcacgatcttcgacgtcgtccctgtcgtcggcgtcagaatcggaggaagcagggacccttcgcttcctaggggccagtttcacttgtccgtgcgtccgctttcgcgaaggctctgcatcgtcgtcggccttgttgtgtgagcagctggctgtactcgacgaccgacacgtcgccaatcatcttccgggcttcagcgtcggcctaatcaagaatcaatactgcgaaaataaaagatgtagccatattaagcgtcgaaccgggaaaaatagcgaaacaaagaagcgcatagcgaaagcggagtctcaccgttcgtcccctcaggaggaaccagcttcagcaaaccgtcgacgtgttcgtcttggtacaaccgcgaccttgccacgaccgggagaggggaaa

SEQ ID NO: 1036 - DNA, 547 bp, Oryza sativa
atgttgacaatgctaatgatgtctgacctttcatttgtaggcttctcatggacaatcaatgtcatctttgaaaacagatccaatgcagtccaagcattactacttttaacatgggctgaaacaatagagttccatgagataacatcatcaatacccctctgagttatttcatcaaagatcatgctggcttcctccaaagaaccacaacgggaatacattgccaccaacgcattacatatgaagacattggactcaaagccattgcagcatatcaatccatggaatgcactaccacaacggtatgaaggtagctctccacatgcttttaatacatgtggtagagtaaaatggtccagcctagttccagcacgcagcatgcggcaagagacattaattgcactgtcaaggcggccttgtttgatgtgttctcggataagtagattccaccacacagctggtgacggcgtcacacgttccaacacccacagagcatagtccgtagcaccacaagcaagatacgagcttccacaccagtacctagagatct

SEQ ID NO: 1037 - DNA, 642 bp, Oryza sativa
ggtccgtgaaatttccaagcagttatgttgtaataagttccttcttgttcttgatgatgcttggcatacggatgggtatgagtggggacaattcatggtgcatctacaggataggtcaattggaagtaggattttgctaactactcgtgatcgaaaggttgcagaagtagtcaaatccaaacaaatacatgagttggtgttcttaacagagtctgagagttggagcttgttcctaaagtgttctgggtgggtggaggatgatttgggatcagaatttatacagcttggaaaagagattctgaagaaatgtggtggggtacctctagcaatcagaactattgcaggtgtcctctgtgaaaagagggagataagtacttggagagccataagagggagtgacttatggaacgttgggagtgtaaacgacagggtgtttgcatccttaaagttgagctacattcacctggcagataaactaaagcagtgctttacattctgctccatatttccaaaaggctatgtgatcaataaagacagattggttgcacaatggatagcccatggattcatcacgccgatgaaggaagagcagccaaagatattgcaagtgaatattttgattctcttgtgaaagctggcttc

SEQ ID NO: 1038 - DNA, 10391 bp, Oryza sativa
acaccccactatccgtcccccctgttgtctagccttgaagcccatggaccttactaggatccaatgttctgtctgctcgagagaatcaacgagcagagtagcgatgtcgacgtctcggcttcttcgttaaccctcgtcctatcgcttcagcttcgcattgtgcgacagcgactgtcggcaacagtgacacactacgcacgcggtaagcctctctccgcaatctgtgcctctgcccttcgatcaacgatcgcgtgcgtctcaccgtcaagtacgcagcacacctaacatgaccatcggacgcggcctacaagtgaggttttgtccattttccccaatacagcaaaataacctaatcgcttgacttttagttttatgttttcttttacttgtacggtagtcacttgtccataatttagtatatagacatttagtccgttggtgagtactggattttgtgatgtttgaggcttggaggtagttgctactctctccgttttagattataagtcgttttgactttggtccaagtcaaactacttcaaacttaactaaatttgtgataattgaatatatttttataatatatttgtcttgggttgaaaaatgttactttttttttttacaaacttggtcaaacttgaaacagtttgactttgacaaaagtcaaaataacttttaatcttaaatggaaggattacctaataactatatgagcacttgaaccttcttttctatctaaaaaaatatttttgttgattatctaccaacaatgaagccatgaaggctatagtatgtatatgcattgattgtcatggactttggccattttgtcttctggctccctcaatctcagatttggcttcgctcctgtttacagtgcactacatcatataggcactggtagagggccactgtcatgatatttattagctcaagcatcgtataagggctgagtagtaaaaaaatcaaaattgaaaacaggataaacagaaaagccaagaccgagaccgaactaactgattacttttttttgcgacaaatacagggagctttattaaatcatatcaagattacattcttgagcaagaagctcagaaacattccctggagcctgcaggcgccaaacgggtatcgttccatcgatcggtggttacctctgttgcgccaccgccaccaccagccaacccatcagtcgagttctcggcttcacccttccaattcccgagttggcttaacgagtcagctagctcaattcaactcatcgagtcgagccgacctgatagtactatataaaactgattgattcatattactacgacgttttagagcatcaccaagaagttttctaaactgaaaataggaaataaataagttgatctccctaagagaaagcctaaattttatcaaaaaaaaatatttttctggaaatattttttttgataaaatttaggctttctcttaaagtgatcagtttagaaaactgaaacaaattttcggagagattatacgtctgttgatgcttaaggctgtgttcggtagaacaagttcgcatccggaacagaatagtgatcacagaaaacagagcggtctattagcgcgttattaattatgtatttgctatttttttttcaaaaatggattaatttgattttttaagcaaatttcgtatagaaaattttaaaaaaacacacaccgtttagcagtttgaaaagcgtgcacgtaaaaaacgagggagaggggttgggaaaaggggcatcctagctgcagccgaaaaacctacatccagtttgtggaaaacaaaaagaaaaaagaaaaaacccaaaacctaactactgtagcctgtacgcacatctatcccccatccgccgccccctccctttcgtctttcgtcgctcgctactaccgtgccgcgtgccgcctccctcgatctcacgattcgcctccgccgccccgtcctgttccccaacgctagctcccattccccacgcctccctctattctattcccgctttccctatcttccaaagccgccgagccgcgcggccgagtgcaaaaaggaaaaatatcggtccccgcgagctagggtttaccacccccccctcgtccacctctctctctctccgggtgcccacgccggcggcgagctctcctcaactgcgccgccgagagcccccccgccccccctgttcgtgggggaagtacaggttcgcagtgccaccctctgtgtctactagtgaagtttcagttttggactatgattttgttattatgctccattatgttgggagattgggattggggaattgaaacagtcacgtgaatccaattaggcaactaaaaaaacaaaaacaaagagagtacaaaatagggaaaggcgaaaaattgagaggcaccgcactggggatgtttgattgcttataattcaatggctgatctgtaaatgttagccatttcggcttggaaatgagtggaaaaagctaattaatcggaattttttcgcaggctgatcttagttgggggggtatactctgcggtctacttgctactccagcaatgtattgttctcactgtcaagataactgccccgtcgtaaaggaccctgacaaaaactacacgtgaggcctcccttcctgtcttttttctccttccatttcgatgcaaaatcagctagtacaaattgtttataagcatggccttgttggtcactcttaaatttctgtgtaccagctctaacacttttgtgcgcgtgtcattatgtaatttttcatatggtgatcagatgttgtggtttgtgtgggaaggttcttgatgatcaggtttacgatggtgagccaactttccaaaagggcgccgacgggcaggttgatctttcactttgcttctaatttggtttggtttatttatttttcacttctcatgttggttgttttggagctttacaggcccggttggctggtagtattctatcaagcattgagagtggtaattcagtatcccatgaaagaactataaataaaggtacgactttgaggtcattcctctatctcattttgctgccactttgtgggctaatttcatgctttgtttttccaggaagagaggagattaggcagattgtcagcagcttacatgtggctggtggagatactattattagcatggctcatcgctattatacagtatgtatctttgttactactacctccgtcccaaaatataacaacttttagctttgaatctggacacacagttgtccagattcatagctaaaaatgcttatattttgggacggagggagtagtcagtagcttataatttctaaaataatatggtacatggtgatgctgatgtttattcttgttgaagtttagctagctgttgacaagaattttacaaggggccgtcgaacaactcatgttgctgctgcttgcctttatattgcctgccggtatgctaccacctaattactttgttgatttattgaaagtcttctcactcattgtacttgttttttttctcaagcagtacctttcaatagaattatttcttgagcatgattcttttctttgtcattgaacttataaaatgcctaaactataacacagctaagctattccagactatagagcatgcatggtgaacatttgtgatgggtttgtttaatacatatatattttaccaagcacacaatctgaacattgccatgcatggccctcaaatatatcttccatgtggaaaggaatgctgtgtcctaaattttcaagcgcagagtacttaatggcctggttatgctatatctcatttttccctttaggagaacataatactccctgtaattgcaaaacaaatcctaggatttgacaccggccaaactttttaacccttgatcaatggtcatattggaaaaaataacttccatttctctagagaacatataacatccatgattgtctttatccatagaaatacatgagcatgtaggtggttatagaaactagcagtcaatgtggctcattgtagattatgtccatgtcccagatggtgtgctatatttgcaatcataggtcgtacacagtattttcattagttattgctgttcttaagttgtccagcattattttttttcctattagttcccttggatatctgttgtcaagtttcaaacttttgttgatattcattcctgacattcattatacctaatttgtgtgctaggcaaagtaaaaaggcatatcttcttattgatttctcggaccatttgcagataagtgtgtaagtgccccattctcctgcccttatcttgtagcccttagtgacatggctcatctggatttttctttcagttatgtcctaggtgctgtttttctgcagctttgccaagttttgctacttgcggaacatccagttatccaaaagctcatcgaccccagccttttcatacatcgttttacagaacgtaagccacactaaattgtattatttaaatttagcggctgaaaacacatgtgccatttcttgtgtacatctctacatttccatgcactttgaatatgcacatttggtttcttcaatgtggggagggggattgttcatgtcatgcaattataagaggctgggccaggctgttccaatgttggtacctgccacatttgccatggagaacatgttggagtgcaattctgtttggaaattgcaattacaacatgaattctgattcttaaatcataggcgctgtttgattgatttgcagaattggatcgaaattgtggtattcgagtcctgaatcaaattttactcgaaacagtcataggctcttgcatttacaccccagtgagaagtggactgatggatggaccatttgataattcttgcacaaagatttatgtagcttttgactaatttcttcaccttaatttatctaatctattcaacgtgcttttacattcttgtgaaaaaatatataacaattatttaaaatcacatatgatatttattttgaactatttgatagatttgtatatggtagagtcatgtgtagtagtcagactggggcatactatagtcaaactatctcctcgcttgtgttgctcatgtgaaggagttcaattgcaatgcaagctccatccttttatcccccccttttctgagatctttgcaaggcaatgccagaaggcaattgcttgggttagtaaggaaaccaaacatgtttagtctgattatttttgttttttgtgtcactttgttggttttatctgtaggtttactggggaagagggacaatgccgtatcagatacggctttacgcattgtagctagcatgaagcgagactggatgcaggctagcatatttttctccttccttctttaggttcttttttgtgattgtaataacttgacttatgttgcagactgggaggaaaccaagtggattgtgtggtgcagcactatatatcgctgctctctctcatggatatgattataccaaggcagatattgtaagcccaagtacttttgtctgatatacttatttagaattgtattctgaagtcttatgccctccttctgtatcagttagcatgtatcgggcacatgctacattttgtattttttataattggacatgaatatgattctatgctacagcatataatgacataaatttctgttttatgttttttaggttgctgttgtgcatgtttgcgaggcaacactaactaagcgcttgatagagtttgaaaatacagattcgggtagcttaacggtatggattctctctccaggaaattgccaaattcataggcgctgttacttaccgcatacagatgaaaatttgttgcaacgatgtatttgtaataaagatgggaatgacagcgctaagttgattgttggtacaacttttccctctgaaagtcattcttaagctgtctatgctgaaacatattgtaattactatcagtgtatggtgtctgttatggtgcaagtatttgacattactcatgacactaaagcaactattgacctaagcaagtactgattagggcagggcagcccatgtcaactagacatgcattcactttctttaccctgtccatagagctagttttaggtgcttatttttacccgttggttcagcatggtctatctggcaaaaaaattgggtattgccccctttcatgtctgttttttcatgtcatcaattcatcatccacaactgttatctactactccctccgtcccagaatataagaagttttagggttgaacacggttattaagaaagtaggtagaagtgagtggtggagggttgtgattggatgagtagtgaaggtaggtgggaaaagtgaatggtggagggttgtgattggttgggaagagaatgttggtggagaagttgtcatattttgggacggagggagtatatgaatattctttaagcaaatgaaatagtattatgctagattgtaaacgaaaatggtccttgaggtgtaaatgtgtcattgtgaagcccattaggggtccatgcaatgggcgaaggatgctgcctctgcccactactgcctaagcactgttcatggtgccttgtgctagttttatttagtttaaaaataagatgagattgaattatttatcggtttgtttccttagttttagagcaaagggcaaagggtttttgcctctatcatgcacagtacatcaggattaggattagaggtgtcttcatttcatacttaagtgattggacacatttccagctcgcattcaacgtattgtatccatgccaatttgcatttgattaaacattatattttgctgccctcttgctagattgaagaatttttggcaaaggctgatgaacaagtgcttgttactaaaatttcaccaaagtctggagaagtactttgcaagcacaaggataaagctgagcattttgctcatggactctgtgaaaaatgctacaacaaagtaacagacctttaccatgttcataatacatcagttttgggacttcattactcctgacacatgcatgactgttcagtttatgaaactgtctggtggactggagggtggctctgatcctccagctttccaacgagctgaaaaacaaaggttggaggctgctaaaaatgctaaaggaactgctgcatctaaagaggcagcactggaatcagtttgtgaggcacgcgaatctgatgttgagaataacattacgacaccgccaaaggtaatatgttcttaacatagttaagctcatgcttgttcccctatttaccatacattcttcctttgttagccaactaaataatgtgctcttttagttcattaacaagggcagaaaaaggtgacttttgatcatctagatcctgtacaagtacaacagttttgttatatgaatatgttgcattctcatgcaccacgtatatgagtataaatttacacgaaactgtatataggtcccgtttggaagtggcaatcagtaataatccgccctggattatttgttccatgcacctaaattatgattttttgaaaaactctcttatattgccttgcttagacaacttgttcctagctactactccatctgtccacaaatataagggattttgggtttctccatttgtccacaaatataagagattctggagtactttcccaatccattgaaccattgcatttgtttctcactggtagttgcatcattagatgaaatctttcccaatcaaataaagtcccgagagcatcaaagtaattccaccttatgtcacgagctccaggaagagactggattggatatgtgtgggatgtgggcggacgtggtttcgggagattggacgtgcgatgccccgtgatggcgacgctagaagaacgagatgagaaaacagagaaagtagatgagaagagtagattgaattcaagcttgatctttattgaatgaaagattgcttatataagcttatatgcaactgaattgctaattaaaagagataagaactaatgcaacaaaccggaaccaactaaacaaactcgagataagatcctattgccaagccgtactgtagcgcgtccgaatcacgccattcatgctgccgttgcgcgatctgattgatcgccctcatcacgcgccgccgttcccgtgcatcccgcattcatacgcctccgatgatatccaattctgaccatgataccttaaccttaaactctgctaaaaaaaacctagcatacttatatattttcgaactgaaggagtatttgttaagtttatttctcaaaatattaatttaccgtgttaatcaagtagatcatccatttcatttcacccgtgtttcatcactttcaaatggggccttattttgacaaaactatagttttaagacacaataccacaaagctagtatctatttagcattgaatttataaaaagaactacatatttatgttctactataaaaaaaacttcagatttagcatctcatcacaaagctatggatttataagttctattaggacaacagtgtgaggatctaactcataaaatctatatatcttttatggtctatttagttctatgatctgtggtttaatctgcagttttgttataattttgtgaaatttctgaatttgtgattttttttctctatttattaaaacatctgcatttgttatttctgttgtataccatataatgtgtttttgtaatttgaatactcaatttaacttattttgacagaatataattggagataagcattcgacaattccttctgtgaaagttgctggtgattctgtagctacagaagatcctgaaggggaaggtttgtttgttgctgtaccatcaacgatgatactccacaagaaaattcatatttccattttaggtcccttttgataagttcattcctgctgcatgcatatttcatccttaggtaaaaatgataaagcagatgaaggtcctgaaagtctctctgatattgatgatgcggaggtacttcatcctatccatgagatcacttctatatatttcatagagtaacttatttatgtcatctttagatcttgaaagataatcagttaggctctttatgatttactacagtgctactattaatttctaggttgatgggtaccttcacaacgaggaagaaacacagtacaaaaaaattatctgggaggaaatgaataaagagtaccttgaggtagctaagctgattacatagtagcataaggactttcttattttaaccacatagtgtggttctcagctggttgctttacaggaacaagcagcaaaagcagcattagcagctgagctggcagctagaggagtggttgtggaagaggggaagaggaaagtatgaaatgtttctagtgctaccaacctttctatgccgtgtgttcactgtagttcgtgattaagcatggatatttcatatgtagagaagaagacataatgaagatggcaagaacgcaacacccgctcaaacaccagcagaagcaacacagaacatgttgaagcggaaggtactaatggtcaatacaccccgatgctttgtaaggtttttcatttacttttgatggagaataggagaggctccactacatattaatttcatataagggagttatttgtaagcagtaaagaatcagaagatgattagtgcattttaattatacttcgaatcatagtttcacaagatagtttataggataagtgcatggctttattcatatccatagtatgcctactcatgagactgtcatgtggtccctgcgctcagatgttccttggcatgttatagaaaatggttgaaacttgaaactgaatggttttaaattacaatacatcaatacatggttagtccaaacatgaaaaattgcagattttattttaaattagattttttgcttccagcatgacatgctctttaaatggtctaaagagaaatctacattaaacacctacggaatgttcatctccaccttcttttggtgctttccatgttgtattaattagatctaatcatgtgcaacaaaatccaacattggttctccaacaatgaaaaaggaggggcagatgtgccaatgtttgtggtgttggtaggtgaaactaaacacctacggaatgttcatctccaccttcttttggtgctttccatgttgtattaattagatctaatcatgtgcaacaaaatccaacattggttctccaacaatgaaaaaggaggggcagatgtgccaatgtttgtggtgttggtaggtgaaacaaaggcccataagaaaggtatagaaaactgtggacatgtttgcatcatcttaattggcccataagcgaggaatttgctccaataagcccatagcaattaagcagacaccaattgaattgagtagac

SEQ ID NO: 1039 - DNA, 3950 bp, Oryza sativa
gaacttaacaaaaccagaggcatatttcaaggtcgcgtgcataccatccaccatgctcttcaggtgcttgggtttcgccacacaaacattatggtgcttacatgctgttaactttcctttcgatccgatggcatgaaaaattcagcaccagtaatcggtggtaaacagcagtcacaccggcacaagacaggcaagatgaaactcaaaacaatcgccatcctcaatattaattaatttgttcatttccattctgcttgcattacaccataatatggaacaaaatgaacagaaaagtcattggtcagacactcagacctatagtacaattgttgcactcaagaaaacgcctaaaactgctaaccaattaaataagaagaataaaatataacgaactgaaattctacccgggagcgctgatgccttcatgccgctggttttcagacttcatgatgttaagggagcagaaggaaacatagagtagccttgtctgatctataaactgagtgctttggtactttttaattagggctgaaaacgatgcctataaatgtgagttgtgacccaagatatgagatatatagaaaaatattaatacctgaagacgccaactattggaagacccttttgcattgcaatgtcacgtctcattagtaagacagctcgagcaccatcacttacttggctagcgtttcctatgggttaaaacaaacactaatcttgagaggtgaatacaactaatcaacagttgtgcctaacaaactttcattacacattaccagcagtaggggtgccatctttagagaatgcatgtttgagttttgactggactgccaatgaagtgcctggtctagatatattgactcaggactaaagtgtcttcaaatattctcagtaatacgcccagccttcaaattcagtagttttatttatggtgtaacatatatgctaggagtaaaatttttcatggttaaatgcatggtaattgtaatgttaagttggagtggcaatgttgagatcagccaaatggggaaaatgaacatcagtacccttcattggccatttgacattgagaagaatatgtgcaaaatatctggtcatatcaatcacacaaggaaaacagaaataccatatactgctacagtggtcagtcattatatttgtgttagatgtatttttcactaaataactaaatattgcatcttagagatactgcttttgctattgatccgaccactattttgttaatttcattgcattttaggcatggtatctcaattagcagaaaaagaaagatgttataacgcatcaatgagatcttctagagatgatatgatttttaattttgtactgatcatcatcaacatataaaatatattccccatcagttaaaattttccagactgctctattgatagaaccgcttagcaatttttaaatggtacgatacatagcttgcgtacgtagttcatgcacaggtaagtccaggcaatatcaatcaaatgcgcacaggaccaaatcaaggaaatactaagccaaacatcatggtaaaggagccaagaataccttgagctagcaaggtccgagcttcccttcgtgcatccctggcggtggacagtaagccgaggtggacaggtgaaaaaacagccaggagtcccacaggtcaggtgacctctgaaggagacaagggatatgttgattgtttctattattcatatgacaaatgttgaaaaaattcactcaaaggtaatattctaaatttggaggtaccgatgcaagaaaaaccactacttatgtggcataaaataaatttgtagaagctagaaggttaatttcagagcgaacaagatccgttcttgtaaacttgtactgatgcagtgatataaactctacgtccaatcaataatttaagtaacatgatggagaccatgtagatatcactcaaaatacaagacaagtatttcacaatagacaatcatatgcagacattcacgcacgacccaatcatccttttctaactttgcacaacgatagaagaaatgaaaggttttaagccatgataaataatcaaagctgtagaagcttccgttcaatgaagcatccatgtaactcaaaattatttatcatggagctaattagatagatgcatagaaggacagtaaacaagacttaagaaatgatgacatgtcattgcccaatgccctagacaggtctatgcaccttgttagcattttactaaacacatgcttgtattcataagggtactataagtataagtatatacattcatatgggtactataagatgtaatttaaggcatatatgtacattttcataatatatttaagaactccaaggcaagcattccatcaagcaggtcacaagcagtggcgacgtaaagccagttcccgtgtgttggccgggatgataatctattattctattgttcatcatgcctaaagcacaagggatgaagcaagcacaaaaggctaacattgtgctaagtactttacttatgttggtaattgcaagagatgagtagctatttaatgtgtagccatcctcaattagtgcacagattactcatgatgcaccaaaagttcagaaattcagagattactcatgatgcaccacaaattcaaagattactcatggtgcactaaaaattcagaaatggtcgtgagtttgaatgcatttgtgcataccgggtcagcaagccagtgcatccggggcacgaagcccaccatggcagagagcgcactctgccacacggcgaaggcggcgtcggtggtgagcccctggatgggcctgaacctgttgttgaggctgtcctccgcgttgatcgcgaaccgcacccgcgagcaattggtggagggagcaagggggggcgggcgctcaccgtggcgaggcggcggagaggtcagggcggtggagggtgagggcgagggcgaagatggtggtgatggcggcgacggcgagcaggcaggcggtgaatctgccggggggcgacgtgtggtgggtggcggagggggaggtacccgcagcggccggagccgtaccacctcctgtcagcaagttccagccgtggcgtcgcccgcgtctcccgtcggccgtctcccccgccaaacgccgccgtcctcacgccacctgccgccgtcgcccgctccgtcagctcaccggtcagttccggtgatgacgggccggatccagccacggaagggccagatccggcggcggcggatccgcagccacgcgccgcgaggccttcgcggcgcgctgtgccgcctccttgcgccggagacgagccgccgtcgggggttttggccccgccgccgccatcccagcgtccgcgtggtttccggcgccggcgagccggtaaaagaaggggtgggtgccgccgcccgggggctagggttcgcccccggtcgcccgcgcgtggacgacttcttcggtgttccctcatacaagaaggtctcggtcatcttctttgcctgcaggcatcggcgtcagcctccttgttcttcttcttcctcctcgggctcctccttcgcgtcaggcgcaatgagggcgcggtggagagcgatgggcggccagtgacgatggtgggcgctggcgcggcgttttttcgcggtagggagaggcgcgcggcacgatggtggtgcggactgcggaggaggagcgcgtcgattctgtgaaaaatccggcgcacgagtgcacgacggtgagggggcgagagagcgcgaggaggaaatgcgtgggagatgcgggagaaagaggagggaagagcgagacacaggacggtggatgcggcgtgatttcaccatttcaggtgcggggaggagaggagggggagaggtggggtaatctgaggcgttggattggatgattttagaccattggatatgtgatatgatgaatgatgagtgagtaaaaggatttgttgaactaatagg

SEQ ID NO: 1040 - DNA, 1544 bp, Oryza sativa
aattcttctatccatgacgaaggtgctcgtcacagaattgctatccagctggctagtgacaagcatcatccatgccacgtggctgccatacgtggaatccacgttggatgtgacgtggcagatgacgtgtactccacatttgtccaagccacgtggctgccagacgtggaatccacgttggatgtaacgtggcagatgacgtgtactccacatggcggatgacgtgtacgccagtatgctagagccacatggcagtcgtatttaaccccacgtgttggcatttcatatgtccacgtggcgttagcgtgcaacgccacgtggccaaatgtggcaacgccacatgttctcattttgaggcgccacgtgtctttatgacaggtgtccttacctgatacagccacgtgttaatatgttttgatgacacgtgtcaaacacattaaggattcaggtccactcatttgttctggcccaacccatttggccacacattttacatctagttgtggcccagtccactattagttctagaaaatttttagcattggcccatttggagcaacaattagaactttgcacacattacaaataggaccaacataaacattgaacacagataccaacttcattacaaatagccccaacatcaacattaacattgaacacagaaaccaacttcaccgatgatcccaaacttgtgagccagtgttgccatcacctccactggcagcagcagccatggcccgccgagctcgacatcgacgatgttgccgaagtccttgctaacaacatcgatcctctgaaacacctgataatcaaacgaaaccaagtttcagattataccaacaccaaatttctgattctccaaatcagattcagctgaataataattcaggatcaattgtttttctgacctgcccgagggtgatggggaggagcctagcaacctgatagtacataaccatatgttagattattttttttatgcgctagataaacaacaagaaacaatctatagatacgacattagttttttaatgatagggctactttgcaacaccaatctgatgtccccataatatattgcactaacatatctcaatgtccccatccccaacccacctcatttcattggccaagcaaacaagcaaccgaactagaatgcataggagtttagcactaaaatttagacactaaagttatgatacgagtaacttcctatacatgcttcatttctacagactataggcatatagcatgaccgtaaagtgtggtgtaaagttatggacaccatttaaacatgcttcatttctacaaagtacatgcatacaacggttccaaaatttatatcaccagtggaacaatgtagcagcaacatcactaagtactataacactagagtggaacacacagcgcgctgcaccagtggcatcagaagacgaaaatttgtcgttattttggtaaacagagtaaatactaaatcaaaaggtattataacagatgagtaccaattctacaatatacattttaatctcaatggaaaacta

SEQ ID NO: 1041 - DNA, 5526 bp, Oryza sativa
gttggacttcaccggtggtggcaggagcatctccatgaatgtatagaggaattcagcagtggtggcgttgatttctgggagtgaaggaagagaaacggtgtcgatttgtggttgggggggggggtgggtggtgtccttttttttttcttttttcgtgctaggaacatggatatttgggggaagttccgatgcatctggaaggtaggtggagggagggatataatgtcatgtgtggcttacaggtgggccaaggctatgaatgtaaatttttcttatgttagagctattttgcatttttatttaggaaaagtatgttttagcaaaatttatagactggtttaaaaaatacaaagggctaaaattttaaatcatcatatcccatccaaaacaattgtgcattgtagagtagtatccattcctcgtgcctttaggcagcattcttcaccgtctcggagctcatgattacagtgtaaggcattctattgtcaaagattgggttgattagatttgatgtctcgacaagatcatgtatatcccacgcgacgcttagctcatgtcaagttttgatttaaaactatatgccgatttgagacacgtcgtaggacttgattcatcgttttttccatgtttaattctaattgtgttctactcggccctctactcccctcttcctctctctacctaaggtttggaaatgccgcaatatccctccaccattgagcaaccacctcctcttttcttttacgctattgccttactcgaccattttgcccaccttgctagctccatatcttgaatcaactagctcgccttttctttacttctcgatcgcagtcaatgtggcaaaatgacgatgggcaagtgaaaacatgtagataatggatgttacatccaatacgagagaaaattcttccagaaaatcttagtgtgttaaagcatgtagataagaaaaaaaatctattttcgaacaacctatgtgaagaaaatattttcttaaagggcttagatcattgttggtatttcttacgatcacagataagatccgcaagcgcacggatataccgatgtagcacttcccctacagagtattcgaagggtattgaatccaagggaacgtgtgtggtcagatcttcctccgggttatccaaagacactaaacagtgtctacggaaagcttaattttaatcctaacgcaatacttcgggcactggccacccgctcttcctagatgtcgctctactacgtacccggacagggaggacttaagtgctcttgagtgctgtcaccacctctacacctacctcaaacgtactgtgggatgcgcagcaaccactgtagattaattacccagacaccgcgtctacgcaattaataactactctagtgccgatcaaacactaaagcaaccactataaataaataaactatagtgatcaatgatcccgtatgctatttaggaactaaccaagaaataattctcacgagataaatctaaattactcaggaagaatattatattgaattcagagtaataaacagaataaaataaatgagagaagattatcgacaactccagaattcttccgacttcttctactctactctcttcctattctagtatgcaatatagtacaatagagcctcttataattcagctcaagcttggaagtgtgtgtcgaagtgagtaaagtgaagtctttatatagaggtaggtatgacggttagcgaaggggaaatgtccgaactgccccgcaaccgccatcaaggagtgatctcgaatgtccatgccaaaacctgagatcaacggtgatcaccagggttctgccgaacttgggccatgccccccaggcctggcctttggcccatgtcctcccctgatcctcctctatccattcctcggtattttgggctgattctctggtattttgatgaagttcacaacccatccttgtgttgatacaagattctcctcactttagtctagatttcctcccaacttcggggtttatcacctgcatacaaatatacaccaacacttgtggaatatgtgagattaagcacctatcactatgttggatgttttattatctggacttttatgcagatgttggcggtatagaatcaaaatttaacagccgccaacaaaaccccccacacttagttctttgctcatccctgagtaaaggttagtgtagaatgaatttcttcaagatatgaatcaggcatataaaatcatttacaaccatacatgtacctgtgaactttatcaatggctatcttaccatcttgagcaattgataaatggaacgatctcgattcgattccctcttgcttctgtgccagactcatgggatttttatgaattttcgcaaactagctcttttcctcgtattgactttctctcttatctctcaaggatgtatattttctttttggatcctcaccaaggcaaaatgtaccagaatttatccctattctaaggctgatatgtggagctcggtagggacaaattgtgacatacctgcatcatatatattacaaagccaaaaatacggactcaagaagatcatcagtcatactcctagatcaagggtatttatttgtggtagaaaatggaaaagtacatttttttgtggaatggtggaataaagaaatgattctcccttttttcctatactttctcctcctttttgttttcttggcatgaatatggaaggggcatggctatatttcttttcatcatgctcaatgttttgagagcacgctttatttcctctcttttttttttcttttccatagccacgcctttccctccttttctcattttctttttgccaagacccccccttttttttctaggagaagaaagcataatctaatgtaggagtttatttgaatggaatttttgtggaaagccaacttccagtgtagaagcttagcttaattatgtatgtggaaacggaagtggaaatgaccccttgattatgagagtatgtaagatatctagcacgagtcacacaaatttgacaaagctcaatataatgtcaagcagtcatacagataataaggtttatcaaagatatatttgcatatgtccttggtaggtataaaatgaagtcaattggaggaacgagctttttaaaacaattttatttttgaaaacagattcccaagagtcataacaaaagttgcaaaaattcctttcaactttaatcatctcacataaagcaattacttagatgtataagggttcctaaacatggatggttgttcacaagcacaagttcagctgagaataatgaatatacaagaccaaccatatgaagattttcattagttggaaattttatttttttaattatgcttgaaccaattgttttctgaattttcagctctagtactataccatggtggagatatatagataaaagacgtgctcacctacttacctgtaaaaattgagagggattggggccagttttggttcggccgaaccactctggtgcccattccctctgcaattttctgcagagttgtggtggttcggccgaaccactctggtgcccattccctttgcaattttctgcagagttcaatgtcttccaggtgttcagagattcagcaattttcagagtatgcgcacgtcagaagctgggatatcttccccacacttattcaaaacctgaactttattaaatatgaaacaaaaaccaaacttggcatgcattggggttaacaccaatgagccacattatttatagcaagtgcttacatgattggaaaaataaaaaccaagcacctactactactttattcgtgggggagggtacatctaattagcataatacttattctccttccccatctctatgaatgcacgcttgattttagcgcacaaaccacgactaagggtatcaaaattatttctaagttcagcgagttctacccctagctccgcgttgcgatccctaagctctatgttctccttgcggagtttctttacttgcgcggcgagcttatagaccgagggctcctgtgattttacttcatcttcttggaattagccgtccgcccttataattggagggggcgtcaaatgacgcttcaccttcataggtggagggctacgggattccgctgccccctccttctccgatgtcgtcaaaggccggagcaaacccttgccatacccaccgccgggagttaacactccttgaatgcgaaaccgatcctccttcggagtggatggagtagcggtggtgtagtgtacttgtggagcacctcatctcctgcttttgtgaacatggtgcccacatatcgctcggcgggaggcggagcggccttctcatcatcttggaaaaggcgtcacgcctttaaaagaccgagctcgcccgttgtcgtccgtcacacaggcgaatcccctcggattttggtcttcgtaacatggtgaggggagagggatcgcactgccgaacggagccaatgggggttcggccgaacccctggttctgccgaaccagggagctcgccaacgggctccagattcgcaggggagcccggcactgtcgcaaggggctgcgcccacagtgcattcaccctttccatggtgtagtgttccaccgggatcaattgattcgccggtgtcggctctccgtcaaggttgtatgtggagttggaggaagagccgatgaatgggatcaaagatttgccagctattggtgaattggaggtgatggagcaagggaattaagataagatggagaggaagcttgcaaaagtgggggagaaaaggaagaatatgtattctggaatgatacgactgatctaccttcgaatgcgcatcacaacggattaaagacgagagggggagactgaagttcaaaatcgaggctgattgggcgccgccctggttcggctgaaccctagtggttccggttggccaccaattcttttcctagtgtttacacggattttggctcgtgtcctaaatataatttgttaaattataaactgatgtattatctcaaatatagtgcgtacaaaatatatataataagaattttatcgagagacagatggtgaagtaatttaattaaatagcggccacgaaataaatggccatgaaataaaatgtaattcacttatattggacaaaaataatttttggcttaaaataggaatgcatatgcgcgttccacatatgtagcgtgaacaaatattttccatgcgcttttcgtcggaccggcgaacgctaatacttagctttctcgttgtatccgcatacgaaatttggcctgaaacatatggccattaagtgggattttctcactgacccgaaatagtcacgccccgaatattttcagaaaaggcatgcccaccatataaaatagcatacaaaaattaaaatgtaagccaaaatagatgtttatctggctagtgaaaaatcgtgccccaaatagtcgcgacttaaaataaaaatgcatgccacgtgcacgccgctataatggcgtggatatatatacacgc

SEQ ID NO: 1042 - DNA, 17874 bp, Oryza sativa
aaaagtgtttggtaggtttcgagctccagttctgaaaattaaaaaaaaaaaaaaagaaaaaaactccccaatcgcaactgctggccgtcgccgtccccgtgtgtgggcaggccgcctcttgctgcgcgccgcccgcgccgaaagtccgcccgccggccgagcgccactcgcgctgtccccgatgtcgcccgacgactgccgccgtccgtccgccaaccgcatgccgtccccgatgccgcccgccgtcaacctcgccgccaaccgcgcgccgaccgcgcaccaacccaccgcacgccgcccaccacgtgctgctcgccgtgcgccggccgcggtcgaccccgccgcccgccgtgcgccagccgcggtcgacctcgccgccaaccgcgcgccggccgccgtcgagctcgtcggagtggagagtgagggtgacggcctgatgggagggagagagagggggtgagagatgagttaggggtagttgagtggcaattttgtgtaaatatgtaaaaaatttaaagggtagtgggtcttttggtttggagtggagttgtggagcagcaaaaacccagctccacccccgtagtacaaatttgtggagtagctctgccaactcaactcccaaaaatggaggatctggactgtttggcatagctcctgctccaggtaagttggagttaggagcttgagctgtgccaaacggggcctgagtaaaaccatttgttcaactatagggtagattcatcaactcactcttacacctacattactcattcatcaaatccaacggctcatatatctctaccccaattgaacgatcaagatcagctccgcctctcttccgcatgccgatcgctcgtcacggctccgtttcggcgtctcccctgccaaccccccgcgcacttacgccctcacccctccccaccacatcttcaacccccaactcacgcatcgcccccctcctctctcctggactccccatcgtgcgccgttaggtcgccgtcgccgcatgccgctcctctccccactcacgggaggaactctctccaaaccctaaccctaacctcctctctctccacgaatacgcgctgcacgctgttgcgcgctcccctccccactcgccggttcctccgcgtctcacctgatctccacctcgaaatccgccgccggagcagcgttaggtcgtcgccctcggtggctcatgtcgcactgtcgcccaccttcgcgccgccaccggtctcctccgcacggtttgttttttcttccgttgtccagtttcaatctcttctcccttctagttcattatttttctttggcctgattgattttttttaacaaactggccaatttgattttggctgtgatataccagcaaggtatgtttttgaacatgcacatgatgttttctattgaatgctgcagaaacagtccgccaccctgttcgtcaagcaattttgttatcgatggttggaatgtattacgccaatgtgttagtgccaactaatttttgggtttctgcctgaaatgctaacatactattcgatgcattcatgatagtctggggacaaaaggaaaaaaattatctcgtgctttaggggtcaaaataggacatgtgatatttggttgttcacaaacagctagcccagcattaatccactgatggtctgcttgctgaatttatttctaagtaattagcaatctttatttaagcctgaatgatttgtactaaaaatttccccttgtttttcatggtatcacaatagattggaacaggataatcttctgctcaagaaaacaccaatgttggagatgatcacaattgtcctccactgctcttgatcattcaagcaggcatgtactttcttttgcagatgggtacacattattgtgttatgcatttagctaattgattaaaatatcctgtgattttacaggcatgttcttttgaattaccctgtctttcctgtaattaatttatgcagtatgctaactgattagcacgatctcatgaatactacaattgcaggcacatatacatacatatacaaaaagatatgccatggtgtggatggaaatcgtggaggaattctgcatctgcactctattgacagagttctacttatataaacattgcaagggatgcatctttcggtaattcaccattgataggcattgtactaaactactaatactataatctgcaggtaatatatatccatctattttttcccttcaaatctactagacttcaacatacaattttctcaaccccagatatgtgggtatatgcagctgatttgcaatcaccaaccccagatattttaacccttatagcttaactttgaagtccatatgttaggcgcagagtggtaaagtggtttatgtctattttgatcgagcagtttggcgagcggagacgtggaattatacaatggtagttcaggagaattaacataggcataggtactattttttactgatagatgtattttgaaatcttcatggattatggagcggaacagctaaactttgctctgctgtaacttagacccaattgtgcagtgttcatggtatgtccgacgttgcttactttgatatgcttatgctcttagtggaatcactaataaacatcgccggatatgtgtccttttagatatgcttgtgtgtttgcttcctggagatttggttgggttggaacaaaatgttatttatttgctttagaatgcagtgccctatgtattacgaaattatacttcctttaattgagtctaatggcttagaatccctataatattgtttaattgtgtggagaacatgaccaaaaatatataaaatggacatataatatactgctgcttccctgtatttcttgggagattctttttcaagatcatcactgatcagatgctacgagtctaggaatctttaaagtttgattttctttttggcatgtatggatgtatattttggtttaatcttgccataatttatttatttattactactaggtcaggagataaaattctccttcaaagctcattatacaatacaatgttacaataaggataacataaccttatccaaacttgtgattagtcaatgcttaattaattacatcattttgagtcatcgtgggtgaaacatggtacatttgtgttaaacatattattgatagcacttccctttgatgcacatgtaggcagctcttaccctgaattcatataattggattagctgaactcagtgcctccaatgatgattgaataggaagggaactaactagggtagtattgttttgtgcttgagatcctggttgcggaactgagatgtactattgacttgagtcatatttagttttttgctatataatgttgatttttttactcatttttgcagaacgaaggatggcgcttgaccgtggatgaggagcggatgtcctgctcaatgagaactactgtggatgcagtttttctttcagttttggtgacttcagtgctgctattttatgagattttccattgtttgtgatcagtaagcaagcatgtactaatcagttggtggcactgagcatggctctttctttttagatcagactagcaaaactgcccgtgtgctgcaacgggtgaaaaattccaatgacaatatatgtttttcataaataaccatgtgaataataatgtttgtgttgattgttgtagctaagacatatcataaggaaaaatagaacatcttccattctttgcccaaaagaattggattattcatgtgacagcatacatataggccatgtttagattccaacttttttttttaaacttccaacttttccgtcacatcgaacttttctacacacacaagtttccaacttttccgtcacatcattctaatttcaaccaaacttccaattttatcggtggatctaaacacagccataatctaaaatactctttcaatcctattcttgcaataaaaaatatgattaatcaaaatcctacactgccttgcatggtaaagtctaaaaaaaatagagccaccgtgcactcttctctaaatatcaatttaaaacatattttccttttaatattatttccatataatatgttataaagaatagtagctatagtagtatgataatttataggagaatagatgagaaaacaaaagccgtgaaggagatggaaaaaatcgatggatcctatcagacataaacgtccatcaatttgatcttgtgctcataaaaaaaaggcccaaacaagacttgtcttagttccagatgttagaacattcaaccaacgctttgaaaaaaccaaaccgacatggtagattatggacgatacaaatgtcacgaatctttttcatggaatcagatgtattttttctaaattcggacttttttttgcattgcacagtgccgaaccagtttttttcttttaataaacagtggtgtttttctcgcgttgagtcacatggttttttcaaagctgttcttttataaatagtgatgtttttcacgcgtaatcatacggatttctcacgaaaaggtggttttttcctcgcattgagtcggatggttttattatcttttttataaaggtgttttactcatttttataagggcttttttttctcgcgcggtttatataaacttcgacatctttaggtggattttaatatatgataatttgaatgaataaaaaaagtaattcgaaaggagaaaattgaattcgcttttacatttccaaatctactttgacggtttttatggaatcaggcattttttttaacgttgcacaggaactttttttttccattaacctttttttggaggaccggcttatacatactatttttaagaatctaatagaaatatttttttcctttttttaggaagatggaaacccttttttcacacttttttttaatcggacagaaaaaattcgcgcttgcttttttttggcacggacgccgggatattttttttaatcggacggaaatatttttgagggcagctagcccacgggatactttggaaaagtgaagtcacgggacaatttttacgtatgatcaattagcgtacaacatgttatacctaaggtactaggtatcacaagtatcaggtaccaggtgtcgaaggtatcaggtaccaggtatcacatgtaccaagtgccaggtatcacaggtaccaggtgccaggtatcaggtatcacgtgtcacaggtattaggtaccagatgtcacaggtatcaggtaccaggtatcacatgtaccaagtgccagatatcacaggtaccaggtgccaggtattaggtatcatgtgtcacaggtatcaggtaccaggtatcacagatatcaggtagcagctgtcacaggtaccaggtaccatgcaactggtaccatactggtatcagcatagcggcggaaaagcgaacaccagtcaaaaagagaaaaaaaataaaatctatgttacataatatcattgtgtcaattaatttacacgacatactaaatctcaatgtgtctcactcaagaaaagaaacaaagcaagaaaaggagaaaacgaaaaattaaaaatgaccgtggtatatagaagatgtaagtcaagcctacagaggtgcatgcccaaattgattcacatggcctaagtgcccaaccaatatacctagagttcttgtgctgcaggaagaacacatacaagtggatgtgttgtggagtatagacctgccacgtagtaggaaattgtgtcacatgcgtgtacaattattttgatggaaataacgtagaccttttaaggcatcccgttcccgttatctagattttctgatattttttcacactcttttcgcctttttttagcccttgttttttgggtacagaaatctttctttcctttttaatggaaaatggaaatcctttcttgcatttcctctttcaatcggacagaaaaagtttttcgcactttttttttggcgcacatatgacggaaatttctctaattttttaagtagtataatagatagataatagatagatatagatatagataaggatagagatttttttaataggacagaaaaaaattcgcgcttgctttttttttggcacggacgacaggatattttttttaatcggacggaaatattttttcacacttttttcaccctttttttagcccttgttttttccgtacagaaatatttctttatttttttaacggaaaacggaaatccttttttgcacttcctttttcaatcggacagaaaaagtttttcacacttttttcggcgcacggacgacggaaatttctctaattttttaagtagtacagatatggtgtttcctgcatgatccttagctgccaatcccctgttgcggtggctatagatcactgcaacgatcccatttcccaccttcaacagcgacgccgatctagagctccgtcaaccctggccggtcatttccagttatgaactttctcatgccatggctaatcatcaacctatcattgtttgcaatttgctggttgtaaagagatggaagatcatttgtgctggaatatcattttttggctatgaagattcatcatacaccatcaggtgctatgctgactactatttgtgatagaagaagacattgatgtggggggaaacagagaagtcctgaatcaaggaggtaggaggtggagcaaatctattttggagctaggcatgtcttttttttttaatcagatggccaagtcacctaggatgagaggagctcatactatgcgagtttaatgttgactgctcaaatttatctattaccacttttaggattaaaacattagtattgtgaaggaaaacaagaaatgatatttatttcatgccattcttttatatccgtttacaaccttacatgaagctaaaaaaaaacatggtttatattatcaattacactatagcgtttagcacggtgaattgtttggtttgtattatcaattacaccgtagcgtttagcacgggtatattactagttcctgctaaaatgcctctgcacactactacataacgcatcttgtcatgccttattaatccttaactaacatgctatcagtagctttgaatttgctattgtgctattctattttttttcttttttaaaacaatcctgaaacattggttttcacctctgagaaagtccctttcggaagtatataatatttgcttatgttgtcttttatgtaagatgatggctctcctagttgatttgtattagcctgaatatgagtaggctaataattagctatagatattattattttaatatatagttccaacggtatggctttgtgaattcctgcctatgtagctactgtccaggtctcggcggaacccagagcctagtcggtttgtgttggcaacgggtaatactgcccgtgtgcacatatcttaactaattaaaagattggtatttttccaatcgtcacctcaattttcgttcatcccttcgtccgcaagatgcgatagccacgactccgcttcttccgtttattatccgattgtatttaggtagggcaatcggagtgggaaatccgccgcacggccttgcggggaagaagaaaggaattggggaagagggaataaatcagattgaaatttcccccaaaatttccaaaattagtaaccctaattcgattgtatgaccgaatgcatgaaaacccaaatcaaattcaaatcttatcttatcttaatctaatttttcgtccgtcccccagaaaagatcacagttgaaatttcatcacacaaatagacggagaaaggaaaaactgaagcatatatacacaaatatatcccaaaattgccatgcaactagatcgaaggagaaggtgccacagaaccgcagccggctcccttcccgttggatccggcggaggggagggtgccgccgccgctgggacgccggtgggccgccgtcggctcccctccctcctcccgctggatccggcggagggaagggcaccgcccctgtccgccgcctcccctcccgccggaagggagggcgctgccgcccgctacggtcgagccctcccacggccccatggcgagggagagaaggcgagaggcggagagacgccgccgcccgtcgccgctcgcagaaggagcgccgccgacgccgaggagtagcttgccggccgctgctccctagcccgtcgtagaccgctgctcgccaggcagccttggcatggcgtcgcatgtagagggagagggagagaggaggcgccatggtggggtcgtaggtagagggagagcatggctgagccgctggctcggaggaagggcaccgccggctctagggagcggggcatttaactatttgccacttttagatgtggcaattaactatttgctacacctatctcaatgacatgtgggtccacatgtgtctatgatatatgggtccaatggcaaatagttaattgacacatctaaaagtggtatatagttcaatatctcctagggagcggcgcctccgtggggagagaaagggacggagacggagggctgaggagagaagaagaaaaagagaagataagagaaaaggatgagcggtggaggagagaaaaatgaggagattagaatgggtggaagaatcaaggcgcaccgtgcacgacgctctctctcggtctctcctctctctctccccgagcggttattgctaactaagctgtcaacagattttagtggcctgcatcatgcgatttttttggtcgtcacatattctttgagatgtgtgcttggatcggcccaagtgtggcaaggtgacgtgggctctgtaggggcagagtcaattgggctccgcaagactgttcaattttgatttttgtgcgtcccttataaatttaccatttttaaacgttattaaaaaatggcactaaaaaatataaaaataccactagaattatcattcgagtgacatccttgtaaaaattaaaaaaccgatagcaaatttacaaatgcctcttaagaaaaccatttataacttagtactttatttataaaagcggtatatcttatcttaactacttaaaaaaataataatttttcgttcgccacctaattttttcgttcgtaaatccatttttcgaccgtacgcacatttgtgttagcgttcgtccttcgttcctttctcgcaatccgatttgagcgatgcaaccagccaaggtgctactaaaacgaagggaaaaacaaggatggattcgatctggacccagaatcggaccagtaaccacaataaaatcagcttgaatggaaccatgagattgcaatacaataaaatcgatcaatcacctggtactttgcatcggcactgggcactggccacctgctcgtcgccacgccttctccacgatgcctccggcccctatgtcttcgtcgtcgagacgcgccacacacgacatcacgagcagcgtcctcaccatcagagtgcctgcctcagtccccgccgccacgtcgcacgcgtcgtccgctctggggatctggctccagatacccagagcgaaataccccttttacaaaacataattaattattttacctgcactaattaattattttaattagtgtgggttgtcgttgaggcacgccacgcacgacatcacgagcagcacccttgccatcagagcgcctgcctcagtcgccgccgccgccacgtcgcacgtgtcgtccgctctgggtatctggctcccgtctccccgataagctggtctcccacctccttctcttacaccgtggcatcagctaactccgcatggaagctttgccgtcatcactccaccaagtcgccctcacatctctcgcttagaccagtgcaacgtgcaacacgagctagctggcttcgctttggtcgtgggtctccatcgtcgccggggctcactagagacacgaacgacatgagtacgtcgctcatggctgtgttgtgatgtcattgctgttgctccgggtggtcgccatcatggactcatggttcactcacttgaatcagaaaagtaagggctaatgggcctttttttttttgacaacttctttaagggctcatatcatgaaaaactaaaatcctaataacctaatatttttgtatttgttatatttttattttacccgttgcatctatttattaaaatgtttaaataataaaaaaattctcgatcggtcccctcttctctgtttttctctttgttcctgtctgctctttttttttaaaattttttttcccctcactgtctaatcgtctttcattttttttcatgtctactaattaatatttgacttcaaatataatttgtaactcaaaacaatactcactctcacaaaaataaaaagattgatttttacgatttgttaaactccacacattttatttcagataacatacacaggtatattcccatagtttcttgtggtgaaaccagtcaatctggattcaaatctttgatttgacacgtgtgcttgaggcttccgtggtgacttcgtcaatctcaatgctcgtgttgtgagagcgtttatgtgtttcttaaaaaaatatatattctcgaaattcaaagtacatcgagtacaaaaattccactcgtattttatcagacttacctactgtggagattatgggtaccccatacccacacggcatggttatccgactagtaataggggataacatatatgtatggaatatgtaacagatcatgacttgggtattacgttttcttttatattatggagcggcctaaagtcctgatttgataatattgtaaagtagatttaggaagccgataccgtgttggttaaggtttctatcttgtaatcctgccccccaccctatataaggtgggcaggaggccctctagggggcatgagacaacctgatcgtcagatcaatacacacccggcggattcaaatccccaaacaggagtagggtattacctctcattgagagggcctgaacctgtctaaatcctttgtctctgcatccatccacttttaggtctcgtgcgctaccccgttttattattgccgaattcatgtttcgacagttggcgcgccaggtaggggatgcgtcgaattacctgtcgaaaagtgcgatggaatcaacttcagaagaagcccggagatcaatctcatcaatttcgacggctcaaatctttaatcgggtttatcgttccaatctaatttttattagattgatttttaatcgttgtttgatttcctgatattttgatgcatttcatatactcgatgagatcgagacacggccatcatcgtcgcctgctcgggtgcccttgccgtgtccgagtgctcctctcttcctttccttgcagttggacgtgttgctggagtagcacaggccgccaggagcaaattaaacacacgcatctgttgatttattaatcaacacgtatatgcagactggaattaatctactaattgctttctattgcatgtacacatgtgccgttcgattcctgtttccatgtatgacggttgatgtgctccgccggctacctccgataatggcgtcataccgaaagaacatcgagttagcagttagttgccggggcttatacatgttgcatggcgcgtcgccggctatcacccacgatccagcctcactgctcgacttgagtttttcgtttcaatttgttatcaataatcaatatatattagattgatttctaaactcagattaatttcttgctattttttgttgttgttcgcatataattacgcggcactactgaggcgaacgatgttggtcatggactcaaggcatctcagctttccggtcaatcggccgcgagtccactccgccggcttgtcctcgccaccgccattgctgatatcaacaacgacttcaccgccggcttgcctccatcgccgccgactggtgtctccgcctacacggctggcctattatgccgccgttgttgggcgtctacgacttcaccgccggcccgcctccgtcgccgccgagtggtgcctccgcctacacggctggcctattatgccgccgctgttgggcgtctacgacttcaccgccggcttgccaccgtcacggccgactggtgtctccgcctacacggctggcctattatgccgccgctgttgggcgtctacgacttcaccgccggcctgcctccgtcgccgccgagtggtgcctccgcctacacggctggcctattatgccgccgctgttgggcgtctacgacttcaccgccggcctgcctccgtcgccgccgagtggtgcctccgcctacacggctggcctattatgccgccgctgttgggcgtctacgacttcaccgccggcctgcctccgtcgccgccgagtggtgcctccgcctacacggctggcctattatgccgccgctgttgggcgtctacgacttcaccgccggcctgcctccgtcgccgccgagtggtgtcttcattgttattgatggacgactttgttcccacattggccacttctgccatcaccaaggggaatattacaaagctaagtcatcatttattttattctttatatgatatttttccttttcctctgcctcactacaccaattggtcttccattgagtagtgagtcgggggctacagatgttatatcatatttttcataatatttatcttgattgcttgcgacataatctgagtacaaaagtacctatcgagttatggagttctatcttcctatgctttccgtttggtttgccaatggatggttgcctttgagccgattcctagcacccgggggctcgttggatggaccgagtaacgcaaggtgctaagtattattcggaataaatcaaaagcatagagataagataaatttattttctgctcttaataattgcaaaagtacctgagtagtaaattctaatccgtgaaactttgttccattaatgacgaactcatgtcactcatatgcatgtttgggaagtgcctaggccgactcccgatgcttggggactatgactagtcgggcagagtgtttaaacgtaaggagtcatctgctcgaggaaatcacaattgacaagagaagaaatacatatttataaacattttaaaatgcttgattttttctcgagtattatatttatatcagatactactcatcctatatgtttgttctgcaggatccagatccagatatgcataaaagagattcatggctttaagcttatctcttacgctccaggaatggatcagtcagaacatcatcaccggctcgcctcgaccgcggcttgccttcgccgctgccgactggtgtttccgcctgcacggctggcctttatgccgccgttgttgggcgtctacgtcttcaccgaccggcttgccttcgccgctgccgactggtgtttccgcctgcacggctggcctttatgccgccgttgttgggcgtctacgtcttcaccgaccggcttgccttcgtcgccgccgactggtgtttccgcctgcacggctggcctattatgccgccgttgttgggcgtctacgtcttcaccgaccggcttgccttcgccgccgccgactggtgtttccgcctgcacggctggcctattatgccgccgttgttgggcgtctacatcttcactgaccggcttgccttcgccgccgccgactggtgtttccgcctgcacggctggcctttatgccgccgttgttgggcgtctacgtcttcaccgaccggtttgccttcgccgctgccgactggtgtttccgcctgcacggctggcctttatgccgccgttgttgggcgtctacgtcttcaccgaccggccgcctcgtccgccgccgactggtacttccgcctgcacggctgacttattatgccaccgttgttgggcgtctacgtcttcaccgaccggccgcctcgaccgccgccgactggtgtcaccgcctgcacggctggcctgttataacgccagctgatgctatcttcttcacggctggctacatcgctgtcactactaataggcatcagtatcttcaacacaagctgtctacgtctgctgctgactagtgccctcacctctacgtctggtttagacagctaccactactgatgaacatcatcgtcttccgtcgccgactggttatgctgccgccgactagtgcttttatcttcacaactgcgcgtcttcactaccagtttgcttctgtcacttcatcacggcaacacaactttgtcatcatggtggagcgacttcatctttattatcttcggtaccagcaaactctattgctgctacttcgcaagttttgctacttcaccaaccacgacgtctttgtgagcttcgacatctcggcatgcgatgccatgttattttactacaacaagaggctctccaacattcatgatttctacttggacatcttcaacacatatcttcaatcaagcaataactattcgacgacaagaggctacagttctcgactctatgttcagttgtttcccaactaatcaaagagtcgggggctacacaaatacaaggctcaaaatttgacaaattttatgtcaagctgaagaaatcaattcatcaacccacgagtcaactccaggagtcattatcttcatctttgcttcggagcagacattctacttcaacaacttcaaatatttcggtttggacgagttggacaacaacatcaactctcctccaagtgaagcatctacaacagctataacattaatttgctggattattgtcactgacatcatcaccagcacctctgcttcatcgaccctgacatctccgctgttgctaatggatgattatgttttcgccgacttattatttcaccttcacggttgacctactatgcaaatgctgatgagcgtctttgtcattatcattggttgctacactgctattggctggatcaccgacatcgtcatcttcatcatgtcggttgcgtttgtagtcgtcaactacacaactttatcgctgagcgccttcatattcattgctggctgacttgactgccgccgactggtttcttcgcctccgtggctatgcgacttcagtacttttgattggtatcactatcttcactaccaccaatatttttgccacctctggtgggcaatattctctctatattggttgtcttgtctctatgccaactgcgtcagctaccatcaatgaacaattgtgactacgtgctcaggggcttactagctcaaatacaagtattatatctttaatttggatttgctccggatacatgcaacatgaattcatgatcatgggtctattttatatgctcaaagactggactatttattattccccgtaagggttatcaactgaatacttgcgccagtcgggattcaattgttacatctattttggagtatcccataagggataaccactcagatcagaagctattcatatgagctacgcttggtctatattacccggaagatttattactcgggagcatgttatatgcgtcatcctttaaagggtgtcgaaggcatatgttttggcctaggcctaatatgtctgcagcccatactttcaggtgtggcctgtcacgttcttttagggacttaggcactttttgcttaggccaaagtgcgcgtgatcaagtgcccaataccttaaaatccttttataccgcagttacttaactttttaggagttggtacaatgcatcttaaaaggtgtcaaacagtaaagctttatatagctgtcccgctgacttttttatatataagtcaaggtgctgtttgggtttttaagcaattgattggatacaatatcattgcttttcgccacgtaagtgtgcatttttattgaccaatattatggcttaggctgattatatattgtggtcattttctaggcggttggtaaatcctttatgagtttatttactcggattttacaccacatatgccatatatttccaggtgtggtgaaaccatgtgtcttctagggacttaagcacatctgttaaagcagtgtgcgcatggcgtatgcccaatactttggaaatttctttattcacaatatacaagcttctttatagctattttgctatatcactcatcatattttacaaagcagttggtatatcactcggatcatgttatttggaggattcacaccgcatatgctatatattgatatcaagtcacttggttgattacgattatcaaaaccactcggttggttggattatttattccttgactatatgcttggtttgttcaattaaccacattgtcgggggctacacctattaggtgcatctagtcggtgcacctgactttattttccagccctccacagtcttcagatttggtaaaagtactcgggagatcatggcaaagatgattgaagcactcggctttggaataatctagttcgggagaagattatctttttgactgtgaaggtctcaggggctactgtggagattatgggtaccccatacccacacggcatggttatccgactagtaataggggataacatatatgtatggaatatgtaacagatcatgacttgggtattacgttttcttttatattatggagcggcctaaagtcctgatttgataatattgtaaagtagatttaggaagccgataccgtgttggttaaggtttctatcttgtaatcctgccccccaccctatataaggtgggcaggaggccctctagggggcatgagacaacctgatcgtcagatcaatacacacccggcggattcaaatccccaaacaggagtagggtattacctctcattgagagggcctgaacctgtctaaatcctttgtctctgcatccatccacttttaggtctcgtgcgctaccccgttttattattgccgaattcatgtttcgacacctacctaaaaaataaatatttccgttcgtcatacaaattttcatccgttgccaattgggcaaagacaatcgcattgttcatccatccattttctcccaagctacaaattatccaaactaaacaccatatatattccgcaaatatagagcagattatttatctaaaaacaaataattttttagcagattagttatctaaaccaaacaacactttttgggtcactgtacacatcccgcaatcacccggtgcaacgcacggacacttttgctagtctaacctaacataacctacttacaaaatcttaatcttaactgtaattttctgctcgtcacttgtccatttcgtccgtgtgtaatttcgttcgtctgtccgcgagatcgagagaccacgcgtcgctcccgtcccgcacgcacgtacagaagaacaaatccaatccatatgagccaagaaatatgaacggaaatagagaaactgaatcacaaaatcacaaatacaacaacaatgaatcaaatatccaaaaaactaaatccgaagaactaaatcaccggtgtcactgctcatcggaggccaagcacgcccatgccctgaggctgtggcggcttggcaggcgcaccgccacgtgccgcgaggagggtgctgccacagagccacttctagagaagaggatgatgccaccgagaatagggcgtcgcccgccagggaaggagctccgctagggaaggcgccgtgcgagggcgccatgagtcgtggcagcgggggagggggagcaggagcagtggcgctgccggcaggggtgggacagtgtgaccggaaaagttgccggtgggaaggagctccgctggccgtggggagggcgccgcggctgaagtgcccgctgcaaaggttagtgcgccgctcgccggggaaggcgtcatgcgagggcaccgtgggcccttgcgaaaggggagagggagtgggagcggcggcgcttctagtgtgggtgga

SEQ ID NO: 1043 - DNA, 13983 bp, Oryza sativa
tatttgtgatttttaattttttttaccatggactgctcatttgttgctctatgcaatgaactggacacagagttgctgttgcattttttttttggaacaattcacaaccctgttgtattatccatgtacaactaaatgtggtgttgacctgtagtttaggggttcagagtgaatgcacgtgcttaggccgttcaaagcctcacattataacactcacacaagctgaaaaaaatgggaggcaaaatcacacaaagctgaacaaaatgggggcaaaattacaataaccaccaagggtatatatgtccttttctctacaactaacaccgttagttgtggctgttaggaatgggggtacatggctgcttcagattcaaaaggtgggggtaaaagtgcaaaccctaaaaagtggaggtaaaacagcaattggcttcgaaagtgagggcacggatgcaattgccccaatatatatacctaaagcaatttgatgagtcttaattataaatgtaaatgggaatcaaatctcgggattatttttgataaattatttgaggcttactcagttttgaaggaattttaacgcataggaataggaaaaatgaagaaatagaaatacatgcacactttaactcataggaatttttcaagaagtttgaggggatgaaaaatttcctacgtttacaacttgtagaaaagaaatttttttcctttggttttcctatacttacattcctacaaacagaataatacttataggaatcaattaatccttcagaatccaaatccgcttctcccgttctctgcgactccacctcccgattacctacctcgcatgacagctgtgcgatgcgatcgatcagagaggatcgtagcagccgtgccctcccgggcagctgtccgttcgctcattttctgcaatggaccaatggcgcatccggcaaacacgactctcccctccctgtgcgtgtatgggagcgcagcagcggcggcacgcgggtgcgtcggccggtagggatgcaagtgggtagtcctgctacccgcttgctagttcatttcccacatggtagtacaaaatttagaaaaaaaaagaattagaagtgagataagtgggctaaaataacccgcttgcatccctatcggccggccaacagcgcatcacgcggggctacggcctgttggcaagttacacataagtattagcagggtatttaggtatgttttcaattttctattttaacagtaaattgctgtatcagattgtactgttgtattgtagtgagtgaaaagcattgatgttggtttgatcaatgagttaattcccaacagtaggagatctgacagctagtaaagaaatttgtttgtttccaacaaacaaggaagtatagtgagtggaccatttcagagtgtggagtgagaaaaggagtagttcaatgagttcgttgacaagagtaggagagtgagttgataggtatacaaactcaatactagcaacttgtgtcgtatcgtttgttaccaaagagagatttatgttgtgcagttgactcgagccaatacatacctagcaataagaaagtcaatataccatacctagcaataagaaagtcaatggcggccgtattctgaaatcgttggataagttattgggcttcctcttttgtacatggcgaagcggccgtctaatcgaatttactaggagacttgtatctcatgctaattattcactctttcaatgttgtctttaagacattgagctttcctatgtctgagaagagatgccatactaataggctggccaagcaaagcctaggttaatttaggtgaaataatttttactttgtcactattattttaggagatatgaattttaaaatttatattctagaaagtaccatttattccttaggtagtcgtttgcaatacttttaagagatagttttgtcaaattttactctatagcactaaagagcatagttttctaagatcaacccaactggtctcataatcttttaggcttatacgaatttcttatgcattgtacaaatcgtagtgtacatcaagtgaatggtatgcaatacagaatttcaaatgtgttttctgcacataaggtgccaaattttagtttctagtaatgaagggggtaattttctttgtccattaaaactgcgttcatagtttttggtacttatgtgaatttcctacatatattacaagttatgatccatattacgttgctacataaaattttgaaatgatttatcgtacttcatgtttggctcacccatttcaagacaggattgaaattctatgaattttacagcttatgcagttcattatggtaatatcttaatactaaaaaaaatagtaccattttctgtgcagaaagttgcatgtaaatctactgaaatatggcacacgttagatggatttaatatgaattttctggagggaactacaaatcgggtgcccaattcccttaaaaaaaatatcgggcggtcaaatgtttccgttaactatcgagcgaaacattaagttatataatgtgaaacaaaaaaaatccaattgaaacatttgaaaaaatttgtggaacacagtgaaaacacatgttgaaaaatactgttatcacatatgaaacaatgagttttaacactttgaaacaaatgtatttctttcatgggattatagtcatgcgatatatttttaattacaatagatacgacggtgtgattggatcgtagatcagataatagtttagaagagaagattgctatatgctaattgcatgtatgaatggagtagagaaagcaaatagttttagttcgttagttttatgaaacacattgaaaacacatgctaaaacatatcactatagcttatgaaataatgagttttaacggtttggaacaaatgtttcttttcatcagaacataaccatttgttatcttgttataaaaatttaattataatgaacataatcgtataatcggattgtaatgggattagtttaagagaaaatatattttaaagattgtaaatggaatgaataaagcaagacgatagcttattgttaggttggagctagcggccgataaaattttctccgtcggtctactgatccatagctttctcctattttccgcatatttttgaagtttattctcttttcagttgaacaaataatggtttaacaattttcctcgaattttccagattttaaatctgcggcaacatgtcttcttgcatctaggcccctgggtttccaaagaatagatcccacggtccccacatgtgttaagcaaagttcttgcatgattggccttgagtaaggcctgaaatgggacttgagtgcttacgattgggcttgctttcactcccacttgtacattactagatgtgattaagttaagcttgagtttggtcatgccaagtaattctaaatctcgatgttctctatagaattgccattaatagtaacttttatttagctctagtcattttcgtttttctcctggtcaacaagatttttgatcttaacaaataaaaattgataagattttggtcttgacagagtggcaccacaaaaggagtcctcgcatacgtaatcttacaaaaatgaatgaatccaagatttattacttctcttcagaacattcatcaccggtctgaaaatgtgttaggaactgatgaacatgcatgactaaggtctgcaattatcttttttttttagagaacacaaaccaaaactatctcgacaatagctgtcagactcattctcaaacattcagagttcaggtagactaaacttgtaggctgatttaacaggaaagtctttttcttctcgaggggatgtcccatatgcatttcatcttttttatttttaaaaaatattaatatataatatattactccataaacatataatttcaaattcaatcactacaagttgctttaaaaaataagactgaacatacacgtaccagttatagtttaattcgtctttttacaacttgtagaggttgaaattaatgttacaagtttgtgaagtgatatatttttctatcttactatttttctaaaaaaatcatatgttatttgaatgatatacaagaaatgaggggacattctcttgaggagaaaagtcatctctgcctgaatactgcacctcttgatgtagaggctaaaataatctctattattgaaaaaaagtagactgaaattattttccagaattttccaacatcacattgatcttatttgtagtcttaagaaagaacataatctgcagagtacataaatgcacatggagtctatgcagtggaccttgactggcatggagagtctttaggaaaatgccagaccacttgagtgactcactgcagcaatacacaggcagttatttcctcacctgaaagtaagcatgttgccaatgccactatcctcgagatcacattcaagcctaaccactccgctagaaagacaacctaaaagcaagctaggtaactactactgtctgcacaaatgagaaagatagctgaaccatcaggacagaacacacacacacagagacatacatgtggtgtttggatcagggactaaattttagtccctattacatcggatgtttggacactaattagaagtattaaacgtagactaataataaaactaattgcataaatgagagataattcacgaaacaaatttttaagtctaattaatccataattagtacatgtttactgtagcatcacataggctaatcatggattgattaggctcaatagatccatctcgcaaattagtccagagttatgaatgggttttatcattagtctacgtttaatacttctaattagtgttcaaacattcgatgtgagagggtcatatctacactacaacttattccattcttcaattttgtattttctcggctgtgtttcagaatattctccagtcaccatcttgtatacatgaggccggggactctgttccaatatagtttttttttgtcaattccgaaccttatttcttagcatacatgtagtggtcaccgagtgagatggatggataccagaaccgacatgcatcactatactactcaagtatgtaacttaccatgttttatctctcatgatacataactgggtaaaacacaacgtatgctacactagacctataagatgaatcaggagggaacattgttcatttgtgttggcgtctttttcagccaacaaaaagtcacctaaagatttaaggtgatctagatgatagggaatcaccaaaactggctagcggagccgatttattgattaaaaccggactctaagttgatttagatcgatttgagggtatacacctacaaaatgaacgaattacacccgcaaaatgaacgaattaaaaagtttacgagataaacatataaaggatgtcacactctcgtaaaaaagatgaacgatctaggcgcaaattaacaaagataaactaggattaaaaaactaggtaaaaggtaaagaaagaacggaattggtgttcaccttttaccaaataatttttaatattacagagtcatcttgtttcagccagcaacataagctgcagaggagcaggtggggcatgtgcagtgtgctgcctaattaaaatcacatcttaaagcattgtactaccaagtgtcaaacacaaacatgccgtttatcctaagcgaagcactactgttcactttcaggcctcataactgtgccagtgacgacaacagatgaatttgagcagtgctggttgcaccagatctgaccaccagcgccatttgagccatggaaacaacctcattcctttcaatttggtacacacacgcatacgcgttcagcgttaggggcataagcgtaataagccgatgcgcgtcatcgggccgagcctgacgcctctgggaagataactattgtcagtgacagctggatcattgctcactacacaaagctagcccagatgaaagcagcagcagcagcagcagcagcaggtagcatatctgcagtgtaaagggggagacttgacctgagatcagatgagatgagatgagatgatcttttctctgtgcttaatttatccccccctttggtttgctcttctgtccttccctctcaaagtaagcagcatcagatgcaaggggtgacaccaaaggctggcacacattctcttctctcccctttttttttcctctctgctttctttcttctagcttccttctccaacattccaaatggtgatgctctgatgacctcctggctagcttctacacacactccaagaatcctctccagtgatgtagtatataaacctcatgaggggctaatcccttgtttgcatcaggggatccatctgaataattgatactggctattaagtcagtgattatttctgtactgtgctattactgatcgatgcaaatgcccttctgcccgaagctctggagctcggcggcgccggcgccggtgcagccggggagcgtggtcatcaatggcacggtggtcgtcgccaaccacttcggcctctcggctcccggcaagtccaccaccctccgcctcttcagcggcacggaggtcgatcacggtgagtaagtggcgtatgcaactaatgtctgaaactctgaatccgatcagcgctgaaagtctgaaaagaattgcagagacgaggaaggggaggctgagcgcggaggcggcgttgaggggagggaagaagacgaggcatgggaaggcgagcacgacgatgtaccaggtgacgttcttcgtcgacggcgagttcgggacgccgggcgccgtggccgtcaagaacgggaaccggaacgaccagttcttcctccggcacgtccggctggacctcgccgaggaccggagcatccacttcgactgcaactcctgggtctacccctataagaagaccacctccgaccgcgtcttcttcatcaacacggtaaacacaactaattccctgcaaaccgtaatactccatccgttttatattataatttattttgattttttctataatcaaacttatttaaatttgattaagtttatagaaaaatataatagtaatttcaacataacaaatatattgtcaaaatatttcaatgctaaatttaataaattaatttggtgttttagatgctactaagttttctataagttttgtcaaacttaaaaagtttaattaggaaaaaaaataaaataacttataatatgaaatggagcaagtatactacgatgacagagtctaagttgtttgaccgattttattccctataagatatacggcaaaactcatgcccttctggtttcaaaaaatacaatgagatgtcgcgtacagctaaattgatttttttttcactgaactgataatgatcgaaatgtttttcttttatgatataacgagtttaagttgaactgacctatcattctgcagagctacctgccagataagacgccagaggcgctgcggctgttacgggaggaggagctcagaagcctgagagggaatgggcgcggggagaggaaggactgggagcgcatctatgacttcgactactataacgacctcggcaaccctgacaacgatgaccatgtccgccccgtcctcggtggcaccaagacccacccctaccctcgccgctgccgcaccggccgccccctcagcaagaccggtacttccacacaaaactcatctccaagtctccaaaatttctttcttagctaataaatagtacccgccgatgataatgttgatgagtagtagaatactatcagtagagagtaccatatcagtagagagtatcataaaaggtagtcaactaattgagcatatgaaaatattttgtggaagacggggtgacggagacgcggaagcacaagctgataaacctggactactacatcccgccggacgagcggttcagcccggggaagctggcggaggtgctggcgatgggggtgcaggcggtgacccacttcgtcatcccggaggcccgctccatcttccacggcgacgtcgtcaacttcaagtccacggagcagctgcgcgccgacctctacggcaagccgccgcagccggcggcggacgccagggtcatggacgagctcaagtcctccgtgccgtcgcacaagacgtacaagcaggtttccaggattgtcaaggacaaccccgccaagttccccacccctcaagtcatccactgtacgtactgcgtctgtgccagtacgccatggcattgcagcttcttgatgatctcgcgcgattgaatttttttttttgggggaattttgcagatgacactgaggcgtggaggagcgacgaggagttcgcgagggagatgctggcagggctcaacccggtggtgatcaagcggctggaggtaagaacagctgaaaatgttttgacatgtttgatgagctatgttgatgtgtgattcgtgctttacaagtggatatatgtttttaatcattttttcatagtattaaatatgggttcgtgtctaactcttcgactttcacaaggtgtttcctccaaacaagagcaagataaccacggacgatatcatgacccagattggaggtctgaccattcaacaggtatgtgcatccacgattctagatgaaccgaagatctaccgttccaaaatcatctatagaccgttctttgtaccttttttaagattacaccgtagacacacgcacacacacgcaatgccacactcacacctccgcaaatgaaagcacacctgcatgtatgtaatattcgtgggcatcaggatttgaaccctggtagagtcatacatccacgagtataccaccacaccactagtatgtacgtaatatttgtgggcatcaggatttgaaccctggtagagtcatacacccacgactctaccaccacaccactaatgctgcccctaaaacttagtatcttaacttcttaagtagtagttatttttattagtgtaaaattatattcctcgagatactttctgtcaagtatgtaccgggataccgccaaatttctcttatattatgttctctaatatgtttggtttcatctattttcatttggcaggcgatggagcagaaacggatgtacatcctggaccaccacgactacctgatgccatacctccggcggataaacacggagggggtgtgcgtgtacgcgtcgcgcacgctgctcttcctcagggacgacggcgccctccggcccgtcgccatcgagctcagcttgcccgacggcggcgtcggcggcagcgagatcagcagggtgttcctcccggcgagccagggcaccgatgcgcacctttggcacctcgccaagactcatgtcgccgtcaacgattctgggtaccatcagctcatcagccactggtgagtagggcacacgcctcgatcaatcagttttcagtactgtcggggtgaaatctttgcaaccttatgtcttaaaatttcagttgcaaatttgctatgttatatagactccctcgactttatacagtttgcagttgtgccactaacacgtgggccccactttacaatgacccacgtgttagtggcaaaactataaattgtacgaaatcaggggatttatttccgtggtttatttggttttaaaccattttatgagtttttgagtgcttctgtccaaacatccccttttgtgatcaagttttgcagtgctcggtccaagatttcggccgagtttacttccaaactttttttttttcaaatttttaactttttcatcatattaaaactttcctacacacacaaacttccaacttttcttgtcacatcattccaatttcaaccaaacttccaattttggcgtgaactaaacacacccttcattgtttctgaaagactgaaactccgaattctcatctcaaattcttgttccgaaacaagaaattgctcatctgcaattctttctgtaacaagacatttctctgaatgctgatatggaattattcttgttctgagacgagtcatttgtctgaattctgacatgaaattcttcttgttctgaagcaaggcatttctctgaattctgatatgaaattcttcttgttctgaaacaagacaattctctgaatgcttgctgacatgaaattcttcttgttctgaaaacaaaatatttgacttgaccataaaaatatgcaccgtcttaatccatgaatggaacaggctgttcacgcacgcgacagtggagccgttcatcatcgcgacgaggaggcagctgagcgcgatgcacccgatccacaagctcctggacccgcacttcaaggacaacatgcagatcaacaccttggccaggagcatactgctcaacgccggtggcctcctggagaagaccatgtacccggggaagtactccatggagatgtcctccgatatctatgcccattggaggttcaccgagcagtccctgcctaatgatctcatcaagaggtacaaaatacaatcaattcatcatcccaattcctacattgccaatgaatagaaccacaaattcttaatttactgcatgtctgaatttttagttacttctcggtgagatcaacggctttcgatccgcctagccacttcaattttacaattgcggcgtacacattaatgtcccgtagcaacacacttggtatcatttggtgcattttatgatagccaaatatttgacaacaagattcaaataaaattttaaaaattccatgaatcaactgtatattaataaaaaatcttacataaattctgggaatgttaaaagttcgaatatattgttgttttaaacgtaaaataattttgactagagagagtagaattgatttgagaatttattgttaactaaaacatttccaaccagggggatggcgtccagggaccccaaggcgcgcggcggcgtgtccctccacatcgaggactacccgtacgccgtcgacggcatcgacgtgtggctcgccatcgagggctgggtgcgcagctactgcgaccacttctaccacgccgacgcggcggtggccggcgacgccgagctgcaggcgtggtgggacgacgtccgccgcgtgggccacggcgaccggcagggcgacgccgcgtgctggctggacctcgacaccgtcgcgggcctcgtcgagacgctgtcgacgctcatctggaccgcgtcggcgctgcacgccgccgtcaacttcggccagtacggctacgccgggtacccgccgaaccggccgacgcggtgccggcggttcgtgccgctcccggggtcgccggagatggcgcagctggaggccgacccgggccggttcttcctggagacggtgcccgaccggttcacggcgacgctggggatcgcgctgatcgaggtgctgtccaaccacacctccgacgaggtgtacctcgggcagcgcgcgacgtcgacgtggacggacgacggcgaggtgctgctgctgctggacaggttccgcgacgagctccggcgggtggagaagagggtggaggagaggaacaaggaccccaggctcgtcaaccggaggggccccgtgagggtgccgtacacgctgctctacccggacgccggcgacgtcgccggcaaggagaaggggatcaccgggagagggatacccaacagcgtctccatctgacacgattcatcatccttcttctcttatacttcatctatccgactcgactcgacgcgtgtggaatgtaaagttctctgcttttctttttctttcttttcgtttgagagttttggtgttggggatgtgaaattgagattgattggttggtttggattggagaattgatgagcaaactgtgatgcagaattcaatacatgtaattattgttctaatccaaaagcccggtaaagaaaacacggtcgatggatataggccgatctctcttcagaactgctcagtaaagattctttccaaagtgcttgcaacacggctgcaaagggtactcccgatgatgatacatttagaccaaacgggtttcctcaaagggagatgcatctatgagaatcttatatatgcgacggaattgattcaagcatgctacagaaggaagtgccaaactattattgtaaagcttgatttcgcgaaggcgtttgattccgtcatttggtcaagccttttcaagattcttgctgtcagatgtttcccagaaaactggattagctggattaaggggttgctttcctcctccaagtctgcagtgcttcttaatggagtccctggaagatggattcgctgcaagaagggccttcgacaaggcgaccccctatctccatatttgtttgtcttagttgctgatgtgctacaaagattgcttgaaagaaatactgaaatcagacatgcaatctaccaagacaggctgtgtaccaccatccagtatgcggatgatacattgattatctgttgtgcggaggaggctgatgttcttgctctaaaggagactctgctgcagttctccaaggcaactggactgcaaatcaattttgctaaaagcactatgattactctaaatgtcgatcaaagcaaggaactagttttgtcggattgctacagtgcaagctggagaaatttccgatgtcttatcttggacttcccttatcaattcacaaactgtccgcagctgacttgtagcctctggttaacaaggttgatggtttcttatctggttggtaagcatctctcctattgcaggcggagcgtcttgttctgataaacgcagtcctgagcagcctaccggtgtatgcaatgtgtgccttcaaacttccaccaaaaattatagaagaaattgatagacgaagaagggcttttctctggacaggggatgatgtctgctcgggagcaaaatgtctggtttcttgggaatcagtttgcaagccaaaagaacatgggggacttggtattaagaacttaaagattcagaacgaggcacttcttctcaaacgactccttgctctttacaacttgaagacctcctggactcgatgggtctgggacgaaatttcagattcctcgttactgtgctcaactcgtctagggcatcactgggcatcctttcaaaagttgttgccagaactgcgatctttgacggaagtcgtggtaggaaatggtgagcgaacctccttttggtacgacaaatggttttcgactgaaagcttttcaagtcagttcagcaatctcttctcccatgtgtgtgacagacaaatctaagtaaaggaagctcttcacataggaatttctgaaaatcttgttccacgtttatctgaaactgcatcggcagagctgtgctgcttacaggaattgctgcagaacttctctccgagcgaggagatggatttccgcctcagtgcaaagctaggaaagttgacaactaagaaattctatgaggcaagattacccccaggcatgccatctccgaactgggatcttatttggaagtgcagagcacctctaaaagttaaactcttcgcatggctactggtccgtaatcgcctgtccacaaaagaaaatttgctgaagaaaaccattgttcaggaggcaatctgtgacatctgcaatcaggaagatgaaacagctaatcatatgtgtttctcatgtccgttcgctcaggctttctggacgcagatcaacgttcgaccgcaagctcaagacgtcacgcagttccatcgttcgggtccaactcgcaagtgccggcgctacactggcaggtcttcttccagctttgcatgtgggctatttggaatcatcgacacgatgttgttttccgggggaaaagcccctcactaagagcctgcctacaacgatgcatcaccgaggcagctctctgggcagagaacttaacggaagatgatcgatttgtaatctctgtttggaaacaaatcttctcctcccccttacaatctatcaatcttttgtaatgaacttcttacttctaattgcaatgacaaattcag

SEQ ID NO: 1044 - DNA, 2204 bp, Oryza sativa
ctacgatctgctggctacctatcgggaagagctattgagatcagtgctaggcaaagtatttgaactggacactaaagagtgcaatggtgatgtctgctttaggaggttctttgttgctcttaaaccctgtatcgatgggttttttggaaggatgtaggccttacattgctatggactccactcacttgactggaaggtccagaggccagttggcttcggctgttgcaattgatggtcataacaggctatttccagtggcatatggggtgattgagacagaatctaaggaaagctggacttggtttgttcagaatgtgaagaaagctattggtactccaaaaggtatgtctattcttaaagttgtttcttgcatcctccatcatttcaattcatatttgactaaccacctactatactcgtactgtaggtttggtcattagtacggatgcagacaaaggaatagaaagtgctgtagatgatgtttatccaggagtggaacatagagaatgtatgaggcacctctggaagaccatggaaaagaagttccatggccctctatttgcccaaaatatgtgggcggctgccaaaagcttcacaaatgagaagttcacataccacataggcaagatagaggagaagtgtcttgaagcactttcttggttggatgacaatcatccatacatttggagtagaagcaagttttctaacgagtgcaaggtagattacatcaataataatctttctgaatgtttcaatagttgggtctcaagaaccaaggatcgacggattgtggacatgtatgatgcaataagatagatgatcataaccaagtttgttgcaagaaacaactttgctggtaagatggagggaagaatcattccagctattacaaagtctttgaatgctcaaagcaagaatatcaaggaccatgaggtattgatatgtggagctgggacagctgaagtaactgtgggcaccattaggcatgccgtacatttggagcaacaaacatgttcttgtagggtttggcaagtgactagaatgcctcgcagtcatgctttagcattcattgcaaagcttagcacggatgtccatatggatgattttgtggatgattgcttctccgttgagaagttcaagaaggcatatgcaaggactttcaatccaatgacatcgaaggatagatgggcacatgttgatctaggctacaaaatcaagaagcctagtgtaggatcgagatgtcgactagagggggggtgaataggaaatttaaaactaaataacacctaatcaaatctaacctaagttgctaggcttggtgagggagaactctaactaagcaactaagttatgttttgcaaacctagggtgatagtggctcaaatatatctctaggaaagtaaatcacgctcttatgtcgatgttttgcaatcctagggtgatatgatctcaagtgtgtctctagaaaagtaaatcgcacaaatgtaaatgcgacaatcaaatgagacaatgagacaagagatttttcaccgaggttcggaaactcgccggtttcctactccccgttgaggcgagcccaactccaccgctcaaccacgaagccaccgcacgcccccttcgtcaaggggtgggcaaggcgggagccggcccacggagaggactacccaagcctcgatcactcggggtagttcttccttcactccgaaggtggtgaactccaaaccactcacaaaccggcgccgggcctcctccacaatcttctcggagaggtcaccgggcaactcctccacaagccgtctaggagacggcaacctccaagagtaacaagcaatgacccggtgtggagatgatcaagtgccacactagctctacaatggaagcaaatgcactagactcttggctaaacaaccctctaacacactagatagatgaacacaaagctcaagtgagtgtgagagaggtgcaaggagtgtatgcaattgaattgggtgccaagagagcccccttgctgctggtgggggagtatttatactcccacccaccaaaactagccgttgggggcgaaattccccaactctgtgctctgccggtctgaccggaggtatgcggccggtcagaccgtgctactctgcaacggctagaaaactagccgttgtagccctgtcagagggccccatcggccaggccggtcagaccgacatggg

SEQ ID NO: 1045 - DNA, 8176 bp, Oryza sativa
tcatggtttaaaccaaaattcgaatcacacattttgtcagaatggacacgtgtcaactatccgaatggttgggtctaggaacctcatctgcgtttgtatgcatgcgcaatgaacctccattagcacacgtctcaaaccatttgaatggtttgggcccaggaacctcatgcgtgtttgtctgcgtgcggatgagatcgggatgaatgcttatgagagaaaaatccaacaacattgagaatctaaatgataaaaaatggaatgaaaaggaaacacatatggatatggacctatgaattgctcacctctccttcatagtttgtgatgtcaagttgcaaaatatgtccatgctccgattcataatttgtacatgattattctatcaacactccacaagacgaaagcctattctgcgtagttcaaccttcttgtttttaagcaatgcatagtcatgctagattgcaagggatatatatgtgaagggtattttggtaatctcttctagtgttgtaatcaagtatgtgccccattgggctaatttcatttgcaacaattcattcatataatgtaattgatttgtaatattggtatatatttcaattgaatttctatgtatccttaaaatgaataatacgatttgtcaaaaaagacatgtgtcgaccatctaaaggatttgggccagggaacctcacatgcgcttgtatgcgtgcgcaaaccacctttgccaacatggtttgttgatgggtcagtagtcaagtatgggctgataacgggccttttggcatgttttgtgtttttacttcttttgggtttggtttgtctctttgtatttcgaattcaacaactttctgtgcacaaaaacccacaaacttctgtctgtttgcttggctctagcccattttgaagagtttaagccctccaaatatgtctaggttgtgtaccaaaacaagtccatggacattgtgacgaggacatcctccactattaactgctagtaaagacgcaacaaagggccaagtggtccagttgtactcgggcggcgaccgtgtgagtctctgaataatcccaccttgcttagcttgggaggagaaagccaccttaaaaggaagagtcacccttcccctattggactagtctttcaggaagagattaggcctttccccgagtgggtgttcaactgttggggttcgggcaaccttaattttattgggcctcggccaaccctacctaggccggagcgatcatttggtatcagacttaaaaggcaaccttaattttattgggcctcggccaaccctacctgggccggagcgatcatttggtatcagacttaaaagggagagccaccctttctctattagactagtctttcagggagattggttctttggtttgtcacagctaatatgttatgctttagcacaataaaaaatcctaaactttatcagaaaggaaaaggagattgggtagatgtgtgatgtgtctaagaagagaggggtagaaagccaacaacaagagcatctaaatggacaagtaaaaaggaggactagaggtggttcaattatcgattacttaaaatatccgtagtggtgatggtgaagctaacatagacacgtgatctattaaccgtggatcaaaaaatcggacgctgcagagcgacgcactcctcctccgcaccaccatcgcgcgactcctccgtacatgaccccacttttccgttcctactgcagctcgtttttcctattttatagtttccaaccgacgtggtttataattttgatcatacaacagtgaaatttggtaagccccgaggaaactgtcggcctaaaataaatatcggcttcagagttttggaattggccgatgggagttctcaagtcgccaggagtcggattcttggaggattcggttaaggaagtctatccagaagagaccgacttcaagaaggatgcggcatggcggtttatgtattaattatgaagagtttgttagtttccttttatctttaggaaagtgtgtttagtgtccaataaggacttcatgttttccttttatctttatgaaagtttttttcttgtccaataagggctagtatctactcatgggtataaatatatacacccggagtaattgtaaatgatctcacagattaatacaactactctcggtgcatcgccatcctctttaccgagattttacttgacgcggggttgcatcggctttcgatcttcggcgaaggggtaagtcctacgttccgccggccttggcaattgtatcggctacattggtgttgttcaaggctgcatcgctttggtctcttggatcgctctggttcggttgatattttggcctacctatttatcatatatcttagttaatctagtttggtagcttgatttacttgtatcggctgagattcactttagggtttatgccggtattggctaaatcgctttgctagattagattagctaaggtatctaccaccctgaaaatcagtcaagggcttgctggcttgattatctagatattgtgtttgttttcatacttagtgttgtatcagtacattcgacctactatgtcgtgtttagaaccataatctctagcctgcttttttattgccaataaggatttcatcggggtttcagctgatgagatatctggacgttgcatcgatttataaggagtacatacaagttggatttagccgatcgcaacaaaggttatactgtttatctaatcttgcggatttaatgacatcggacctccagccgatatatgctttaacctttggatcagtgcttattctatcatattgttagccgattggtttctactagattttattgttgtttcgttacattatcattagttgattgtctttatttacatcaagtgtcagattctacatcaaccatatagccaatagctcaaaactctatcgctatcggctagtatcgacatcgactggaattactctattggcttgtcagccgatcgactcattgatctactatttgcatattttgtgagttgtagaatcaaactaactggcacgcccgcatctcatcaatctttggacctgcactggagctaagcagatctcccaggctgttgtgttcgtcgacttaattcgcgccaacacatacccgacaccatcggccatgcgcagatttttcgtcaacactatgacatcaaatttattcattttccggagattcacataaaaaaataatcaaaggaaaagaaggagcgtgaaacatcctcgcctcctgcctacccaggccacgtgataaggcccatcaagattaggtccaatataagattagccgatcaagaatcactttccatccattgcagaactcgtcgaataccaaggctcataaacaacgccgacgctgacgccaaattcaccgaaaccaatctacgtggccaccaaacgatgtatgcattgccctcaattccgctttcactgtcactgccgcggactccaccgccactgttgccgtcactgactccgccgtccccgccattgccgtcgccgctaccaccgccccaactgtcatcttcggcgcggccgccgccttcatagatagaagcaacactgtcatcacagagatcaatcctttggtaatgaagttaagcacctagctcaatgagtccatgacatctaaggctctatgctatcttgcaatttgtactacttattgcaggcagtacattagctagctaaggttaatgcatggtactgtagattaatggttggtactgtagattaatacatggtattgtagattaaactagctatttgatcaatctttttttcaaagcatgcatgcgatgcaagaggctcttgtgtgtgtctttgtcaactgcttggacttgcaatcttttgctcatgagtgacccaacataagtatctattggtttttgaaaacaaaggtttgccttaaacagaagtagtaacaccgaactgatttacgtgcttcatagttctgaaacaccatagctggattttgcgtaataattctataacagttagcatatttgagacacaatttattgtaataaattcctgaatttccccaaatttaatcactaagtgcattaactatatcttttcagtgttatataatttccctgtacaatatagatccttgcttaattttatgtggtactcaggtcaatcaagacgccattcatgctgatatgattacaacccaaccctcgaagaaagcaaaagattcggaatgtaaggataatgcatctatttttgtctcaatctatttaataatgccaaatacttatatatatatatatatatatatatatatatatatatatatatatatatatatatatatatatatatatattatttgaatcactaacatttttggtgtttgaaatactaatgtgagctaatgtgtaactgattggcaatttaactttgcttaacaaacaaaataacgtgacagaaaaataaaaattacattctttattttctatctctggtatccgtttgtgatcgacaagctaggccatgcgtgtgtgaatgagggtatatgcacatacactatatcgatataataacaagcacagtaagatgctatactgattaatttatgtgtgcatgctcaaagtttgatgtgtatgtgcatggtatttagaaaatataattgggttctgttttgtcaaatgcgcagcaccacttcagacaatgacgcattcgtccacaacgctcgctatgccaagtggtgaacagagtcggagcaactgtcaaccaaactcaggagtggatgcaaacataatattcttatcatccggctcatattgatagtcaaatattaattaattgtctgattatatatgtaggagaaatacaactagataaaccattacatggaagtgcccgtcaaactacgaatgttttgtaagaacttattaactctacttttagacaatattctatttaatattcttttaatataataataacatctagcagctaacaaatatgtaataaggatacaatacacatatatcggatgcattaattagtgcaaaagtgtcagccatacaataatatttacaatattgtcatttccatttatattgttaattacataattgtcttcatttgtttttcttttgatggaattacatttggagagcttggtatgtaagcaatagtcggtgcatcatcatcagatgaaatatcttctgccatgattggtagtccagcctctgagagcatgttttataacataccctccaagttgagatccctcaaattcccatggaatgtcttaatacaattgttcctatgttcttgcatccaatggtgacaaaactattttttgagagaaaacggtaacaacatatggaccctttcccccctcccccaattctcactcaatccctgcattaagaaaaaaaatggtaagaacagtttatacctagactatacaaaataaatgggaagatcttggtactacaatgtgtccgtgctattttactaaactagaaggtaccccgcggcgttgctacggaacattgtagaaaaaaattagaagaatagtttgtattggaagtaaaaggattctaaagtaagacaatatgtgaatattaatttgattgtatgatagggtacacaaaagttttgttagactgaaagggaactggcatatatcaaaattatgattatttgaaagcacctagagtatttagtttggacatagtcttgacaacggaaacaggatagaccatgattacgaaaatagtaaacaacggatgtgattattcggaagcatctgcagtctttaagctgtatattatgtattgacctgcaaatttcgctggacaatgtattagaataaatcataatcggatttgcttgtatgatgaagcaaggcttccaaacatgggtgattattaatgactaatttgatttgaactattagatggatgatggattgatctaaggtgaccaaacatggtctacaatttttgcttttatctcttaaaacatccgttacaacacacgtgcctttatctagttcttgttaatttcaatcgatatgtatttgttttttccatgtaaaatgtagtgaattggtttttttagataaaaaatgagattttgagggagagacgtccatccaaaaaatttttaagaagaaattataagcgtgttggggattgaacacgggacctcgagttgaaaccatacatcccttgccactgcactatcaagtgcatctctagtaaattggttttgagataaaaaaattgtagtataattgtttttttttgttttggaaaccaatatcactactgattcaccccttgaatcggcatatgatactgaccaacattgccagttgaacaacacacaatattaatgcctaatttgatttgagctattagatggatgatggattgatctagggtgaccaaaatcaggaaatgtgtattccacagtcgtgcttcgcttaaaatttaatcagatagtcatgcattgatgacaacgtggaaagctattatgaaagagaatatttaatgctacatggtgggaggcaattgtatagtaatgcaggattacaatacaaggtaagataatttaagcctcatttagatgggctttattctcagcacttcggcccataaaaacaatgatttagtgaaaaacaatatgcaccataacacatgtaaagtaggaaaagggctcaacatatgacataccacgtttggattgcagcaaacaactttattagttatgttgttacacaaaacaacacaaacaatcccctcctctgcttacttacaactgactatcaatttctcaagccttccagaaggctctttctagcatgcggcaaaatccatcgcttagcatgtacctgtacattgataagcattgagctagaagaatcatccaaggatggcgtggaggcttagaccaccaagtatggaatgatgcataaaattagtggatcgcttgtacatcaattcacaagtgtatggacatgcagtggtgcaaaaggaaagaagcaagaaaggctaacagaaccccgcaacaaacccacaagagaacaattagagacacctaacctcgatgctttttcatgaatcatcgtgtctccagttggcatccacaatatcctttactactttgtactcctatataaactactttgcttggttcccattctctcatcgaccacaccataaattggtcacctgcttcaacatcttgatataagaaaggttgtttattatatcattattatgtacttctactaattcttgagtgttagtgtaaattgtgttagtggctatacttccaacgagaagcaatgtagtttctattcaatttacatatttttactgggaagatgaaataagttgttgtttcaagcaagtacttaactgagttattgttcatgcattacttaaaaatgtaggagtaaagaaatggcgattccaacaaaggaggaggtggagcagaatgaggaggacaatacattttcaaggttgcaattgcttgcacaacaacggcatgccatggaggaattctggaggaggagccaggaacaaatcgaggcatctgcaggcaaccatgagcatatactaccaattgactgcgtgaagaatgtcattcgaccaaagaatgatgctatgatgctatctgctgacacaccaacttttgtgacaaaactttgtgagctcttcgtgcaggagctcaccctccgtgcatgggtatgtgccaactctcacaaccgtgacatcatattaggcacagacattgctgaggcaatcaccaccactgaatcctatcactttcttggtaatgtacttcgtagccacaaggcactaggaagtactgctcctgacatagatacttctgctaggaagcatattaagctagaccaaatgacctcactctaccatcctacccaagaaatgcaggcctcacgtttagctgggtatccaccccatgttcctatatatcctccataggtcaaatgggaactcaacacaagctgtctccattcacttttatgatgcaaggagaatctcttctcaacatgaaaagagaaaaatccctagttaatgaagtgatggtatgcaccaacaagatgagcataaacaactttgatggagctactagtattgg

SEQ ID NO: 1046 - DNA, 2866 bp, Oryza sativa
catcagaaaaaaggtaaattagaggctacctatgaaaagcgattgcacataaacacacgcggcaacactatatgtttactgtaaatcatagggcaaaattatgccactatctaaccaatgaggactttacagtgcctggtatcacttatcaacggttgagttgccaaaaaggtaacttaggaatagaaaatagtaacacgaaaataggataaaagataacttaggaatagaaaatagtaacacgagaataggataaaaggtaacttaggaatagaaaatagtaacacgagaatatgataaagtaacttagggatagaaaatagtaatggttgagttaccaaaggatagcatagggatagaaaataataacacaacaaccgcaattgtattccaagttacaacaaccttttaacttcttcctggttttgtttgcagccagcccactccctcgtccagccattagatgatcacacgagctagttcaattattgctaaataccatgaaaatcaattgctcggggttagatgtgtgttttagtaagttacatcgcaggtataattacatactactttgcaaatttgttcccagcaagtcatggaatatatatggggcaattgcatccatgtccccactttgaaagccaattgttgttttgcccccattttttagggtttgcatttttacccccaccttttgaatttgaagcagccgtctacccccatttatgacagctatttggtgggtcccacattatgtgttaaagaaataccaaaagaaataaaaaaaggttttaggaattatgtaatgacacttctacccctaagggaaagtgaatggacaggattcttctcttcccgtgcgttgggactccttgagtggagtcaactcaaaaccctagctagtagtcagcagcggcagcgcacggcggggagcgcgcgcggctgtgaggcggtggcgagggagcccgcgcggcgcggaggcggcggccgaggagcgcgaggcatgggacgggaggcggcggccgaggcacgcgcgcgagggagctcgcgcggtggggaggcgacgtgcagaggcgcgggcgataggcagcgtcggcggccgtgtgaggaggcggcggcggccgccgccgcgggtgcgggaggccgcggccgagggcgtgtcccggcgcccgctcgcaggaggtatacagccgcggccagttctcttccagcgtggaggcggcctctcacaggccgagggcaagacaaggcagaaaaggggaagttgttggcaatggaggaaatcatatcaatggagctaattttgatggaagagttgcacagataatgcgattggcttgtcttgctatcttatgaaaaatagacatgaaaacttagagctagctaaatctagatgaaacttagagttagatacccagatatacttagatatacttgaactactagctagtatgcattttaatcttggggctgcattcagtacggttgctttttcgtctctctatataactttgctatttaggacgatttacctaaatgtgccacttgtgttgtgatttgtaggcctactcacagcgatttgcaattagttgttagagttgagtcttttttaagtttgccggatggaggtccaaagcaatacctctagggtaaaaccttgccaacccaaaatattgacatgcataagtatgatctgctgcaagttgttaatttcattgctgaacactacacgtggggatctaagcaatatgtgagtttgtgacgttctttggatgatggttttgttgagataaaatgatggttttgttgagataaaatccgatgaacatttgcgggagtggtttcagctcaatatagataagggggttgtgtgcattgatgccaaaatcaatgatttcaatggtccattgcaattttcacccacaaagcgtaggtttcattcttcagtaaggtctagagcatgcataagtgagattgccacaaatgagggagccaaaaaaaaagagagccacaaatgaggaagctactaatgagggagccaaaaaaaaaaaagagagccacaaatgagagagccactaatgagggagccaaaaaaaagagagccaagaattccaaaaaaaaggggtcaaatgataaggatgcagtaggcattgatgatgagggcatatactctgacaatgaattacttgtggtacatagtgatagcagctatgattctgatttgtccgaatcttccgactctgattgttctgaccctaagtttgatcctgatcaagaaattattgatgagggtgatgatgatgatgtacctgtctttgcatatgatgttcaggatccttgtattgatgttggtgtagtgttcccagatgtggatcaatgcaagttagcagttacccatcatgctatcttgaatgatcatgcttttgaaactgtcaagaaagacaagaaaaggtttagagccatttgcaaaagagcagaagagggttgcaagtggtgttttttttttgcatcaacaagccctaagtacattggatgcaaggtacttttatatgtgtatttatgaatggttattctgtttggaatttttgttcaagctgaaacatgagctattaattctttgcttgtaggtcaagacaagtggaccaaagcacacttgtggatctttcaataagtgtggtgaaacaatggtcaccactaagtgggtagctgatcgagtggtggacttgttgcgggataactcctcaaggggagcaaaggatttgcaggaggagttgaataggaagcatcagattgatatcccatatttcaaggtcttcagaggtagagagagcacttgacattataaatggaaagtgggatgacagct

SEQ ID NO: 1047 - DNA, 7162 bp, Oryza sativa
  unsure (1)..(7162): unsure at all n locations
tcacccgagcacccccgcctccagttcgaggtcatccgctgctggccccaactcccacgcaatcggccagacatctgtagctgttgctaattgcttatgttnattnnanatagtnattcatnnnntntnnncnnannagcctntnngtttagttnnnnnnnnnnncnccactgaagccattactctgctgatgctgaaaatatagtagtagttcatcgagcaaataaggtttgttttttcatgtagcttttctcgccaaaacccctcatcattctccaacttccatagccattttcctaggagagacatattcattgtctctggatcaagaatcccaagcccaccctggtcttttggtctacaagtcactggccattgcaccgaataatactttctaatcccctgatctgccacataaatcttgttctataaaaatccatcatcctttttcactcctatagcatgatgagcagtagtatgtcatggtgctctttcattcatgttgaatagagttttttttatgagcgagtcccaacttaagattaagaaaaggccatatacactgtagtatgtgttatactccctctgtttctaaatacttgatactgttaattttttttaaatatgtttgatcgttcgtcttattctaaaaatttaagtaattattaattcttttcctatcatttgattcatcgttaaatatacgtatatgtatacatatagttttacatatttcacaaaagtttttgaataagacaacggtcaaatatgtgctaaaaagtcaacggtatcaaatattttaaaagggagggattatataaataaacatgaggctatgggtcctatcttattgcttagcgaccttaaacattgatggcctgtttagttcgcgaaaagaaaatttttgggtgtcacattggacgtttgaccggatgtcggaaggagttttttttacatgaatgaaaaaactaatttcatgacttgcatggaaaccgtgagacgaatcttttgagcctaattaatccgttattagcacatatgtgttactgtagcactttatggctaatcatggactaattaggctcaaagattcgtctcgcaatttcttctctaactgtgcaattagttttttaatttatctatatttttaatgcttcatacatgtgttcaaagattcgatgtttttttgaaaaagtttttggaactgcctgaagatgcccgagtaccaaacagaaaatttgctgcgtgcatatgacgtgatcgtgcgcaaatactccagttcctaaggacctgtacgccaaagggacgtcccctccgctcccctccccagatcctctctctcgaatcgtctttgggcggccaacgcatcttcctcttcctcttcctccatctcatctcaccatcccatccacgcttctcgactcccagacgacgctgctgctgcctttcgtcaaccccccacttctccttccccgccgccgctcgccgccatggatgaggagtacgacgtgatcgtgctggggacgggcctcaaggagtgcatcctcagcggcctcctctccgtcgacggcctcaaggtacctctctcctacccaatccatccgccgcctcccgtgctcggatcggtgctccccatcgtcgtcgatccgtagatcgccccccacttcatctcatctgggcttgacgctgccgcactcggatgagctgctgccattttgatcgctgatttacttagctatgcgagcgtagcgggatggtaatttgtccgtacatcgtggctgggtaggtggtggcgccatggttgtggtggttgctttgcgtttgggggagggatcgtcagtgcgtgcctgagcttacgacttcccttatcccatttaaaagagtagcggcatagcgattttgggggatttcacaacaagatctaactaaacagatcggatgcacttttcaatgtttttgcaggtcttgcacatggataggaatgactactatggaggagattccacctcgctcaaccttaaccaggtaagcaaactgcaatgaacttaatttgaccagtacagggtctatatcttgtcgtcatatcatgtcaaggaatgcttatgttattacagagtacattatttcttttaattttttgtccttgttcactgacattgttttccacttcgctttttggaatagctgtggaagaggtttagaggggaagacaaacccccggctcatctgggctcaagcaaagattacaatgtagatatggtcccaaaggtgcaactgtcactttcccccatcataatctatcttgcttctatatttagtattagcagctaacgtacgtggctagtgaggtaccatataggtggggaacctcaaaaacagaaatcccgtgatggtgcataagttcatcttgatgagaacatttagatccttttatgttacaaatgtggttattcactggtttagaaaactatgtaatctcatgtgtataatactcaaatggaaaaaaaggtctgaaaagtaatgattgccctgatttttgtagattgtcaattagtcggatggtttattacaagcgctaccactatggttccttgagtagcgtattgctgttgcatgattatctaaagtcctctcttttttttatctccgcagtttatgatggcaaatgggacactggttaggaccctcatacacactgatgtgacaaagtatttgtcattcaaagctgtcgatggaagctatgtcttcagcaaagggaaggtaacatcttcagctcatttcctctgttttcattagcatcacatttcctctagtgttttatacttttatctaagtggttgttggatctatattctgatcttattcctatgctagcagtgtaacatgcacttttctatttttgctgtcaaccagattcacaaggtacctgctactgacatggaggctctgaagtcccctttgatgggtctttttgagaagcgcagagcaaggaacttcttcatttacgtccaagattacaatgaagctgatccaaaaacacatcaagggttggatcttactacaatgacaactagagaactgatagcgtgagtacactagtgtttcttgcactgtattcaaccctttctcagtagtgcatggcttccttttctaaatgaaacaatagatttggggcatatatactatatttatatgggatatattgttgtagacttatacatgccctaatgcatacgtgaaatgtcaaacataatgacagtgtgcgggcaccggcgcatacatgaaaccacgtaatatgaaaaaaagaaaatgtgcacttcatagcaaagagaacatccattgtatcatctgtccattgtgtagaactttagaaagggtacgatagacagacttttgcatggaatccatatgtggcacatggcagtctttacatgcgtagcaacaccctaaaacttactggtcactaatgattgctaaatttaggataactgttgatatgactgaaagatttctctggataaaattaccttggtattagaaaccagcgtacttaaatttattttttcgatctgacacgggagtacttaagatacggatgcagttacattattgaaccaagcaacacatttatgttatatgctgcatgctgtggtactgcattacaagcctactttgtgctgctcatgaaatgtagaaaccttgatatcccttttagggaaaataaagtatgaaagcagaggcatcagagcatgggttgggtatctagtgtgtcacatcaatgagattctcactgcaaaattttaatttgcgttatttttaatttgttgtgtcttgactaatgtggacccacttaaatatagattagcttctattgtaacttgtaagaagacttacatcctgatggatattcttgtcgtcttctagtagttgtgttctgacaaaaaagtagtacaaataattgccgccacagaatatatcatcaatttaccttcagtctttcacatgatgcaaaaggatatatctatgcttcttttaccttttctgcatataaataactctgtttccatttgccctttcttttccagaaaatatggtttaagtgacgataccgtggatttcatcggtcatgcacttgctcttcatagagatgatcgctaccttaatgaaccagcaattgatactgtaaaaaggatgaaagtaagtattgatcaaagctcctgtagattgttcgtagtcttctgctacggatatcctgctgttctctgaatattcatgctttatgaagttcaattacattttagtgctttatctacttgtagctatatgcagagtcccttgcacgttttcaaggaggctcaccttatatttatccactctatgggctgggtgagctgccacaggttagtgaaattttaatgttaagtaaatacctgtcatactgcatgtgcatgtttttaagatggtcatatataacgctttcttattcaaatatttcttattccacagggttttgctcgtttaagtgctgtttatggtggcacttacatgttaaataagccggactgcaaggtgtgattaccatcaaccctgtcattacttgcatctctggatgaccagacaacctaataaaactttttggcatgccatacatgatcttaggttgaatttgatatggaagggaaagtctgtggcgttacttcagaaggtgaaactgcaaaatgcaagaaagttgtttgtgatccttcatacttacctaacaaggttaattttctttcctgtattcaatttatttaccacatgaattttctttcagtatgttcatttaggattcctagatgatgtacttccatcttaacacattcacagcaaatttactattttttcttcttcccttccatttgttgagaagttttattaactacaaccacatttgatgttctgtatacatttattaacaggttaggaagatagggaaagttgcacgagcaattgctataatgagccacccaattgcaagcacaaatgactctcactcagtccagattattttgccacagaaacaacttggacgcaagtcagacatgtgaggcctttctcaatcacaaacaaatactgctcaccttatgaattattacatttgcttgcccattgcttttaacaaagtttatttattcccattttgtaacatttttattggtattctcctgttaggtatgtcttctgttgctcatacacacacaatgtcgctccaaaggggaagtttattgcatttgtatctacagaagcggaaactgacaatccacagtccgagctaaagcctggaattgatctacttggtcaagtagatgagctattttttgatatctatgatagatacgaacctgtgaatgaaccatctcttgataattgttttgtctcaactgtaagttttgcaatatctgatttttgaaatgagcattaagtttgattgtctagactgtaacatatttctggtccacactccctgcagagctatgatgccaccacacattttgagacaacggtgacagatgttcttaacatgtatacattgatcaccggaaaggtagatgtgcttccgcctttcattttctttaatctttaatacatgtaatgcttctatattttgtttgaaacacctttttttggaaaggatgaaaattagccgggaggctatagagaggactagagtaccacatatgttgtaatagcttgacttttgtgtcaccttaaattctaaatccaaatccattctgttggctattgtttgttttacaattatgtattctacccttttcctaattcttttctcattgcactattgcaggctgttgatctcagtgttgatttgagtgctgccagtgccgctgaagaatattagatttcacaaccaaagctcaatcatttcacaaagatatgctttttcttggtgggtaccgcaggacagatcgtaacgagtgactggtatagttattcaaactccacgttataccgagtgttctggccaatatggcttgttgctagcagtaatatgcacaactgttggccaagatgactgaaatgatggtggtttaatttgatacttcagtaatgcaatggtgtaaacagtgtacacactacacaatgacggtcgggcgttttgtgactgatgtatcataactgctggataattttgcatgtctacttctgcagtgttgtgttctttaccttgcattttcaggtttcagttgggtgtgcctgcctccggtatcagccggtagggtagcatgagtagattttaccgagtcatgcgaatgaaaattataatttaacagcttaacctacccagaatatcttattcctggttggattaaccaaaacttcaggacaaatttaaatgtgtttgacgtttctatttgttcttccggttctacctgggatacattctcaccgtttggttggttaccgatgaaatttgaaggcccattgtccgcttgcaaggaccgggaaatttaaactatttgccacttttacgaatggcaactcttcaaatgctatccttatggttgttcttacacaattgtcatcggagagacgtttttaataatttgctacttttgctgatgtggcatgcccctcatactgccagcgtggttttgctgtgtaaattttccgttttacccctgatgggccctacaaatcggggaaatgggaaaaggagcaagagagagaggttcaactgccgtctcatcgtcgtcgattcgctcctgtgctcgccgccgtcgcagcagtggagggaggagagcgcggtgaggtcgggtgcctggggatccgttcgtagccgctcactgcctcacgcgacgcgtaatagtggcctagaagcggaagaggacgccgtcgttggggttcagcttggccgcatcgaggaagtgctcggccaccgccgcacggagcagccttttcgtggcatccgtctcattcggtgatgcattgtccggccgatgcgccggggctagtcgactccggcgctgcacggcagtcatatatggcgctatatatgcaaaaaaaaaagaaagaaaaaaaaaggaagaagtttttgttttctctctgacgatggccgctttagtctcacaggacattgacgacatcgatggatctgatcaaa

SEQ ID NO: 1048 - DNA, 2603 bp, Oryza sativa
tgctattgttgtccagcaaggggaaactacacacccattctcatcccagaatgcatgtccttccccagaagataactatgttgttcccatgcctacgggacatgttcagagttttagccctcctactaatatcaatgtcaagaagctacatcaagaggagaaaaacatctattcacaagatgttgctgaagaggacatgtccaatgagtctttggagggaagccagaaggatgaggacctatttcttcatgagaaataatttcctccatttatttagaatatggaagaggaatacaacaatggcaacgatattcatgatggtaatttctccaaatcaagcaacagtatcaagaattactaaataaacaacaaatcaaaggaggatgcatcttagctatgtttatccaatgatgttgtatagtttaccttatactttactcaagattaataaaaaataatttgtgtgtgattccagtggtttaccttgtgtttccatctacctttgtatggacaataataaaaagattattgtttgtttgataattcaataataaaacattcataagttgtatcatttatttagcaatacttcacaagctaaaaaaataatttgcgattgaccatttcttaatggcattgaaagctttaggaatttcaaagttaacatggtagtaagggagcctattaactataagatgttgttcctagaacatcattacaccgactttgtaggccctacccaagctacctcaacaggcaaaactattatgttcggtccatggtggagcagttgtggaggaaccctggtcgaagcctggagtacttcgaccacgactattgcttgcgctaggaagacatagttgtattccggtgcaacttcaaaatgtttgatcactaagtggtgatagctgagcgctaataattagcattcattttgccatcctttttgcttctttgacattagtgacatgaagatagctcaatggacgtgacttctatactagctttagtactcctagtcactctaggagctgtattataatttcagattctagttcatctagagacatggactctagtttcaccgggctagctgcccttctaatgacaatgtaatatacttgtgatcattcttcagtacatgatgtctggttctttatggcatttgtttaatgctggtatttcttatagtcaaagaaaaatccgcaagcacacggataccactatagcatttcacccaggagtattccaaggttattgcatttatattttcacagagacgacgatagtgtaaagatagagttcatacatttttattcaagctataattattttaccatagtctaaatatgggctaattgataaatgataatggagtagtgtgacacacaggagattcgtctctaatagatatatactaggcaagaagaactatagaaagcttaggttcatatatacttctatattactaatgtttagtttacacttaacacatacatgcttacagagaccactccctgttggtttgccagcgtggctatggtattttaattacgaactcttacttcatacccggatgtgaaggaattcaaaggaccgacatggctgtcaccacctgccacctacctcactttccatggggcttacccgcatccaatggcatttaattaagctaagcaccatacttatgtcaataaataatgtcaccaattcccctgggattcccacccttcggattgacaagttagaactagtgcaatccgttaagatcattggtccattaccgtagaataaattgactagcttaatcaagtgaagcatataaatgaagtacaatctactcattgaacacacaactagtaaactagtgtatgaactatgaacactaataagtaaagataactcctttattgcaactatagtgttacaagaagagtatagtactaaagacatatcaaaatctctgagaagactataggacctaaaattgttctaagcctaactccactactactagagagaaaacaatttatggaatgaaagaattgctccttgaagtgtgtgtgttgtgaagtgagaagctcttctccttttataacctcccaatgaaggttgtatggtggttactgaggtcggtgcacttctaaccatcattagggagggttgagatgttgccacttggaaggtggagatgacgggtgaccatagtggttcagtcgatccaagtgttcggacaatccctgggccccacctctccaccgcctttaaccaaagggtgctaggtgggcccctatggcaattgaggatggtgtggccccactttaggttagtttagactgacttgtgggcctatcgttccgtttactcgcacgtgattcgccggaggtgtgtttctttgcatgccagctcatttctttttcactttattgtgtaatctctgcatgtacactgattcatcaagacaagtggaattacattatttaatactagcatatgatagttgacggccaaaatcggtacttcacgaccatcaacacttaactacgttgcccatgtaagctcccaatagccctttgacattttgctatgttttatgttctttg

SEQ ID NO: 1049 - DNA, 4161 bp, Oryza sativa
tcctagctactgtagtgatgctgtttttttatgacaggcaaacggctagtgacatcatcagacaatggaattaatttagtagtaccatataccctttttttttcaagcagcagactgcaaactaaccattcaatggcactcatagattacagactagcatagttacaggatacagtactaagtgcatagtaatctaccctagtgctcacacgtgcaaatggaaatcccctagtgctttaacttgaaaattgccataatgccctctgaattgtataacataattgggtataatttcatatatttatataactgatttaactactaactgccaattgttcaacaaatagaaagtactcaactagtatttgacaattgttcaacatataagagtggcaatatgtgaaatatatagaggattgaaaattgtgcaatgtttgaggcagggggactcatgaattgaggatttaaaattcatgaacaattgttcaagagcaagaccattttttctcttcatattttagacccaaaaatccaacaatatggaaatgggataaatgcctctggattctcatggaagaattgaagaagaatcatgcaatgcaatggtagtgtagaagaatcatgcaatgtaatggtagtgtgccgaacgccattgccaataagtggatacggtagctctgctacataaattgatttcctttctgtaggacaggggaataatagacttaagtacacatgccaagaattatcattgctgagaggagttgcaactgtactctgtacttagatctgagtagcatcatacgcaggtaaatgcatgcagaacttgcagatcgagggaacagtgctaccggatgaatcgcaggatcaaccaacattcaacaaagacagatagatagagattgaagcttactgttgtggctggcggatgagtgctcgacccatcggcactccaggggaatccacttgagcaccctcccgtccgacacgcccgtgtacgggccgtcgccgtcaaacgccacgcagccacgctctccggcccaaccgcggacctgctcctgggggaccctgcagccctgcgccgacgagtcgtgcggccgcgccagcgccgcagtcgccggctcggcggctcgccgccgccgcacccgtacgcctctcttgctcggctcccgtgtctagggtttgggtattaggtgattagggttagatggggaggagaattggggaaaatgtcgaaatgggctgagctgctcctggccatcgggtccagcatcgaagctgctccggatcaagcgctgcaccaccatatggagcgctgctgtggattatgggaggcaacatcagatgaagcagcgagtggacggaggatgtagcggcggcgggaggcgatgcgaggcagcagaaaggcgggaggtggtgcgggagtaccgtcgcggctgctttcggggtggggaagcctgccgccgacgcctagagaggtgccgacgccgatcagggctaccggccgcggaagcgagatgccgccgccgccgccgccgcgggtgtggggaatgcagagggaaagaaatgagagtggatgagggttagggtttgcaaccctattttatacttcattggtgcaatgacagccattcgatcaagaatcaatggccagaaatttatgggccgagtacagtaacgggccgatttctgggtttaggcctactaatatatgtggtatttttttaatttcaatttatgagaactttaaatttaattttaggccaatttgtgtgtgttttaaatgcaaaaatcataaacaacaaaattttagaactcatcaatatctacaactattgtattggtatttttacaaataagttcatttgaacaattcaaattttgaattttcaaaatttgacaacttaaaaaaaattggggtaaataaatgatgtaaaatgaaaaagtcaccaaaatcaaagttgtagaactcatagagatgcaaaatttttattttggtcatttctccatctgactctatttgaacaatttgaaatttgaaattcaaagtttgagaccttcaaatagaattttttattagtgaacgacttcaactgaaaaagtcatcaacaacaaagttgtataatccatcaagatctataatttttattttggtcatttattcatccgataaagtgatagtaacattatttacaaattttacatatctcccgtatggtttcataagttataagagagatatgtaaattttgagaacaacgttactatcactttgtcgaatgaataaatgaccaaaataaaatttgtagatctcgatcagttctacaacttttgtgttcatgaatttttcagctgaaatcgtttactgcttcaaaatgtcatttgaagttgccactttttgaaatttaaatcttcaattgataaaacaaagtcacatgaaagtatgccaaaaataatagttgtaataacacaataaattgatagatcatgaacttagaaaaatttagaaaaaagaataatcaaatttgaagttagtatgagagagaaagactacctacaagttttagccaaagattaaaaagataaaccacactttatgatgaaccccacaagcaggtgatgcaggtcctagctcctaggtcgtccgcataaaacattcaatcattcatgcgttcaagaattgtgaaaggaaaactaaaagtattcgatcctagctgcagcatatttttttagaaaaaggtatttcatatgggctgcaagtagacagcatttgccatctcctggcccgaaaacacacctgggctgcatccgtgggccaaataactaaaacgaaaacacacctgggctgcatccgtgggccaaataactaaaacgaatgttgggacccactgtacctcaattatatgtgggtccagtaacaacctggttagccacatatacaatgtggggtcaatctagatagccacatatacaatgtggggtccagggaaaatctggatagtgccacatatacaaggtgggaccaataggagaatagatattgacttacatctgatgaaatatatttcagcataaattctattaataaaggagcatcataagtgagttacatgaatggtgcgcaacatttgtgacgaaattatctattgttttttgacgctattttaaatttcgtcatggagtttcgatgtctacccctgcgcatgagtgatccgtgacgaaacatgaattttcgtcatagatatgctctgttcaatgacgaaattatacaacgtcacgagcaaaacgtcatagatggacgatttcctactagttgcaggtaagttggagctgggagctagagctgtgccaaacagatcctaaacgtagttaataacaaaaacaaattacagattccgccaggaaactgcgagatgaatttattaagcataattaatctgtcattagcaaatgtttactgtagcacaacattatcaaatcatggtgcaattaggcttaaaagattcatctcacaatttacatgcaatctgtgtaattgttttttttcctacatttaatactccatgcatatatccaaacattcgacagcgtgaaaaattttattttgggaactaaacagggcctaagagcatcaccgagagactcaaaatttcatccccaaaatttagattttgggattattaaacagaatttgaggtttgaatacattgatctctcctagtgatagcctaaaattaacttcctaaaatttaaaagttccccatttaaaactaccaacaaaaaaaaatatttttttctctcccagaccgatgtgattccgaatcccggtcggccggcgacgatgttgctcgcccctccacgcgacagatctatttttcctcccctcattgacattagcaacaacatttagcagcattaggatgcaaggagcagcttcaggccttcagccaaagtaatcatcatgcggatcatcaaacaacgacatgtatcagcaaacatcagtagcaaactagtagcaattactatggatgtgactagacagctaccgatcgctgtgtaatcggatcgtagatcggatgagtagtttaagagaattttatttgaagcataggtggttcctatttgcttgatgaactattttcagtagagtaatggtttcag

SEQ ID NO: 1050 - DNA, 570 bp, Oryza sativa
tacctaagaccactggtagaagatcttaaacagttgtggaagaaggaaggtgtccccatgtgggacgaggacaaacaggaggagtttaacctacgagcgctgatgttcgtaaccatcaacgattggcctgcacttagcaacctatccggacagtccaacaaggggtacaaggtttgcactcactgtatggatgaaacagaaagtacgtatcttaagcactgtaggaaggttgtatacatgggtcatcgtcgattccttgcagcaaaccacccggtacggaagaaaggcaagcacttcgaacataaggccgaccaccgtacgaagcctaaacatcgcagcgggaaaacagtgtttgctatggttaaagatcttaaagtagtgttcggaaaggggcctggaagccagcatatagagagcgaagatggtcatgcggcgatgtggaaaaagaactctatattttgggagttaccatattaggaattcttggacgtacgccacgcaatcgacgcgatgcacctcactaagaacctttgcgtaaaccttcttggcttcctaggtgtatacggaaag

SEQ ID NO: 1051 - DNA, 607 bp, Oryza sativa
cgcaaggcgattacgccgtggacgagacgagtgagaggaggagagcggccatggcggggcggagtggcggcggcggcggcgggagctccgggaagagcgggacggggaggatggtgtcgctgcaggagttcgtctcgtccatggcgcctctcatagacctggagaaggttccgtactccgatcccccatcgcttttctttcgctgtttggttcggaaggtggaacggatggtagtggtggtgggtggtgacgcgtctgtggtgtggttgcgcaggcggcggagatatcggcggagtcggcgacgagctcgaagaccctcgagaggaggggttgcgtcatggccaacctcaagtgcaccgacgcccaggttgatttgcttccattttgctgcttgcttgcttgcccatcggtgccaatgtgtcatcgaggcgtggtgctaatcttgttctggccttgttggacctgcttggtgcgtagagtagacggggctgatggggaagacgctcctggagttccaacccaacaagggcgacgtgcttccacctcacaaggtgaggttacctttgccctcctgtcgtattgttgttattgctcgctgtgataaaat

SEQ ID NO: 1052 - DNA, 986 bp, Oryza sativa
  unsure (1)..(986): unsure at all n locations
cgcggtgaanatcaantactatatggcgaannccagctcggtacccgaggtcattgcaaacgtcgtaagatataacatgcatgagagttttgatcatttacattacataaaatggacgtgaagattattttgcacaaacaaagggcttacaaccaagccccattttactgtacagaaacagataaagcattcagcactgttccaggcatggagattatacttcacatgatagaacttgctgaacataaattgcaccaaactgaagatcctttgtaacagtatttgccatccaatttgccgccctttaagaaattaccatttgatctataagcctttcaattttaccatcaggactgcgaatttcttcattccgtgccacttcctttcggttcgagcgcatcgtctgtctaagtttgtccgtccgtccgtctgcctgctgacacgttcatctgttcaccccatcgctggtgttgccgttcagcccgctggccccttgcctcgggcatcccaacagtagcaccgcacgaagaccgtgaagcagctcttgggggtcgtcgtccgtctgcagctctagcctccagcgacagcttcttctgccagtggacaggcacccactgccgtcagatggcacggtaactatatcgaatgcccttcctcagccgttctgctgtgggctccgcacgactgctttcatggtggcagtggctgttcccggcgttccacagctgcgctcgccagcgctggcttctagggtactcgagagctcgtccatcgtcgccacatgcaccatgctcactggccttagccattgtgtgaatcggttcagcggcatggcaatggcgatggctcttgctcccacaaggaatcccctctccctttctttgggatcttttagaacaaaaaaacaagcggaaagtcatgcgaaagtcaagcgaaatttcgtggggatggagtttggtttctggtccccttgccgccgatggaac

SEQ ID NO: 1053 - DNA, 7495 bp, Oryza sativa
gctgccccgtgaatgacggatcgcatgaggcgcaacccgagctcggttcccgtttcctgctccctgcccgccgatggacgccactgtcccgtacattctcttgtgcttgttttttatagcatgctctcaattttgtgcttttctttggtaatcgtagtataaactcctccagagttgattctgagcctttcagccatggcgatctggttcttgatgatctgattgcatagatttggtctcttgtggaggggaaaatgttttccggctgagcggcaatggcaggtgtcggctacacctagcaagagtggcagtgccagctgacaggcgaacacagacggatgacacactcaaactgaaggaagtagcacggaatgaagaaattcgcagtcctgatggcaaaatttgaaaggcttacgggccagtgaattggatggaaaatactgaatttctcacctacctacctagtcaaccagatttatctgaaaaaaggaagaatggatgtattcaccctgtcaggctagtgttacgaatccactccatgtgatttagtgaattcctgcacaagcaaacaattcttcctccaacactcgatacatgagtatttggggatacaaatgggggaaaaggaatcaagactgagaatcagcagtaggttggagaagaagacatagctagagattggagaagagaagagagatacagaggttgaagaagagagagcatcggaaggaagaagtcaagtttcatctgttctgttctgttccctccccatttgttggctctgctccttttgtagtggctggagtggtcggcttgtcgccggattgggcctagccagccctgagctcaatatgcataccaatccggcccagttacatgacagctagttgctacatgaacaagatactgttgtatatactattgcaatgatactcctctataactacctacctagaagaatgaatagcacatccctcaggaagaagtgtataatcagcaaccatgtaagtttcagtagagaggcagaaccaaacaataagcaactttgcaagggttaagagaaagtatggcgggatatttgtgaaaagataatattttgttctgggaattatagcaaaagaatctggatgggagtagtgaaaaggatgtgtggggagataagaagtggacctagcatctgtgatgaagaaaagatccagcactctcccatcaggtgtggtggagaccttcactctacgaattgtgagttccagttcgcacagcactcgtgtcacgtctgcaaagcacagaagcaagcagctccaaattaggcctttttctagtaaaatatcttcactggaagcacttaaatattttttttagggcttagctcgctagtaatcctgagctcctaagtcttgtgaggaattgaagcaacattttgaagaaatgaagctgaagaaaaggtttatggctaaactagtaaatcagtttgttgcaaagagattggggcatatgaattggttgctaacttggtaatttcattcatcattgtgtggtgagattagggctcaaaaaagtaaaaggaaacccatggggcagagaaatgaaaagaaaagaaaaggtagtgagtactccaccatgcaagaggcccatacggtcgtagcagaagaatttgagcaagaagatgttgggagagggggcaggtgcatcgtggtcgtggaggtggagaccagcggcggcgaggtggtggttgtcgaggccgaatggcgcggcgacagggcagagctggatcaacctgtccttgaggaggtcccatctcattgccatggcgcggccgggccttgcaaccacccacagcacgatgtagcaccacctcccatcagtgctcatgtctacaatccaatccaatccaatctcttctcttggactgctataatgaggaaagaagagggaatactagaggaatgttatatattttacctcccttgacgatgttgaggccgaagaggaggacaaggcggcagaggtcgcagccgaggcccgtcttgtcggggcagctaatggtcaccacggttggctcgccggcgacatcgccgtgccggacttgcaccacctcgtcgctgggattcggaatccccatccaattctcaatctccactcactcactaatagctagctacttgttgtttcgtaggagtaccctaataatagatggaaattaatcttggattggaggacgctcgcatcaaatctaacaaaggatttgattgatgtgttgctaattgcgattgcttttgcttgctccaaagtccgaacaaggaggaggtcgtttggtcgtttgggcggcggcggcgggtagagcggagtcaagagcaagagcgaagcgagacgaggaatcttcgaggtggattcccccctttcccctccctctcttttcggatttccggccacttcctatattccaatttaccccttttttttttcttctttgccaaaggcattttattttatttatttatttattatgagatttgacaaacagtaatactgctctctctctctttatatatatatatatatatatatatatatatatatatatatatatatatatatatatatatatatatatatatatatatatatcataatggaattcattcccgttaattagctaggtcaaactttacacatactccacatataattcattaaatcatactcttactgcgacttggtgccggagaaaataaataaataaataccgtggtagcttggaaattggactggaaagtaaatccaactttagaatccttcacagcacgcatttgcgactaaatccactggtcggtcggtcgtctccgtctatatatgtgtgtggggtgatatttggactttgcaatgcaatgacgtgacgacccagccaccactaacctactactagtacactcgacgatcatcatcgatcgaattgttgctcacttggtccacagcaattccaacataaattcattcggtatatacgtactattctccatatactcggcacatgcacattttaatcattaagtacttgttaattagagccacatgcaaacatacttcctctataaaaaaaaatctagatgaagatttgacatcatctaagactataaatctggacaaacatatatccagattaattatcttatgtggtaataggttagtttttttaatgacagagagagtatgcagtaatcttctttcaacaatatactcaatcaatgaccgccccggtaggttaagtaagggtaggtcagatgcaaaagtataacatatatttacactgtagacgcgtccagtaaattgcagctggagtatatatatactccagtatctaactaacacatatcgtcctgcatcacatcactttcttcttaaatttaataaaattattaacggcatgttagttagaaacagtaatattgcatcttgcaatatcttaaccaactcatcaaactattcaagtgaaaaataaaatcaccaaaactcatatagttaggtttcttatgatggaatcagtccacccggatttaaatcctagacttatatgggtactcgcacatttatggctgtgtttatttcacgctaaaattggaagtttgtttgaaattggaacaatgtgatagaaaagttggaagtttgtgtgtgtgggaaagtttgatgtgatggaaaagttgaaagtttgaagaaaaactttgaaactaaacacggcctatggctatattcttttagtgttagccgacatgcccttgacattgagacgtctgtggtgacttcatcgatctcaatgtatatcggctcaatcttttaaatgtgacttcgtcgatctcaatgtataccggctcaatcttttgaatgtgctcatagatgtagggtgtacgcgtgttttaaatgtctgcatttgtaccgtatttaaaaaataaaacccgctcgcaatttagatgtgatatttctaacatacatatatataataaaatcgatagtgaagagaggatggcaacgtagatatattcatgattggagggatgaaaaaaattaggattttaaaaacataagagtaggaaaacgggatatattcaaaagcaaaacatacgattggattgccgtgacatgttgaatcctatgaaaagtagagtcacgggattgctaaaaatatgtgtttggatggctcacaagaaaaatataggatattttagattacgtgttacttaaattgagtaagagcagagggagaaagagtgatgttgctttggaattcccataggagaaagtaacttaggccgagtttagttacaaactttttctttgaactttcaacttttccatcacatcaaaacttatctgcacacacaaacttctaacttttccatcacatcgtttcgatttcaatcaaactttcaattttggcgtgaactaaacacacccttaaaatccaatggattgggggcattggaatgaattccaaaggatttttgcaagtccaagggtgcgctcgttcccacgggcaaccactcccgccacatcgtttttttcgcgcgtgcttcgcaagctgttaaatagtgtgttttttaaaaaaagtttatatataaaagttgtttgaaaaattcatattgatctattttttaaaaaaaatagctatacttaattaatcacacgctaatggcctgctccgttttttgtgccggaaggattttcctgtcactctcgatcggggcccaaatcttacaaaccaaacaatcttcataggaaaaaaaatcctaaggattccaatccttcactgtaacttttttaaggcacaattaacagacgatagcttattggcacatacataaagcttaattgtagcttctttttgaaggtataagaagagacatcgatctggttgtgtgactctaccagaacagcttattattattattattttcgtggaagatgtgctgtggacggtacatttgagtttgacagcgaaatagtggaggaaaataattaagcaaggccgccactgtgacgacgacgatggagttgataattagaggaacaagccaagccacctgcagctgggtgcacagtgctactggatatggtaacgcgggctccagaagcaagcctgcacatatatatactcgttgatcgttgataatagatgagattaagcagcaagcaaagaaacagaaacagagtaatctagtctatatagagtataaaaaatgttgttagttacctctcctcgatcttgatgaccttgtcgtcgtgtttgtcaagacggaatgctacgactaccggccttgaatgtgccagttcgtttgtagtattaccagcagctgctgctgccgagctaacaaaatcctccggcctgggtgcatttgagcattctatttgggactgtactagtggtggtgcattatcatcagcaactctgcaattaattaattttaagccgaagaagaatgtataattaataaatactgaatgtatgaatgtaatcgcgctagcaggtgcaggaggagtggccggcacatgtatatatacgtacttgagcttccctgctgcattagcattactagtactgattgtaccaccggaaaaacgatcctgctcatgaggcagctgctgcttattgacgagatgagacagaggagacagcaccggcgacaatggcaaagactcaacctgctgtagctgctgcttagcagccgcagccgcagccgctggaatgggaatggaggagccgcaaccgcaagcgatgagacgcatgagcaggttggccggcttcaccctgtaaatcgacatggaacagcttcttcttcttctgctgctgttatctgcgcctcctgctgattcttcttcatcatcttccagcatactcctgaagccggaatattcggccattatcagtgactcgaggctccggctgctgctgctgctgctgcctcttcctcctgccgctccctgcttttgggcagatggcgccgcaatcgatccagtaacagtaaaggagctgtcgtcatctgtctgcgttgccgccgacgcaaccaccacagctgctgcaggcctgcgcgcctcgcccactacttgcttctcgtcctctttctctttgctgttgttattatgggacgagctgctgcctgaagaagaggcagaggaggaagaagatgacgacgacgacgatgatgaatgtggctgagtcctacaggaggaggtgcattggtcatcgccaacgacgacgctgttggcgttggcgtcggtggaagaagaggatacaagagagacgtgagcagcagcggcagcatgaggtggcaaagagtgatgagcgctgctgctggtggaggtgatcaagggatggtggcgaggaggaggatcgatgaggtggtggagatggagaagggaggccttgaggacgtagtcgtggggtcctgtagggagcaggaggtcgtccgggtgggagaggtcatgccacacgtagccgccgcggtagctccgcttgcacgaccacgagtacatggccgccatccccttacctcgcagggcgtccagccgccgcgtcacgtctcgcagccgcagctgcacatgcacttgctcctcgccgtcgcccacctccacctccatcaggtgtgggtgctccagccctccctgccggcttcggcacagatagtacaccaccgccaccttcctcctcctcgtcttcttcttcttttcacttgtcgtcgtcaactcacctgctgctgacttcttgctgcgcccaccaccaccagcttctgcctgcgacaaccacgacatcgatatgatacaaagagatcaggaggcagagagagcctgtatctgtatgcatgcagatgcaagtggaataatattttggattgtcgatgacagatcgagctcgatcgatcttcttttctaactgtctgaacaacgatatatatacaacgtacgtaccacgcacaataaagatatatgatgtacctaccagtacatgaatgatcatcgatctctgtttaatttcacacgctagcttgctggcttcttcttcgatcggccagccagcccactagcgtacatttcatccctgtcgttacaactgcgttttaatttcttccatagtaccactacatactagtacaagctaagctaagctttttcaacaacaataattaagatccaatatactcaattcaaatcgatggaggatgcaattgctcgcttgcatccagggaggggagaggagaggtggaggtagcgtactcaagtgaacgacaagcagtaagtaagagcgtagagtacgtacgtacgtctgacaattaagccgttacaaaagtacgtacgatacgacacagttggtggcgcttgtatatggggactgttactccaactactccctccgtcccacaatacaagagattttgagtttttgcttgcaacgtttgaccactcgtcttatttaaatatttttttcgaatgtaaaaaacaaaaagtt

SEQ ID NO: 1054 - DNA, 1433 bp, Oryza sativa
aagagggcacgcgggcaacgaggtgcagcgaagaagcttgagggccggcacatcataacggaagtgcaagaagatggacgtcctagtgccccggccgaagccgccaagaactatgtacgtcacagcggttgggttgtgcgggataacgtgcctgtcagtacagtgtactggcgaagaacaagggcacgcggagatcatgagagctttgtcccagattcacccttcctcgaggaccacaatgctcgagacattcacccttcctgcgggtacagaggacaaagtgaaaaggtggactctgaagaaaatggcagaatagtttcagagcttcaagggagatctgtaccagaagtatatactgaaggggcagacaccgaacttcgacacattcccaaagctaagggatcactgggacgagttcgttgcatataagacaggtgaacaagggcaggcgatgatggaaagaaacaaagaaaatgccgccaagaagaagtaccatcaccacttggggtcaggaggctatagcgtcgcgatgccgaagtgggagcagatggaggctagcttgattgagaggggtatcgaaccggcaacagccaattggccggaacgatcgaagttctggtactatgctcacggtggaacgctcaacccagctgatggctcactggtcttcggcgatcagatacgagaggctgcgcgacgactaacagatgcagtgcaagcctcctctcagggcacgttccgaccagacagagatagggacgagctgacactcgccctgcagactccagagcatccaggacgaacacgagggaaaggggtgattccttggaagattggtttcaaggaggacatccacacgtacaggagtcggatgaggagcaagagagataccgaggcgaagattgcagacctagagttccgggtatcgagctacgaactcaacatgcaagaggaggtggcaaggaaggttgatgaacgcatggccgcacatcggtcccatgatccccagccgaccattcctcctgcaatggtgagcccgtcaggaaaccgtagcagctgcgcctcaacggggcaggtaggatcacagagcatggacgccatacaaacacaggacgaatcgacctgtcccgttgatgacatcactcagcggacaccatgtgagctgcatattcctttcaagaacttatcaataaaggtaagatttagccattccgctagttgctgcttatatatgttgattactaataaataatctctcacaacatgaaggtggcgtcgggcatggccatcccaacggacccttcaggtacttaccactgcaggccgattccagcaggatactcgaaggtcgaagttgagttggtccccaaggcgcgtacgaggacctcgagctggattaccctggaggagacggtgagacgcatctacgagac

SEQ ID NO: 1055 - DNA, 1629 bp, Oryza sativa
tttttcggagagcatggccgagttttggtagctcaagtcgtgtgtgacagacaaaccgggcggtccagaggattcggcttcgtgagcatggccacattgagggaaccagacgatgtcatcgcttccctcaacggacaggtgaggcgccacaactagatcagtgcatattattaccctgcttatttacaatttgttatggtcttttgtacaaatatttcccttactatattatttgaagagataattattatttttctaattgtaatccaccttcatgttaaatcatgcagatcatggatggccgtcccatgagagtgagctttgcaaagtggcaaccacggcttggttactaagacactatttaggagagcttttagttccaattctctctagattaacaatgctagattctcgctggctatcattgctaattacttcttacgatctctagctccctgaatatggctcatcaggagccagaatacgaaatgtaaatggaatgggggcattattcactagtgttgcaattcacgcagaacaaactaaatggatttcttatcaaagaataacaaatttcttattactggtaacaaaagatttcgttcactcctgctttgctagcctctcagagatcaaattcgttttaactcaaaaggaaaaagaatcaattcgtttatgcttgtctatcttattcttgttttgggaggagctcgtctatctgttgatcaacacgtaagcaaacacacagccacggggagggcccaattataaaacagcccactcgccttcatgtaatctttcgcgaaggaaaggcccagacgtccgatgaaattccatgtgggccgagaaaacgggcttttctctttttgttcatttttcttttttggagggatggctacgatctcggacttgatgtgtctaatacatatattgtatatagaacatggttgcacaaagcatctgaatccctacccacaaaacaacgtaacatggcaaactatatcttacgtgaaatctccatcaacttggatagtttcaatttctatcggctatgatatgatgcagccgtcgccgccttcgctccaccactgggctaccgcgcgaggaagcagctccaccacctccgacgtggcgtcgccgaagctgtacctcaacacgcggcaccgctcacgccccgccgccgtcgcccacgccacctgtggacgaagtaggcgcacccgctgccgcggcccacgcccagctgcgcggcgtccatggcgaggctgaccgggcgccccaggaacagcgcgcggtcgtccatgctccggccgtccttcctcacccacacccagctgccgccgccctccgcctccagcgcgtacaccgacaccgacaacgcgctcgccagcggcctgccggcgacacggcagccccggacgtcgctgcagtagccgctgtcggcgaggacgaacgcccagagcagctcgccgcgatattcgaggaggtggctggattggatctccttgcctggctcttttggccaccaccgactccacttgccttcgccggcggtggtggctgctccggtcgtcacgacgcaccaataattcttaccattggcagtagcatcttgccgtcgtcggtatatag

SEQ ID NO: 1056 - DNA, 1140 bp, Oryza sativa
aaaagacgtgttgtcggagtcgtccgtcaagcctgagtggaagagctagccctagaaggaattggagcacgcaagtgacgtaataatataaatgattgttatatttgtaatgcaattaattaagattattagacctgtaattggacttatcatataagattgtgtagtgttctaatattatttgagttttaatataagattactttatttgtaattagacttagtatgtataattattgactacggaattggtgcgacaagtagcaattgactattgtagtcttaattagacttagcatatacgcacgaaacacttagcatacatgactattttagtcttagcatgtaatattatttgagttttaatataagattactttatttgtaattagacttagtatgtaattattgactacggaattggtgcgacaagtagcaattgactattgtagtcttaattagacttagcatatacgcacgaaacacttagcatatacatgactattttagtcttagcatgtaatattatttgagttttaatataagattattttatttataattagacttagtatataattatttactagctagggttgtataatatacgtcacctagacttagcttatatcacgatttgtaattagacttagcacgtaaggttgtgtagggttctaatgtacgacatttacacttagcatacatgacttagattgttaaaacataaatgtctcgtaacttagcagatgtttcttgtatcaacagatggctgaccgcgatgaggaacagatattgtacgatacaatcgcggagggaagcagccagtactggaatgaagaagaggggaacgaggatccaaaccagtacttgaacgaggaaggaaacgtggagagggatgcggaggggaaccagcaggggcacgtggaaagggatgtggaggggaaccaggaggaggaggctagtggtagtcaaccctccgttggacagaagagggcacgcgggcaacgaggtgcagcgaagaagcttgagggccggcacatcataacggaagtgcaagaagatggacgtcctagtgccccggccgaagccgccaagaactatgtacgtcacagcggttgggttgtgcgggataacgtgcct

SEQ ID NO: 1057 - DNA, 1164 bp, Oryza sativa
gccgtcatacacgcagcccgcttgctcacgctgttgtcacccgcgcgacaagcaccgatgtcgtggtgaacgccgacggcccacgctggcgcctggcagcggagttggtgtttgagtgcaagacgtgcaacaagaggttcccgtcgttccaggcactgggtgggtacatgacgagccacacgcggctacaggcgaagctgctgagcgaccccgccgctgcggcggccgagaaggacagggcacacgtccacgagtgcgccgtgtgcggggtcgagttctccaccatcaccgctctcactgtcattctatggtctggagagcacgaggaagagagggagaggtggaggaggaggaggctggtggaagaagatgaatccctgataggtgaggcctatatgggttccacttttttttacgctgagtgccacgtaggacgaagacctagtcaatataccatgtggacatgacaagctaaaaccgacagtatatttactccggttttcggatttggggaggtgttatacctggttttatggctgagggatgcgaagcgacgaaggcaagaatgagggagaaaaaatagacttattgcatacatatatagagtagctagcagctgttgggtaacggtaacgcaacgcaggcccagagagcaagaattgaagcaaccgcatgtatcccttcccaccacatccttgatcaaggaacggaagcactcaaatctttgctcctacgcatgcacccatcaattcatatactctattgatccaatgctgtgttgatttgcccgatgcttaatcgatcagagacaatgaagcaacacgcgggctagctagtattagatcgacaaggaggaaaatgaacaagtgcaggtctagcagtagcagtagcaatagcagggccttgtatgctctcctcctcacttctcttatactaacagtaataatattgtacctcccgccttcacctgatcctgtttcccaatcccaattcgaattcgaccaactaaagcttgacgatcatccgccgccaccgcagctgcaccgccgcaggacgaagcggtgcgccgagcacctcaggtgggcggcttccttcgcctttaaacacaatgccaccctcttgctcaccgtcgatcgcaaccaggccgccggttgcgccaacttc

SEQ ID NO: 1058 - DNA, 1716 bp, Oryza sativa
cgtacaatacaaacctcaattcagcttcattcattttattcgttgcatgtcaacacccacacatgtcaaaatgctgtttctgcatctcctagctacgcctcgccaggtgatgctgcaaccactagcttattgcaattcaattgccggcacgaatcagtttgctactacatcacacaattcacaacccaactgactgacaatcgttctggtcagcccaggaattacaaaacacaccaatccccccttcttctcctcccactagtgtccatgtgagccattccaaatttgacctaccggagcagtcctcccagatctgcaacacataatacatggcataagcatgactgccctctctgttttttttttaatctcattaacacaaaatccatttaaaagtcagcatgcctataatattcaccataatgcaagcaacgtcttaagacaatacagataaaccttttctatccccagttactaccaacacctggatctaagcaaagaaatttacaaagggaaagtttcaactaaaccacacacgtagtaagaggtttcacccacagcaaatctgcgcctggaaggagtttttcacaagtaagaaagcatatctctttttgtgattggaatgagtttttcattaacataaacaaaggaaagcagcagttattgccagcacattttggaaaacagagatcgatagcaaaaggtcatatatcaaatatcgagagcataaccgccaaagtctcggtgcaaaattaattagccatgcatttcccacattcatattattgttaatgaatctagatatctagattcatttacatcaatatgaatgtggaaaatgctagaatgacttatattgttaaacggagggagtaattaatttatgatgcctacttctccttatgattcatgccatccaaaaaccgaaaaaatgttgcctgtggactaaacagatcttgcaacaactcaacataacctcaaacatggctaacatgtatgtatcgaaatgccttctaagatactgaaaagtccagatatttaggcctattaaagtttgaatcttttcattcagagtaacacaattactagaaatcatcctgagctacaaatgttactctgaaactgctgtccaaaaacatactgtactacctatagcagttgccttaaaaaaagccaacttatttatgccaatgtatcagcggagaaattggatgtggtattaacagtaaatcgatgtccaaaacccctcactctcccagcattttccattgtccaagaatattagtgacccagtagaaattagtgaaattggtgcttgggattgaagcgatgtgaggaaatgcatacatgttgtgatcaatactaggagaatatctgaggcaccgtaaggaacacataaaaaaaaaagtaccttcctactccaaagtggaggtagagataaccctggcaccaactctatcgagctgagcaacagtagctgttgctttgagattgccggcattggcgaatgcctccaccatcctccggccaacctcctcgcccttctcctccccgtcaatgacagccacagcagttggccctgctccactgatggtgcagcccaatgccccagcttccaacgccgcggccttgaccgcagccatgccaggaatcagcggcgccctggttggctccacgatgccgtcggaggacattgcggagccgatgagggtggcg

SEQ ID NO: 1059 - DNA, 697 bp, Oryza sativa
gggtgtaaactgaaaggcactaccacatatgagaatggcatgtgggacccagagccacacgccagtgacatgtcaaatggtaatgagaaacataacctctatatttggggtagatgggaggattatgaaactattattttgtattcaacgtgaagatgacaactagaatgatatgtacggtcctgatgttccactattatattttgggcatttatgaatgattgtttaactaaacaactgactaactgatggattgacatcattttcgtagttccatttttttttaaaaaaaataagtagttgtaaaaatatttccagaagacatactaattttcagttctattggttataggaaaaaaaacatgtgaatttcaagaagaaacatcgggtcatatgttgttgtgttgtcaaccatgcatgtcacatggaggtcgatgtgcatgaggctccagtatgagtatcacaaggttaggttttaatggaaacattaggaggcgcgagaaaaatcaagtaacgtagcaaacacttggtagcaggaacagttgtggctgaaatccataggtgaaagataagaaaggtcattttcatactttcgagatcttggattaaaatcttgaggtgtacacgttcttcgtcttggcgtatcttcatctctgttgttaccaaaacatgagagacacaacatttataggtcgcg

SEQ ID NO: 1060 - DNA, 664 bp, Oryza sativa
cctgcagcccaactctgtgatgcttgccgaaggtaaggcggggacgcgaacctagcaggctgtgtttggttgctacaggtaagttcacgcatgttatgtttcataacatttcaatttcttgctaacatgttggaagctaacgtatgtgacgcaggtttggatgtggatgaggcttccagttggtcggcccatgtggaggacccatcaggcttggccgcaccaggatgcagaccgacgtcccactgtagctcacctgtgggaatcggccccatctccagtagtaggccgcaggaatttggcgtactaccactacacaaacgagatggactacctacagccagaacatgtaagctattcggggttctatcacacatgaagatggtttcttactatatagtactaaatgtgcttcaatgtgttttatttttgttgctgcaggtggtgtggatgccatatcaggcacaggaagtgctcgagctagaactgaatcccatgtgccatatagaggatgcgttgaagaccctacggtgcccactgatctgcttctatgcagtggagttccagatgtgccaccgcgtgatgcggcaattcgggaggcttcaaacaatcccgcaccgtttcttcacgagtatcgacctacacaagttagtaatttcacttaaca

SEQ ID NO: 1061 - DNA, 614 bp, Oryza sativa
ctaagttgctcatgcgtatggcaagtgaaatcttcaactccatgggtggtggaatcaaattgggggactgcaatgatgatgtgatggtgctgtcaaagccagaactttctgttggtggtggggagtaattttgctcctgatggttatatggtttttggcttattctagaaaatctttgagatgaactgatctacgtctgctggttcctttgccaacatgtttctctgggagttcctaaatgtgtttctggtagcatggcatggaactggattttgttcaaaactaattgtttctgacaaaagagatgggggaggttgaggtttttcctctctgtttcaaaaaacaaatgttacgcacatgctaaatgcctaaccacaatcaactgcataacaggaagctcacaccagcataccttgacccaatttcagtattgcagcagttatgaatatgctcaaaacctgtttaaatactcctgcatcaaagatatcacttggtgtaccaccattccaagcaattataatcatggcctgcatgaaacataaaaacagcaaacatttatattttctaataagccatacaaccaagaaaacatgagcaatagaaggcatggattg

SEQ ID NO: 1062 - DNA, 532 bp, Oryza sativa
gccccgtttagttcctaaaaatttttcccaaaaacatcgcgatcaaatctttggacacatacatggagcattaaatatagattaaaagaaaaactaattgcacagttaggggagaaatcgcgagacgaatcttttgagcctaattaattcatgattagccataacgtgttacagtaacccacatgtgctaatgacggattaattaggctcaaaagattcgtctcgtggtttccagacgagtaatgaaattagttttttcattcgtgtccgaaaaccccttccgacatccggtcaaacatccgatgtgacacacaaaaattttcatttcgtcgaactaaagatgccctaacaaggtcctaaattaaggttaggttaggttggaattccgtctttccttcatgaaaagttggcgtagatttgcagcaacgccattccatccatctgttatctcccgttctgtcttttacgtagttttgtttctttttgttgttgagaatatagaaaaatgaaactgctactagtccatatatat

SEQ ID NO: 1063 - DNA, 604 bp, Oryza sativa
gccgccgccgccatttggtactcggtagtggtggggggtttgggtggttgacgagtgggagtcgagtcgacccgtgtggtggagtgggtttaggtaactgagactgacaagtatggcccaccaaccaatcgcaaattcaccatcccatccaatcttgacgacgatgccgccgagatcgccgcttctcgccctcgtcttcctcgccgccggcgtcctatcctcggccacctctccgcctccgccgccgtgcagccgctcgtgcgccgccctcaactgcgactgtgcgtcgtgagcgcttacctccaactgattggcgtcccccaccatctaatcctccaactctttgtctctgcagccgtagggatccggtatggcaagtactgcggcgttggctggagcggctgcgatggagaggagccctgcgatgacctcgacgcctgctgccgcgaccacgaccactgcgtcgacaagaaaggttaggagtttctttcttcctctctggatctctctaccaattacttcactcctacaataataagcatactacacatttactctaactcaattcactgtcttagacttgaatgattgcacacgaaacaat

SEQ ID NO: 1064 - DNA, 532 bp, Oryza sativa
tagacatacatattgagatgcaatcatctaatgtgatcgatgattataatagacgcaggaaataattaatagatagatgtgctgcgtatatatacactgttgatgggtggtaaaaacagcgatccgatgagaaagatggatcatgcatatacaaccaaatcggagtacgtagctagggaggtgtgttgtggtgggcggtggcggtggcggtggagaaatcgtgcagcgtgggcaggtcgacctccccgcacctccggcagcggccggggagagggaggaataatgtactagtcccgacggtggcgcggcaggaggggcaggtggcgtgggtccccagccacgtatcgatgcaggagacgtggaaggcgtggccgcagtgcggcagcaagcgtagctcctcccccccggcgaactcagccaggcagatggcgcactccgcctgctgctgctgctgcttgagtgcgaaggacacggtggggagcgcgtcgatggctttcttcttcaggcctttgggtgcaggggatgtagcagc

SEQ ID NO: 1065 - DNA, 1866 bp, Oryza sativa
cgcgcggggcatggaataaaatagagtatgaggaggagaggcggtgcattggagtatggcgggtacaagaggtacgtgtggcgcgtgctgaagcaggtgcaccctgacttgggcgcctccgcccaaaccatggacgttctcgacatgatgatggccgacatgttcgagcgcctcgccgacgaggcctctcgcctcttcaagctctccggccgccttaccctcaccttccgtgaggttcagtccgccgtccgcctcgtcctccccgccgacctcgccaaccacgccatctccgagggcaccaaggccatctctaactacctttcctaagctagctagtctctgtttcccttcttttaattgcttcagtttgcttagctcaacagagtatgtacgtaggatcgattaagtgcaggggatttgaagctttagttgtagcctctgtacagagctactagtagatcagtctgtaatctcccttgctagctaatgtgattgtgatgtccagtcagtactagtacctgtttgctgcttaattaccgtcctaacaatatataatttggattatttttcagcaaattaattaattaaatcactgcacgtacacacatgcttgtacagtgatggattccgtgctagcttaacactacagttgcaaccagggtggatatgtttgtataggaactagctagaagggacgacgtactcttaatttggcgactagtaattagatagagagtccgtacgtccagctaattaatttagttgctgggttgggtcagtccggaagaagaaatggtgttgatcctgcgggagtggaggaaggacttgtggttgccctctgcggaggcgaggtaggcaaggaacgcggccatgtcggtgtccatgtaccgccgcggcctgccccgctgctcgtccaccagctccgccggcggcccgatcacacgctccgccgccaggctgtgcagcgacgccaccgacacgcgcgcccgccgaccgttcacgcgcacacggtgcagcacgctccggtacagcccgttgctcagtatctccaggtggtcgcccacgttcaccaccaccgcgccgggaagcggttccaccaccgcccacccgccgccgtcgccgtagctcacctccagccctctcacctcgtcctgcaggaggatggttagcaggccgtagtcggagtgcggcggcatgcccagcgtcagctccggctccgggcacgccgggaagcagttgaccatcatcatctgcgacccggcgtcgcactcctccagcagctggcggcggcaccgcacgatgcccagcgcatccagcgccgcctccatgagctcccggaacagcctctggcacgccgtggcgtacgccgcggcggccggcctgaggtcgtcgggggcgtcgggccaggaggggaggacgtcggcgaggcggcgcgtgtcgcggatgagtagcttgaggaagtcgcgccaggagaggacggcgtcgttgagctggttgaagctggtgccgtagcggacggcggcgcggatgtcggcggacatgtagcgcttacgggcgggcaggggaaggtcgaagaagaagcggcgagcggcgtacagcatggcgtcggggggcacgccgtggttgagaagctggaagaagccgtagtcccggcaggcggcgtggagcgcggcgagctgacaggggtctcgagcacggagggcggcaaggtcgacgacggggagcagagcaggtggtgtgacgtagcgggcggggcggtcggcgggcgggaggacgtagcgggcgggcagggtggtgatgccgctgtcgcacagctgccggacgcccagctcccactccgacgagcctgagccttcgccgatgttg

SEQ ID NO: 1066 - DNA, 730 bp, Oryza sativa
  unsure (1)..(730): unsure at all n locations
tttaccatcaggactgcgaatttcttcattccgtgccacttcctttcggttcgagcgcatcgtctgtctaagtttgtccgtccgtccgtctgcctgctgacacgtccatctgttcaccccatcgctggtgttgccgttcagcccgctggccccttgcctcgggcatcccaacagtagcaccgcacgaggaccgtgaagcagctcttgggggtcgtcgtccgtctgcagctctagcctccagcgacagctcctcctgccagtggacaggcacccactgccgtcagatggcacggtaactatatcgaatgcccttcctcagccgttctggtgtgggctccgcacgactgcttccatggtggcagtggctgttcccggcgttccacagctgcgctcgccagcgctggctcctagggtactcgagagctcgtacatcgtcgccacatgcaccatgctcactggcctcagccattgggtgaatcggttcagcgccatggcaatggcgatggctctgcttccaacaaggatccccttctccttttctttggattcttttagatcaaaaaaacagcggccaagtcaagcgaaagtcaagcgaaattcggtggggatgagtttgatttctgctccttgcccngcgattgacgccactggcnccgtacattttntttgtgccttggtggntctagcatgctcttcattttcgggcttttcttttggagaatggaggata

SEQ ID NO: 1067 - DNA, 1007 bp, Oryza sativa
aggccagggagcaggctgaggagggaggagaccggcgagggtgcggggaggccgggagagtcgtcggagtcatcccccagccgccgccgtcgtcgtcgttcgagccgctcccgccggagtacgatgagcccagccatactcgttgctgcgacgaccacctctggcccgacgacgaccgccgtgccccgctacccttccccgacacctgctcgctcgaattttgcgcggcggcggagagaagcgccgcccgcctcctccctctcggcgcgctcgccgcatcccctccgcgggcgcttgccggcattgcagctcgtctcgacagcctcccctccgctgtcccctcctcccgccgcctcgagctccggcgggcgcggtggggagggcgagacgggcggcgggcgccgaggacattaaagatgacaacggcgagctcgggcatgcgcgccgacctcccgatggcccgagagagaggggtgagagggggccacttcgtcgccctcgccacttcgctgccctccgccgcgacaggggagcacggcgccatcacgcctgccccaccatgcccgccgcctgccccggccccaccactccccgctgcgcccgccgccgcgctcgccgcccgtccgcgtgccgctgccgccgcccactgcccgttgacgcacgcttgagagagagaagtggaggggagggagaagagagagagggagggagaagagagagatagggaggggtggggatctgacagtgggtcccactaattattttaagagagggtggatgaggtggaggccgacatgtggggccagtgccacgtgtgcggccacgtaggactgccacgtcagcaagtctatcccaaaaccacctaaaacagtgctagggggtaatttgcccagttttaatagttgagggtgtagaatgtctggttttgagttcgggggtataattcggtcgacctcgatagttcaggggtgtaattcgtacttttttcttataaaaattaaagatga

SEQ ID NO: 1068 - DNA, 677 bp, Oryza sativa
gcaattttcttttgagtggtatttctcattctgattatgatcatgttgcacatcttgaaactgctcatgagatttggaatgctttgaagaattttcatcaaggaacaaataacattaaagagcttcgtcgagatctttttaaaaaggagtacattaaatttgagatgaaatctggagaggctttggatgactatctttctagatttaataaaattttgagtgatcttagatctgttgattcttcttatgatgctaattatccacaatctgagatttctcgtcactttttgaatggtctcgacatgtctatttgggagatgaaagttacatctattcaggagtctgttaatatgtctactttgactttggattcactttatactaaattgaaaactcatgagatgaatgttctctctcgcaaagttgattctaaatcgagtgctttggtttcttcttcttcctctttggttgttgatgcttcttcatctatgccctcttttcttgctgcttttaatgccacatctgatgatcaactcgaacaaatcgaggatgaggatttggctttggttgctaaccgaattgctcgagctatgaataatgccaggaacaggaaaagaggtggtccaaatcgttgctttgagtgtggttcaattgatcatcttcgttcgcattgtcct

SEQ ID NO: 1069 - DNA, 4032 bp, Oryza sativa
gccccactcgtgctccgcttggaccaccgccgccgcggcctcacgctgtcgtcctcaagatgctgccggccggcgcaacgacggcccgcctctccacgatggacgccggtgcccacctctcccccatcccctccacctcgccgcgcgccgccgttcgcgccgagcgctggcctgcccccgcgcgccgctgcccatcgcatcccctcgccggcgctcgcctctccgccatggcgtgccggcgtgcacggtgctgcctgctgctggccgatgaagagagagaaagagagatggaggaagagagaaagagtgtatgacatgtgggtcccactatttttaaaaaataaaatgctcactagactgccacgtcagcaagtctatcccaaaaccacctaaaacagtgctcaggggggtaatttccccggtttcaatagttgagggtgtagaatgtctggtttttgagttcgggggtgtaattcggtcaacctcgatagttcaggggtgtaattcgtacttttttctttttataataggttgaaatcgaacacagctgacaacggatgaaaaattctaatgataatatacatttttcatgcataatcatgtcaatgataatgtttgtattttaacgagcgacttgtttttctataaacaattttttttcttgcgcgattttctcaaaccatttttaaaaaatggcgcatttctttctaacagttttttcctagcatgttctttttgtttttttactgacgacgaaaaccatgtttttctcccttttttgcttttcttttcacatgtgtttttttgcatgttttttctgacaattattttctcgtgcgttttttgcttctttttttcgaatgttcttttttgtttttttccaatacatgagaatatacgacgaaataaaaaccgtgtaatagatgacaaaaaaatcgatggatcctatccggctcaagcgtccatcaatttagcgtttattcgacggatttttcagagcgatttgtttttcaatagatgatgtttttttcttgcacggtttttttaaaccatttttttagaaatggagcgtttttccctcgcgcggtttttcttttaaaaaaaatcgatggatcctatccggctcaagcgtccatcaatttagcgtttttttctgacagatttttcagagcgatttgttttttaatagacgatgttttttcttgcacggttttttcaaaccattttttagaaatggcgtgttttttctgacagttttttcctcgcgtttttttatttttttatggaagatggaaaacctttttagcgtgtttttttgcgcttttttctaacttttctcatacgtttctttgaaccgtttttattgtcgtgcattttctctttttaaatagttagattagattagacatagcgaagagatatatactgattagaaatcggaatttggttcgcccttttcatttctttctcgcgcgcattatttattttatacgaaccagctttttattttttacgaaccattttttcttcttagagaattggacgaacttttttagatgttttttgggattttttttcatctttatagcaatcagaccattttttcctttttaaaggaatcagatctagcatttttttcaccactttttttttttgccttttataggaaacggatctacggttttttttgccacttaggagaaacggacttttgttgttgttgttgtttttctttctttttctttattttcttttattgtgcggtttttctttttctttttatgcacctttctgcctttattcttccccttttattattttttaataaaaaacgaccttaatatcttatttcaaacttatagggattgaaatgtaaatataaaaattacatggactcaaatgcaaaagtatagatccaaaaattaaaatcatataaaaatagaatgctctcgaccggtaggtttcgtttttgcaaacagatcttcaatctggcataacaattttatttttcgtttttaaggttgatttgatctagagtcggacttttttttccctttcttatagcaaatcggtaggagtcggacttttttttaaattttttttcgctatattttttgacggacagggaattggtagagtcggactttttttttaatttttggatcggactcttttttcgtccggttttttcccttggttttttttcgccagttttttttcgctcctttttttttggatcagacgtttttttttctccaggttttttttggatcggactctttttttcgtccggttttttaactcggtttttttcgcctggtttttttgacggacgatggaagcacctcttatttctcttattttgtagtagagaattgcactttgagacacctttttaaccagtcttgcatcttggactggggataaactaagcttttcaccttggaccaggtatttttcccaaaatgtttcaatttaggcttcttcttcctctagctccccctctctttctcttctctctactaacggtaatcacatgagaatcccgacctccccacccctgcaactatgggcatcagaagtagaagtcatgcttgagcacgttgccggcactgtacacgcttgagctctatctgcattgctgccgatatcgtgatggggatgttggaccagcttagcacgagcaagggctggtgaagatggaggtaaagccggatagctcgtccaatgatcttgattttggcacatgtctcagcgcgcctgatctcggtctggtggaaaatttgcggaaataattcgaatggaaataggagaggaatcaagcgaaggtaacatcaagggggagacaacaaaagaataattttattggccccttgctctctgctgcctttatcatcaccaagagccactaccttgccttacttcgcttcctctaattgaccactgagtggtgagtagatgagtgtgcctcactcaccaagacctgctgctgctaagtgccattgccaacatgaagcctgccacagatggaggagtttggtgattggagtttgggagaggacagggtgaaggagatgaagagagagggtggtctagactgcaacaaaaaggaaatattaactagcccaaactgaaaacataggtaaaggggtagttcaaagtgaaagcttggtaataaaaggtggtccaatatgcaatttactctaatttttataatagacataaagatatataaacatatcaataaatatatgattttgttgaagtattttttttagattaatctatacatatgagctctgtatttttaagataaatattttagaaattatttataatgaaagatttcaaagtttaacattaagcttatccagaacgataagggttattgtaaaatcaaaggtgttttttactattattctgtgatgaacaattgggcattggagattattggttttgttatttggaatttattcacgaagtggttttggagatgattggatttacaggtaaatttacaggatactgctgtgattttatgtggaccggtcagactgggctctggtagccggtcagaccggcgtgtaatgcgcggtcagaccggtgcagcccgcggtctgaccggccgacactgtgtcggtttcggtttcgggttgtttatttggatatccgagtttattccatgattatgacttctagatggatactatacgtatgtaatactattgtttgctgctaatgagtcaagttggagatagcttggtttcggaatatggtttctttgtttgttccatgtgtaggtgactcgatgtctcgggagagtatttgcggtgatggaccgggagtcggcttggggataagacgacgtccgtggtggtcagagatcatgcgggatacttaggctagagttgatgcacgtggttgatggagattccatatggcatacgatggaggaattgtgtgcgtatgggatgcggagtcgaatttggaaggagtccaaatttggtacgtttggttatgtaaagtttcttt

SEQ ID NO: 1070 - DNA, 7296 bp, Oryza sativa
  unsure (1)..(7296): unsure at all n locations
ttcccctccacctcctccccttcctcatcccctcccctctcctccacctcctcctctcccctttcctcccatcctccccttcccattcggcagccggcggggccatgctcggcggcgggccggtggccggcggggccacatgcggcggccgtggcgggcggtggcaacggcgttgttttctctcttttttttaattcatgattcatatgtataattttgtgatttattggatggatttgagatgacctgtgatgaatttgatttgtgtataattttttaggatgtatttgatttgtgtgtatatgtgactttaagatttgtgatgtggatttgggatgttactttatttgtgatgtagatttgggatgttattttgatttggggatatgcatccggcatcccacttgatttgggagaaaataaaaaaaagaaaaggggaccatctaggactgccgctattctctctttactccgatttgggagaaaattaaaaaaaagaaaataaaataaaaaaagagaaaaggggaccatctaggactgccgctattctctctttactccgatttgggagaaaataaaaaaaaagaaaaggggaccatctgggactgccgctattctctttttactctttgggagaatactacttaaaaaaataagaggtgcttccatcgttcgtaaaaaaaccgggcgaaaaaaaccggatgaaaaaaaaaccaatctgtccgataaaaaaagggtgaaaagaaaaacaaactgtccgatcaaaaaaccgggcgaaaaaagaaaaaaaaaacaaattcgatcaaaaagaccggacgaaaaaaaccgggcgaaaaaaagaaaaaccaaatctgtccgatccaaaaaaaaaaaggcgaaaaaagggaaaggaaaaacaaatacgactacgtcaatgcagtaaaaaaagagcgaaaaaataaaaagaaatctaaccgggcgaaaaaaaaagaaaaaccaaatctgtccgatccaaaaaacgggcgaaaaaaaggaaaaaaaacgaatccgactacgtcaacgcagtaaaaaagggcgaaaaaaataaaaaaatatgtccgattccaaagaaaaataaattatatgggatgcttatatctctatctctactacttaaaaaagagatgtttccttctttcgtgtgaaaaaaatcaggcgaaaaaaatcacccaaaaaaagcgaaaaaaacgggagaaaaaaagttgggaaaaaaccgggcgaaaataaaatccgattctgtgtaaagaaaagggcgaaaaaaacaaaaaaaccaatctgtcctattaaaaaaaggaatcgggaaaaaaaatccgatccaaaaagaccggacgaaaataaccgggtgaaaaaaagaaaaaccaaatctgtccgatcaaaaaaaaggcgaaaaaagggaaaggaaaaatgaatccgactacgtcaattctgtaaaaaaagagcgaaaaaataaaaaaaaatctaaccaggcgaaaagaagaaaaaccaaatctgtccgataaaaaaaaggggcgaaaaaaaggaaaaaaacgaatccgactgcgtcaacgcagtaaagaagggcgaaaaaaataaaaaaaatctgtccgattccaaagaaaaatgaattacatgggacgcttatatctctatctctactacttaaaaaataagagatgtttccttcgtccgtgtgaaaaaaatcaggcgaaaaaaatcgcccaagaaaaagcgaaaaaaagggcaaaaaaaaagtcgggaaaaaaaccggacgaaaaaagaatccgattctgtgtaaagaaaagggcgaaaaaaaataaaaaaccaatctgtccaattaaaaaaaaggaaacgggaaaaaaatcaggcgaaaaaaatcaagtaaaaagaaaaccaggcaaaaaaacaaatccgatgtaaagaaaagggcgaaaaaaataaaaaaccaatctgtccgattaaaaaaaagaatcaggaaaaaactatgcaaaaaaaatcaagtgaaaagaagaccgggaaaaaaaacaaatccgattccttatacgcggtaaaaaaggcaaaataattttaaaaaaagaattatgtccaattcaaacgtggtaaaaaaatcgaatctattatatgtgaaacggtactatatatctctatcttctccatctctctctcttctctatatactacttaaaaattgaaaatgtttccgtcatccgtaataacaaaaaaaaagggtgaaaataacattaaaacaaaaaaaaagtctgattcaatttactttcgtcatctgtaaaaatcttatcttatcttaaatggtccaagccgcttggcgctcgtcaccgtggcacgcctagccggaccgccgatgccgtggcacggcttttcgccgcccttgggtgcctccctctcctcagccaacaaagcaggagccgctcggcggtcgtcaccgcacgcgcgcactagctcaccggggccgtcttcaccgtcgttccgctcgctcatcgctggagagaaatgggatcaggagagagggatttgggagctagggttttgcccctctcttccggttggcacttcaaccgacgcggggacgatcggagccatccattagatcggatggctcagatttgcccagcgttgggccgctgccgctgctaattacgctgcgcccaatgggccacggaagtgcatcggaccgtcctcatatatgtgggccgcgctcagctgctcggcttgcgggccgtcaaattgactcagctcgctgaagatgagccagcccaagtttgggtcggcttgggaagatctgggccgaaagcaaatttgatcaaacaatgtggctcagattttttaaattaatagaaaaaatgcccgcgcgttgcaacgggtgaagtctattttaatcttattagtgttatatggttctagttaagatgaaattcattggggattcgcttgaatatatatatatatatatataaaatcatgcgctgcagttaggagtctgattgtctcaagttagcatgtgagttttttttaaacaagtttattagataattccttctgtattactaaaagtgaacgatcttaaaaattgactcaaatacggatatgtatttccaaaagcaaacttacttaaaaaccgattcaaatacagataacgtaccaaagtactgaaaaaacatcttcaatttttatattttagattaaagtcgtcgaataaacttctaagtaggctcgaaaaataaatccaaaactaaatcctaaaccctatgctaattcatcaaaatagactcggttcaaactatttgttgatatatcacttgatttttaccgatctaaggttttcatggtgccactatcaaatggtgtttttcccgttgcaacgcacgggcactattgctagtaaaaaaaaaagaaaaggggatcatctgggactgccgctattctctctttactcccggttggttggtgttaccaaccgggactaaagacaatcgggacaaaagattcatctttaatcccggttatttgaaatgggactaaagatagcgatctttagtcccggattcgtagtcccggttaaaaaaccgggactaagaggggttatgaaccaggagtaaaaaacacttctccaccagtaaaaaaccggggggtcatgacggcgccggatgggagtcgatagatggatgtgtgttgatcgattgatcttccagcatcgaacggcacccggcgggccacacttttggtgtgccatgctgccgccggccggcggcgcgcacgttggcgtgcccttccgccgaggctctgtacttgttttctcttgtgtgtgttcttcatatgtgtgtagatggatctgcttcttctccgttgtggttctccatctctgcccgtgcatgcatgtgctgcaaaatactataagaagaaacaatgtaattagcgctcttacctcgggcaaccatcgagctcggctttcttcccatgatggctgatggtcagatgcacctcctcctgccagacgctgntgccgagcgtgggccgcgtgcaccgcttctgctccggcgaagtcacgtcaacaaggcttgtgccatagcgatgactgagtacctgctcgcgtccgggttctacgcagccgccgccgatggatggatcgatgtgagttgaatgattgtcgatgcccccttctggctgcctctcggtggctttatataggccgcggggccgccgcccgcgatctcaccgtcggttcacctccgatgccctccgggccgaaggatcacacagataaccgtttgttgcatcatcctggcgatggataaacctgcgtaagggagtacctatacatctttcgaaagatttttataatcgtataacacagatttttaatctttgtattaaaatccgatagatataataaaaagcaaaaagcaattaagaaacaccataatgaacattaaattaccatatcctcaagaaaaagaccaaatccaatacaaaatttaaaatttacaggtgaagattcaaaaattacagtgtaacttacaaaagttacagtgtaagtttcataaattacactgtaacttacaagaaaatgcactgtaaatttgagtgagaaaatcgagtgagagataagaaaaaatctttcgagtgagatatagcaaaagcgatacgtatatacgcgtccaccctgcccgcttgccggagtatacgtcacacatacagccagcccatgtaaccatagcccatcagcccatgtgtgtgtattacgtagcgaccgattgagttgctgatggtttgccgccggccagctacccacgtccatgcatgtatatatatatatatatatataggcgtgtgaaataatcagcctcttgtcctctttgctagtttgctctcatgcatgcatacgtacatatatatagccaagcatgtacatatggttgaacacacacatatacgtatataggacatatagatggacatataccagtacgtgcatggctcatgcatgaatcaatgtttaattaactggcttagcacattggcatcgctagctaaaccggttcctgaaaatggccattaaaacatgcaatatatatgtagttatattttataaatatgtacaaaataccgtcaaacataataatgaaaaaaaaaatcatatgctaagcattagaatttagtgcttgttttaccaatgctgcaggaagagagcaccctcgcttttcttgcacctgtagcaagagcacaagaagcagcaagtgttaccacgctctgccttccccgaatctcttgtgccgcaattctcaacgacgcggccatctaatatgtgggtcatcttgggttgtaccatgggcgatgacacatgcgtagtccgatccgcagtgaagtggagatgtcaaactcaattggtaagctcagcggtattctgaattcgcatgtgattgcgcccaatggcgcatcccaaagtggcaccctgtctttcatgcagtgctcggcatcttctgcaatgagcacggtggtatcagcttctctctcccttccccttgcttgctgctactgactctcgatggcctggttaagagagtgggggagcaaaaaattggaagtctccgaccccaagatttcggagggatggcgctggtgactggtgagggggatcggtatcagcgggtgcatccggtgggtggaggttggggctagattgatgcacagacagggaggcgcagacctgtattgttgtttgttggctgctgccctgctgtgacggtgcaaagaggaggagggagcgggcagagtgagtggtgcatagcaaaggtgctgccgctctaccatttgtataaaaaaagttacaacaaaataaatgataattatataatttttaataagacaaatgattgatgagtaacatatgagaagatgagaagtgattcaactggctaatacaatataagtcattctagcatttcccatattcatattgatgacattaacatcaatatgaatataggaaatgttagaatgacttatattgtgaaacggatggagtacatgttttctcttacatgaatgttttttttcttttgaaacggataatggcaaaagacttgccagatatattagaataaataaagtagaggttacaaaagattacagtctctaatgtagcaggggcctaaattacgaaattacagagattgtgagccccccctaaacaggtctctacctcaagagagtctagagctaataagatggcctatattttcttttatagtaaaggccacttgcaactcattttgtgaaacatgttggaaatttttgcggtttcgctctagccagacattccaccaagtagttagcacgactcctaggatttgttttctcatagcagttggtgttatagaacttagggaatcccactaatctgctgtgctttcatgagtcatatgttgaggaaagaaggaactataacccatctagcttgagacatggtgccaaaccctgcttgtgaaaagacactctttttctaggtgatttgaatgttcaaaagcacttctacatgggctgcatatccaatcacatggccaatgtctcttgagaaggttttcagctgttagtgttctttggtgcaggatcagccatccgaaaaagacggtgttttggttcagaatgcgccgtccaaagagttgataaatttgcatatgttatttccccttgaaattgcatttgatatgcactatttgccgagtattctccatttgcagtccttccaggagatgtcgtttgttctttgtttatctagaacgacatcttgtattttgctccctagctgaaccagttcctcaatctctaaaatagatgtaatcaggttaagcatggcaatccaatagttgtctttcaattccatccggagattatttccctttcttttggcaagcttcaaaatagagggtgcaatgtgttgaggtgctcttccatcgagccaatggtctgtccaaaaactgattttgttcccatttcctatcgagattgtgggatagtattttgatgaaaatgtcggcgagcaaaagccggttcaatttttgctggtttaaaatctaaatacgtgggacccgctgcaatgtgagcaaaaatatattgctactatcctgctttgggacggtgtccgtctcgatcatgtatccctaattgtccattgctcgtcccgcttcacgcggatggacaagacgaattgaaatcgaacacagtaacagctgacaacggacagaattttgattgtacggaatcatctttaatttttataagaaaaaa

SEQ ID NO: 1071 - DNA, 678 bp, Oryza sativa
gaaaataaaatccgattctgtgtaaagaaaagggcgaaaaaaacaaaaaaaccaatctgtcctattaaaaaaaggaatcgggaaaaaaaatccgatccaaaaagaccggacgaaaataaccgggtgaaaaaaagaaaaaccaaatctgtccgatcaaaaaaaggcgaaaaaagggaaaggaaaaatgaatccgactacgtcaattctgtaaaaaaagagcgaaaaaataaaaaaaaatctaaccaggcgaaaagaagaaaaaccaaatctgtccgataaaaaaaaggggcgaaaaaaaggaaaaaaaacgaatccgactgcgtcaacgcagtaaagaagggcgaaaaaaataaaaaaaatctgtccgattcaaagaaaaatgaattacatgggacgcttatatctctatatctctactacttttaaaaaataagagatgtttccttcgtccgtgtgaaaaaatcaggcgaaaaaaatcaccaacaaaaaagcgaaaaaacgggagaaaaaaagttgggaaaaaaccgggcgaaaaaagaatccgattctgtgtaaagaaaagggcgaaaaaaacaaaaaatcaatctgtcctattaaaaaaaggaatcgggaaaaaaaatccgatccaaaaagaccagacgaaaataaccgggtgaaaaaaagaagaaccaaatctgt

SEQ ID NO: 1072 - DNA, 632 bp, Oryza sativa
cttacccattcaaagaagatagatcttatctttcttcacgagagttggtgggtgtttggtcgaccagcaacagtctccaagcgaactactccaaatgcaaaaacgtcggctttttcagtcagatggcctctcattgcatactcgggtgccagatagccacttgaaaaggtcaggtgagaataaaaatattaggttatgtttggaacataaactcggaataagagcatggtataaaatgttcatacagcgtgccggctatttttgtgctgatatgggtcttcttctcatcatagagctttgcaagtccaaagtcagagatcttgggggtgagatcagtgtcaagtaagacattgctggctttgatgtctctatgcacgatgcgaacgctagactgttcgtgaagataagttaggcctctagcgacgcccaaaacgatctcaaagcgtgttggccagtctagattaaagcttttgcttcttgaacatgtagaaataaggtcttgataattaagatgatggtctaatgtagagaagataattctcgagagtgcatgaagcaaggagcttaccaggtgctagtgatgagcaaaatggaacttaccaaagagtgctctgtctaggcttccattttcg

SEQ ID NO: 1073 - DNA, 688 bp, Oryza sativa
ttaaggaagtatttcgacacgaatggcttatatattacgttaactgcagttaaagattttccaccaactgcttaccttatatcaaaattcttttctttcagaacaccctatgcaaatgtaagtgaacattttcatataaagaaaaaaaattaggtgaccaaattaatgcgcattgtgatatgtatctacctgcacatatatgtcaaaaattcgccttcctgtgctctcccaagtctttgaatctggataagcaaactctgcaaattgaagcttgacactataatttccattctcaagtcctagaccatagtatcttatggatgatggtgacatcctcgcggattggaataattctgaatccaatgtgtttcgaaactgttgggaactatatattacatagttgcgacttgaggcattattgaatattccaacattgctgacaccccattgtgtatttctggtaacatactatgatgcgactacgagatttgcagcatctacttcatatgtagtattatctgagcctttcctagattgattactgccacagtctaccgcaaaagacaagtctgcactatacatgtacaaatttatggtcattactgatattcccgaatgcttgcaactgatacagatgagtaagtattcaataacgtacatactggagaacctatctaacatggagtgt

SEQ ID NO: 1074 - DNA, 638 bp, Oryza sativa
ttcgatcactgctttagttttattttctcttagcattcatcagttgttactttctgtttctctaatcagtaatcgcataatgttgaaaaaaaaattactagggcggtgtccctcaatccgttatctggacctcttccgaaggagatcgggaatcttaaaaatcttctatcattgtaagagatatcttagttaaatttcttcagagttgaagtttacattacagactattttttctactcggagttgaagtttatactacggactatctgaagtaaattagttacacaggagacacaaatgtgtaactgtaacttattaagaattttataaaaatttatcatttctacatgagtttcttatgcttgcatcagatccaaacagtaataaatagttcttatctgctatccaaaataacaaaattgtagattcttaagcagtggtttgtaacatgcttaattcttacagaggccaatttatgctattttctgtctgtacataaacaaaatcgtagccaacatgtttctttgggattttaggggcattatttcaaacaattttactggtgaactccctgcagaactgggcaatttggaaaaacttcagcaaatgtaatcccttgtccattttgggctttcaaa

SEQ ID NO: 1075 - DNA, 631 bp, Oryza sativa
caggtcgactctagaggatcccctgatattattaaagctcaagtccctatggggcatacgtttagcaatattacttaagtaaacacacataaaactacgagaaataataaccaatagcaatagaacgtggtactatgtcaagaaaaacttacaacaaggttaatcttccaagcttagagaaatttactgttctgagattatcggatatcttgcagttcctcaatattctgaaagaacaaaagatccaaacttagaaacaagttttcaatgtataaaactgtaagatgtttaataaaactttaaaacatgtcacatacaggatattcaaagacgtcaggttactgataaaggccagcgaagagctcccgtttacaatatcaccaattcgtctgcatatgtgtatttagaacacaaattatcatgacaagcttggccttgccaaccatcagggggaaaatgtcacctaagaaagaagtacttacaagcttgtcaagttggacaaattagacaaacttgctggaatcgggccttgaaaagaatttccttggaacctcctacaagtttacactttaagaaaaggtaggaatatgctaaataaattaacataagaagtatgctctgcatttcaaag

SEQ ID NO: 1076 - DNA, 587 bp, Oryza sativa
catcaagttcaaaccaactctggccccttgattcaatggctctgaagactgacaagtgctctccagtcaaaaaccaaaatacaggagcaattatcagcgagagaagattgttgtagagcacgaaaccccatgtattcaggcccaactttgtaaccatgtgcttgatgtacaccatctcagttgttatagtcaccagataagcgactgcccatgagtaggctgtgaggctgaaccccgaatctgtcatcacgtaaccaacagcgcctcccaaaatagtgacaagggacacaaatgtgagcttggaaggacatggctgcttcctgaaggcagtatcagcgatggcgaccaaaagcggggtcaacgatctgaacactatgaaggtatccacattggcatgcttcaggagatgggtgttggtgaagatggcaaggtagaacacaagtgcagccggcgcaaacttctttgcggtctggaggttgaagggatcatggtagaggagtccgagctttccgagggtccagacaccagccactgatgtcaagtactgcagggcagtgaggaggccagggtagctgaacttggtgatg

SEQ ID NO: 1077 - DNA, 528 bp, Oryza sativa
ccttttgaatcctatgagaagtcatgcgagcattatccggacataactcgccaaatgcaactcttacctcctcactcctttgtttataccaatcaaaaagttccaagaaatttcccttatttagggaggaaggagattcatcatgaccacgaaaagcatgaccttgcgaaatgagatatcttgcaatatccaaagaagcagtcaaacggatttcatacaacttttctgactctttgctaacagtgtcaactttatgtgagatacttgccctttgattcttaaaatcatcggcacatctccttgctttattatggcaaccggaaaccccaccaacatgagtagggaatgctctatatgcatgcttccaattatcatatccagtttttgagaaaacaacgtggccaaatttttcatgatcggcttcctgcctaaagagaaagcaattgaagcaataagccgcatcttttgacacactatattccaaccaatcatagttagcataccactctgctcgaaaatatctgctat

SEQ ID NO: 1078 - DNA, 1094 bp, Oryza sativa
cgggcttggcgttgctcatccgtctcgttatcgcccataaagacgccgaaatagagaggggtgtagttgtcttataggctttcatcgaaatcgtcgagatccgggtcgttgttgcgaaaaccgaactcattgtactccacgatctcggtcggacgcgagtcgacggcgggagagctccagtagccatccagctggtccgtcgaaactgagccgagtggctggaggataacgccgacttccctggagctaggcgagatcggtgttgaagccgacttccgcctaggcctacgggatggggacgctgtggtggtgaagacggctgccaaatcgtcggggagcttcattaggatcggtgggtaagccccatcatctcgatctgatgacgttggagaagatgcaatctctcccgagtggtttgaagccgactcgattgagatggacttggagtagatttcagccgcgtttggaactccaaacgggactgagatccggctctctcccgactggtccgattccgagtcgaggagagagatcttgccgaagttattggtgacgaagtcgaggctgccgaaccgaaacgcctgcccgggtgggaagacgaggtcgtcgatgccggagacggaacccattgcactgatcggcgaaaagcttgacacaacccctacctggcgcgccaactgtcgaaacaagatttcggcaatactaaaagggggtggctatcaagctggaaaagtggatgggtttggagacaaaggatttatacaggttcaggccttcttattcaagaagtaataccctactcctgtccggggatgaatccgccgagtgtattattggatgtataatctccaagaaagttgatgtcccaggaacgactcggacccctccttatataggggaaggagtccgtattacaagggataactcatatccttatcagaatacgagagtacagataaaatacaatcgtaaccgactaagcctcagggtatttccttgacgtacaagttaagaaacaaacccgagatacaaataaagatattctatctatattcggtatcctatatccagtctaaatataatcgctgtgtaga

SEQ ID NO: 1079 - DNA, 971 bp, Oryza sativa
ctttactccaatatttcccttgggatgtaggattgttagatgttactggggaaagttcctcattataattaacaaagtcacgatgccgctttgcgttttctaggtaactgcttcctctgtacacaaaatgtatgccccctcttgtccaaacaactaagcctcctgttttaatctaatgaaaagagaattaaaaaaataaatatcaaaggttttgaattgataataatgatttggacttaaataattcaaggtaaagagggtgtcgttaaaatagtttctctgtttaaccatagtttaactaagccaaacataattcatcagctaagccaacctaacaatttcagccaataaaaatcttgaatcaagcaccagcagtccaccaacgggtgtagcaccacctgcatcaattcaatcattttatctgccagaaaatgctggtcacatttgcaacttcctagcagaattgtggttcatgatgccaaaaatgaacccaccctagctacattgctctacatttttttttgaagaaagagagacaagatcgtccccctttccattttcgaaactaagttacttagctacattgctgtacatgaagctaaagatgaactccaaagtttcacaaagatgcaacaaatgcttttgcatcaccacaacaagaagctcatcgtccaggaaatcaagtagcagcagatagcaatgtgaagcaatcacctcaagaatctcccttgcccggtccatgcatcgccggagcggctccacgatcctcacgccggcgagctcctggcccttcgcccactgcccccgcaccttcttcaccacctcgtcggtgatcccggccttcttggcccgcgcccaccgttccttcccccgcgccgcccgccgaagccggtccagctcgccggccttcagctccgtctccgcgcgcgtcggcacccgcgtcttcttctcccgccgcagcaccaccttgg

SEQ ID NO: 1080 - DNA, 4782 bp, Oryza sativa
attgaattgtcttttgactcgagtcatgctgtagttgctttaaagtgtcaaatctgttgttgcatcacttggagccaacaaaatatgtgttgcttgccctgccttgctctgattgcattatctgcctgagccatgtgtttttatgtatatgtttttctacttctaggaggttgctatcttgatagctgtgtctagttaacacagtaattgatgccttggtagcttaaattgctacttgtcatgttgctcgtcactcctcaaaagcaccatccagaatgctgctagttataacttgaatttttgaagcattgtacttttagattgggttgggggtttctcttcagtttcaactgtatatttaagctgctcaactaactgatcagtaggttacctgcatagctcaccattgcacctgtcatgcttatgtcttgaactatatttgcacaaaaataacacaattctcatgtttgcggcattggccagtttagcagcgggcctttcattatgcttgttgcatgaataaaatttagttgtactactatgtttgaagctggaatttgattgtgccatttagcaaaatttgattaaatgtcaacagaaactttttttcatttgttaaatatctagcctgcctttctctgttctctcaatgtgcatggctgctggaagtccagaaccaccatgtatgtacatggaagtgatgttgtctagccagccagtttgtttgaaccgggtcagagacctttttttttttaatttgtatgcttctgagcatccctgagtgaatcctttcaaaggaaagagaaaatcagtacatgaatactgactactgatctgttttaacaactactcctaattgctttggaactggagttggattctattgtatttcttgaccagattttgcctacatagaatagagttgtattatgtcaacgactcaaatgcctataatatccaataatcaatctacaccgttatactctggactcataacaatctaatggtgtaaatatttactttttccttcaattaatgtggtaatataatatatagagtgcacatgatgccttctttttgagctatttttataatctactccctccgtttcaggatgtaagatgttttcatttcgtcctaagtcaagcttctttaattgtgaccaaacatttaggaaaatgtggcaacatttataacaccaaattaatttcattatatccgccattgaacatatttttataatatatttgtttggtattggaaatgatgatacatttttctatgaacttggttaaacttgaaggagtttgacttgtaacaaaactagttgttacagtattgtggattgttatcctattctgtatagttccagctgttaaattgatgcctgtagggaggttgcaaccatatggttgacatcattacatgtcatggcacctaatccttaagagttgacatttctctgtctgcttgcatatctgctcgttaacaatgccatgatagtatttctgaaaacaacttcaattagtattagttttgtattttactactctcggcagtgaacaactgtttggattatatgctactgctttctatttatgatgttcatatatgagctactagggcactactgcatagtggtactctttgagttacagtttgtgttttttttccaccgtgataagttatcttaaatattgtgttcttgtaatttgattttggtgttagttatgtacattgtttcatatagttcagaaatttgagggttaatcataagcacataatagttcttgaccagagctttttgatatgtcaagtatttatagcctcaatctataacattagcaactgaaagttaaggcacaatctgaagtttaattcttggcgtaattgatacactaaacagtaagccaaccctttaatcaggagtgtcaactccagacaagagaggccccttttgggggctctgaacttcagtaagctagttacttcatcagatgcaaaacaatctttccatgagaattttgacaatgatggttgtactagattttaatagtggcataatcttttgcctctgaattttctcatatcttatgtgatatggcaacttggcaaagcatggacggaggtctgaaagataatttgttgcaaagcatagttataatgttaacatgccactttctaattagttttgctttatgcaaatgtgataacagtgttaacatattcacatcataagattttgcctattcaaattaatttgttttgtgcgcccgaagatccacattaccaagggactggatttaacagaaacttttatgttctgactattgattgcaccacctattgttaaaataaataaataaataaataaaaagacagcataaaagttcaactttaccctgtgagtttgtgacagggattttttttttagaaaaaaaaatatgttgggactaacatatttgctcttatgacgaatatattagtgatcttgagctgtcctactgcacttttctattttatcagcttgctggagactaatctcccccttttgtagttcacaaagtgcgacctaagagcgcattaattttttatctccaagaaaaacctttttgatgatgactggataatttctctccaggttaagcttgatccttctaggcccttgagcaaaaggaagcactgggttgttgccgagattcttcgtagagctaaggtgtattctccatcagctgctgcagcagcagtttctgctcaacctggtgccacagttcaacaggcagaagctgctagcaaatcataaacatagactcctcttctgcaataaatggacactttttcgggattttcttttatgttgtgtaactgtagtatcatctttgtggctcccttcaaatgcactcgtgtttttgaaccatgtgaatggtggttatcaactcactgagggtgcatcttcaaatacttcgaaattcatggatgcaacagaccatatccatatgtagaacggaatcttctattatgaattgtattcatccatataaatgtgtacatcgcaggcacgcatgaagcgcttattagtctttcatcatctacacatttatgcatacatgaataaggttatctaaaggtcattcgtcatcgcctactcacttatttatgcatacattagtgaggtgatctgaactcatggaacgagcgatgggcggtgggtgactaagttttgtaaaagggcggcgagggcgactagttttgtaaaattttcaaatagaaaattatttatgtaaatattttaataaataaaagagttaattttaccaccttttattaccgatgtttcgctttggaccaccttaggactaatgttttcactttggaccgggtatttttacctttatttcactttggaccacccttactcttttatcgatctacatccaatttttaatatgtcgaagaaatagtcttacatatagctgtggcagttcattgacgagtaggagatgatgtaatcgagatcgttcatatgcttgagaagagagtcgggtggtccaaagtgaaacaaaggcaggtttacccactccaaagtgaaaatattgcttaaagggtggtccaaagtgaaacatcagtaataaaaagtggcccgaagtgaaatttattcttaaaataaaaaaaatcaaaacgagcctgctcggttcaactcttttaaccttaaggaactaagtttggctctactcgcaagttagcctgttaaactcgtataaacgtaattatatcacccttatactttcaacttttaccattttattatagcaaatttgttatatgcacacaagttttcacgtgtatatatcgtgttcacataaaactctagaaaaaaatgcacatgtattttcaatactattacatcaacgtgtaaactttattattaaattcatcatatatacagagagaaattctaaatatttatattcttaaaaacatcagattttttaggctaaaatataatgagtttgagttacacataggtgtaaccctattagaaattatatgcgtaaacttttcgagaatcgtaagtgacatttagtagtttgtgtgcagggagtatacatgcgaagtttgtgttatatgtttccactaaacggagccttggtgtagcacgagtaggcctatgccattctttcacggaaaaagtccactttgactacattaaatatatatatatatatatatatatatatatatatatcgaatttgatttatatccctcaaccgtcaaacaaggtataatgactccctcagctattaaaacttgtacaaaattactcctaaggtaatagtgagagttgtattgctgacatgacgtccatgtgttgcattgacatgttataataaaaaaaaaaaacattaaaaccatgggactcataggtcaacaattgtatttttcttcctctttttccctcccactctcttgtggtcagggcgacgattggcgccttggcgggaccaagggcagtgcaccaatgcccggcagaagaggccggaagtggtggtgacctcgtaaacgagaaggaatgcagcggggccggttagccccttggagcaccaggaaggatgggtaggtagcggggaggctggagaggatgacgacagggaagggagtggtggcgccatgcgcgatgcctgacgaaagaggaaccggaggcagcaagcgaccttgtcgaggagtgatcctccctagcaggtggtcgtgagaccccccccccttgtgagttcggccggggg

SEQ ID NO: 1081 - DNA, 646 bp, Oryza sativa
ttgagatttagcacccgttggaccagtatcttgaagtcctcgggagcccaatcccatctgactccctggtgggtccgcatgtagtcttcggacccggtgtactcccaggcgccccgagcgcgccgctggagcggcgcaatccgacgacggaggtagtcgccgtacaccatggccccggtgagcccctgggatcgcaggcccgcgaggcggtcgaggacggcgtcatagccatcccccagatctaccggcgcccgccagctggaggcctgcgccgggggttggctcggaagtcggaggcgcgcttcgtcggcgaggggggtgtagaaccagtcgctcttccagtcatcccacttcttgcggaggacgcaggggatgtagcggttcagcaccggcccccgcggcaggaaatagcagccggcgaccaccgacggtggcgataccgactgcacggtgaagaaccaccggaacagccgaagagatgggcgcaccccaatgaacatctcgcacaggtgtgcgaagatgcccaatgtcatcactgcgttgggggtaaggtgcgccatctggagatcgtagaactccaggacatccatgaagaaagagaaaatggccgaaccagccctgcaatttgcaagggaagaaagaagac

SEQ ID NO: 1082 - DNA, 941 bp, Oryza sativa
gacgcgggagtccattgagtctaataacatgcccggtggagaagtatcatcgacaaaaggtttaaaaataaaggtatatcatgtactcgttgtggatttttcagctgataaacaatacaaatgattcaataagtagcaataagtgactaattatttaatttcctctcaatattgattttgtagatttgggcagctttttgacgaaaagtagtgctagcacatgttcccctcatccaagtccaagtacccacggtgatgatgcgcctgtagaatccatcgccgaggaagtgcttgaagagcctgttcagtgtcttgagactgtgatcgaaaatacacaagaacaaccagaacttgaaggtattgaacttattagggaatttgactcagaagttcatgttgttgttgatccgactcttcgaatcccaatagagaaattccatccggacattagatcagaagttagaagagcttatttgttgaagggacctacccaacctaaaattacatttccccgtaaataatatgggtctgataggagatattttcgagcagagtggtatgctaactatgattggttggaatatagtgtgtcaaaagatgcggcttattgcttctattgctttctctttaggcaggaagccgatcatgaaaaatttggccacgttgttttctcaaaaactggatatgataattggaagcatgcatatagagcattccctactcatgttggtggggtttccggttgccataataaagcaaggagatgtgccgatgattttaagaatcaaagggcaagtatctcacataaagttgacactgttagcaaagagtcagaaaagttgtatgaaatccgtttgactgcttctttggatattgcaagatatctcatttcgcaaggtcatgcttttcgtggtcatgatgaatctccttcctccctaaat

SEQ ID NO: 1083 - DNA, 2499 bp, Oryza sativa
atacttccttagctcaaataaatcccagaaaaatctaggaattatagaattaagcaaagtatttaatgaaattttatctggccccattttatattggaatttattaattaaaattagatcttcttttctaggcttttaaaaataaattctaaaaattccatttaaacaataatttacatattttgaattctcagggtgtgacaaacctaccccccttgaacagaatctcgtcctcgagattcagaagaactggcgaacagatgcggatgagctgacttcaattcatcttctcgttcccaagttgattcttcttccgagtgattactccactggactttgcaaaagcggataactcgattcctggtccttctctcatctatttccaaaatacggattggtttctcaacataggtcagatcctcttggacttctatctgttcaagattagcttcttcggtaggtacccttaaacactttttcaattgcgacacatggaacacattatggactcctgccaaagattgaggtaactctaactgataagcaacctctcctcttctactgacaatcttataaggtcccacaaaacgcggtgccaattttcctttggtgtggaaacgatgaactcctcgaagaggcgtgacacgaagatacacataatctccttcttcaaaactcaaatctctgcggcgattgtcggcataactcttatgtcgagactgggccactcgcaatctttcttgaatgattttcaccttttcttctgcttcccttaggatatccgtcccgaaaacctgacgttctcccgtttgatcccacaaaagcggagtgcggcacttccgaccatacagtgcttcgtaaggagccatctgaagactagcttgataactgttgttatacggaaattctgcataaggtagattcttatcccaacttccaccgaaatctaaagcacaagctctcaacatgtcttccaaaatctgattcaccctttcagtttgtccatctgtttgcggatgataagcagtactaaagttcagcttagaacccatctcttcctgaagcttcttccaaaaatttgaagtaaactgactgcctcgatcagacactatcttcttaggaacgccatgcaaacacacaatccttgccatatacaattccgccaaccgacttccggaatatgttgtcttcactgggatgaaatgagccactttggtaagtctgtcgactatcacccaaatagagtcatggcctgatgacgttctgggtagaccagtgataaaatccataccgatttcttcccatttccattcaggaatcttcaaaggctgcaacaaaccggcaggtttttgatgttctgccttgactcgctgacagacatcacatactgctacgtattctgcgatttcacgcttcatacttgcccaccaaaatctttccttgagatcctggtacatcttagtactaccagggtgaatggaatataaagtatcatgagcttctttcagaattgcatcttttaaatctttgttgtcggggacacagattctctcgcccaaccatacagttccttgctcatcctccatgaaaccgatagcttttcctcttctcatattcttcttgatctcttgaatatcaggatcattaatttgggcttctctaacttgatcaattagagtgggcttcgcttctaaggctgcaacgaaacctctagctgacaattccccaaatttaatctttcaaattccttgcataattccaatggcacctgtcgtccttccgtagcattgcaatagcctttcctgctaagagcatctgctacaacattagcctttcccgggtgataatgaattcccatgtcataatccttaattaattccaaccatctcctctgtctcatgttcagatccggctgagtaaagatatactttaaactcttgtgatcggtatacacctctgtacgagtaccgaaaagataatgacgccaaatcttcaacgcatgaactactgcagctaactcaagatcatgagtagggtagttcttctcatgcggacgtaactgacgagatgcataggcaaccaccttcccatcttgcatcagaacacaacctaacccaagtttggatgcatcgcaatactcttgaaaacccttctttggatcaggtaaaatcaagataggagctgatatcaagcgattcttcaactcttgaaaactctgctcacattattccgaccacttgtacttcacatctttctgaagcagtcgtgtcatgggcttagcaatcttggaaaaattctctataaacctccgataataacctgcgaggcttaagaaactgcggatctctgaaactgtcttcggttgtttccagttggttacggattccacattactaggtcaacggcaactcctcctgctgagatgacgtgaccaaggaacttcacttcagacaaccaaaattcacacttgctaaacttagcatacagttgatgttctcg

SEQ ID NO: 1084 - DNA, 6285 bp, Oryza sativa
attgatccaatgatctactagcagttaagcttataataccaggattaatccaaggggtgtatcaatatttttgactaaaatgcacgtggctgtcaagtttatatacaattctactcatttttcaagttcttacactaaatcgcacgcatctacaccaagttcttgtaccgtgggtgcaatttactccattctctttgtcaccttggtagcctaattttgaattttaaattactaacattcccctttcaaacgcctgattaactgaaaatgaatgaatttctgtatattcaattgttttgaaatacttgaactgtggtaagtaaattgtagagatgcttatagttagaacagatggaataggtttgttgtactctcttcggtccaaaacaatgttagacctttcaaaattaatgaaatgcaactttcaccacctaattctttcacataaattaaaagttattacatcaatcaataaatatataatgttacgaaagcttttataacaaacacctgaccatgttgcggactaagctagttggtttccttatagttgaaattgcacatcggggtttaagtgattccaagagtacgggtgcttaaatttacagataattattctttaacaagactttgttaccctcaatatgtacgtgttggtccaatctaagaaagcgtgaggttaactcatgatatgtcgattaactattaactcgcgaggttctcaacatatgccagccaactcttcatttttttttcgttgtaggttatgataatctcgacatatactggtccaatgatctaatctcttaaatgtgctattagaaataagtgtgcacatgtgcattcatatgggtgagtacgcgtgtatgtatatgagcatatatgtttggactatgtttacagaaacttggctatattattttcatatgtccaaaccctatgctctaacctataaggcttataattatgatcaaaattaatctatgtgaatagtatggattctaaaataacatgaatgtgctcccatgcttttatactccttgataaaatttctatagaatatttcaatttatagatatatttatatatatacatacttttacatgatagagactattagattaaatctatcataatgtccaacattatctgacctttgtcctttctccctccaaaatcattagtactccttttgaaatgaaatgtcgaagaaggacatttaatgtataatctttttggggccatcattaaatgtttcgtaaaattatgaccttccataagaagatacttcctccgtttcacaatgtaagtcattctaacatttcctatatttatatggatgttaatgaatctagatggatatatatgtctagatttattaacatcaatatgaatgtgggaaatgctagaatgacttacattgtgaaacggagggagtattaaggtgttgtatctcttcaatcttgatgtcgtgccactgaattggctaaagctctcgggcaaatttgagcctaccttgttcttattcgagatggcaccgtactactctatccatcattcattactttattacttgatctctaggtacatatatatagcatactactactatatatttcacgattttttgattttttttttcaaactatatatctatagaaaatatttaaaatataaataatatgacagagtttttcataaaaaaaatactaatttaactttcacatttttaatactaatattatttttgtcatctatcaatgatttaagatattgacatctgataataatacattaaaaactttaccttttttagagcggaggtagttaatattctctctccacagttacaaaagagtgtcattgtaacataggttttggggtgtagctaaatttgttaattaaacaaaagctgattataattatgtagtaaaaaaaagttcgtttatatatatggactttaaaaggctaaaaatgacaaacttttctaaaagagaacatatataaggccctgtttctttcagcttgggattaagaaacagacaacttattgaagtagcttattataatctggaacccagcttattataatctgataagctcatttaggtgagctttttccagattattgggtgaaaaattacccacaataccaccccactccctctttagacttgcaaacccaataatctaggctctaataatctaggaaagaaacaactaaccgcttattctactacagattataacaatctagcttatagtaatctgactcaataatctagattataataatcccaagctgaaagaaacagggcctaaacctctagatagttccggccaaacgtgagatattcatggaacctaagtttttttaaactagtaacgataatatcatggccaaaccgaacaaatagggatatgctatgatggagtattttgtaacaattgtaatgggccaggctcatataaatagagataagctagaagggtgattaaagataaaacattggatgtcgtgtttactttcagcgtacggacacaccgtggtggtgggaggaggggatggaaggaggaccactccgtttttaacttagtagaggtatttttttattgggattatctatatatatatttattgacaatttttttatcaaaatttatcaaatgtaattatagtataattataatataaaactatagtataacttggatataactttgaaaaatcccaccatgtggagctatttctgcaaagcggaagtcatgggaccaaatcccctcacccgtgtgtgttacgattttctctttcccactagcatgaatcttagagtaaatctaatggttcaaaatatatgaaatttgcatacaagctacattataaatagagtaaatttcacaaagctatagatattttgaccaaactacgcaaaactacatatttgagatgttgtatcaaaaaactacagacttagcggtaaaattatcacaaaactatatatttaagaccaagtaccacaaaactatagattttatattataagttatcttaaaagtacatatttcatattgaagttatcacaaggatacaaattctagagtttaaatccctattgcaaactttatgttggagctataaatgttatagttttgggataaattagcactaaacctatagttttgtgataaaattgctgcttagttttttttacactccatcctaaatctatagttttgtgagaaattttagcttcaggtgatgaaaacgagtcaggcatgaagaggaagatcaggaaggggaacgggattcatcgcacacgtacccatcatggctgcttggttttctatgttatatagacttgtagtttgtttctatttcttgatatctattagtataagtttttttttctgcgggatctattagtacaagttagtagtactattctattagttagtgttctcggttcggtgagttgtttcttccgcgataaattgtcagcgctagttctccatttttttttctgtggatcaagaagaaaggaggctcagcaggaagcggattgtatcatgagagaagcatctgcaatgggtgaaagcctgatggagcaatgtcatgtggaggtgaaagcccacgggtcgtcaacttcttttctcagagaagaacaatgacaatgacagtatccgagaaataagcatcggctaactgcactaaatttgtagttttatgatagaagaccttaaatctgtagttttctaatattttggttgaagtactattttcgtgaaatttactctataattacatgcaagttacaatatgtttttagaaaatttgctgataaatatataacaaaaccgttttttattttcacatgcatttcctattcatataattacaaaacaagatagaaacataaacgggataaaagcttttgtaggcaaccaaacacgtccaattataccacccaaaacagcacggatctcatggcgttggaattactccatcgttgatcattgtcactgaagggagaccctagcttagctaggtaagggtaaggtagcggtagcgcctctatcaaaaggagcaaaagaaaacgaccgttcctccacgcatgagcatgaactgtgcgagtctgggtgaacagcagcaatgaggagtgaggaagaggattcatgtgtactggcgtggagagcgaccggtgatgggtgatggggtgagggggcggcgtggctggcacgtgcttggttgggttgggggcatccactctttctttctttgtttttcttttcttttctttctttttaaggaaaaggatagatctcttcacactctcatcacctgtactggaccatcttttgttaaaggcgaattcaagagagaagccaagagaaatggttggctataacaaaagtaccgggggctaagcccctggatctagagtgtattttttttcaaaaaaaaaacaaatactccttttatcccaaaatataaaaaataaccaccactaacacaaaaacaaaaagtaaatttaatcacctcatcaattggatcacctcgaaacatgtaaataattatgtgattggaagtttgatggtagatgatttaaaacaaagcaaatttaaatgagctagttagtactatatacatgactgcgtgccatatattataagacatggagaaaaataatagtgtctttatattttatattttagaatggaaagccagagtacttggacaaccaagaaaaataattggtgtcggacaattaaagttgtgttcggaaccccttgtttccatcatgtaaaatgaaatatacattggcgcataattaattaagtattatacattggcgcataattaattaagtattagtttaaaaaacctgaaaatagattactataatttttaaagtaatttttctatatattcttaaaaaaaacacgccctttagtggtttgagaaggatgtgcgtataaaacaagtgagtagaagttagaaagatgggggtaaagaatatggtatagatccttatcaaatccacgacttaagatgactacaactgagcatgtggttttttctttcgaataccagatatataaaggttcagcctattctaaactgatactgtaagtctaacatcggtgtgttaaacagaggagagaaagttcctcgtttttcacgcgcgtgcattttgaactgctaatcagtgttttttgaaaaaaaaaaatatagaatttttttgcaaaaaactatattagtcattttctagtttaaaatagttaatcacacgctaacgatatacctcattttgcgtgcattatctttttctcttctcctaaatgcaccttagtcccctcacccaaatgccctatggttgaaaacagtatggaaatttccggctatcatttctggtctgcacctaccgttttagtcggtatcggcaattatcagtgttggaaatagaaatggtaatatcttctggaaatgatagcggaagtgggatggaggttttttcaaccgtttttattggtaatcgtatttatccggtaatttccgtcaaaattctgagaaaattctgaaagttctccaacggctcagctagtccaacccatcggaagctcatgaatgttggaagcctggcggacttgtagcccattagaaaagggaagtggctaggggaaaacacggttaaccctagggcgtggcatgtgggctttgttgaactttggtctcttcaacttatcgatgttaaagtattattgaactttgtttatattattcgtcgaacatattatcatatcattaatcatcatataatggtattatgtggagtgtaatgatgtaagaataaagttataaagttatcttcatgtataattaaatatgtgattatgcctcactttgttgtttccaatatgaattttcttccaaccaacatcgctaggttctgtttcgacgtttccatttccaatatactgatatcgttatcgtttttttataccgtttcgattccgttttcggaaaaaaagaaatatagaaataaaaatggtagagggtttttccgaccattttcatcctaaacaccaacagcaccatctctctccaaattgtactagcatcgtgttattacttattccacgttattatggtaaaaaatttcacggcgcaaagcatctaggctagtccttaattcactacgtagactcgtggtaccgtttgtaaaaaaaaaaattgctccttggaaatcgagcgattttacaaaaaatgataaaaatcctagtatg

SEQ ID NO: 1085 - DNA, 1467 bp, Oryza sativa
tctcatttgcatcacaccagttgcatggccctgcctctgaatggtgggatcacttccgcctgaataggactactgctgaacctatcacttggcttgaattcaccgctgctttccggaagacgcatataccatcgggagtggtgtctctcaagaagaaggagttcaggtcgctcacccagggatctcgctctgttacggagtatttgcacgagttcaatcgtctggctcgttatgctccggaagatgttcgcaatgatgaagagcgccaggagaagttcttggaaggacttaatgatgagctttcttacccactcatgactggagattattctgatttccagaagttggtggataaggctattcgtcaggaggacaaatacaatcgcatggagcagaagaaacgccggattgctcaattcaagacacaacaggggaataatcagaagccgcgtcttactttaggaccccagtctgtgccacaggggggttcttcgtctgttgttcgtccgcagcgtcagttcttcaacaacaatgctggcaacaacatccgcaatcaagctccacgtcctgttgcagctccaacacagcaacagcctgccaagagggagcaaggcaacaagcccgtggtgtgtttcaactgtggagacccaggacattatgctgacaagtgtccgaagccccgacgtgtgaaggttgtccctgtccagagcagctctaccgcactagcattaaaggcccgtgtcaatcatgttgctgctgcagaagctcaagatgctccagatgtgattttgggtacgtttcctgttaacttagttcctgcaacagtgcttttcgattctggtgctacacattcattcttatctatgagttttgcgggaaatcatgggatggaagtagaagatcttagacgtcctttgatggttagtaccccaagtaatcaagcactctccttgcaacgtagcccctctgtcagaatagaaattcaaggagtaccatttctggccaatcttatactgttagaatccaaagaccttgatgtcatcctagggatggactggttagccagacataaaggtgtgatagactgtgccaacagaaaagtaactctcaccagcaatgatggtcgagttgtaactgttcatgtattgtcttctgagtctttaaggtcaagactgaaccaaataactttggaagagattcctatagtccgggagtatcccgatgtgttcccagatgatttacctggtatgccgccgaaaagggatatagagttcagaatagatttggtacctggaacaactccgatccataagagaccttatagaatggcagccaatgagttggcagaagttaagaggcaagtagacgatttgcttcagaaaggatacatcagaccgagttaataaccatggggagctccagttatttttgtggaaaagaaagaccatacccagaggatgtgtgtgg

SEQ ID NO: 1086 - DNA, 1754 bp, Oryza sativa
tatggcatgcaaccaatcaccagcttcaacaggattagtggtactagagaaaataggcggcctcacacgaagaaattctgctaacttgttctggggaggtgcatggttatttccctggttttgctgattctgaagttgctgcatcatcatgttcattaactgagtctgttgagcaagaacttgagcaagggttgggttcccttcattgttgttgttattgttgttgttgttgttggggccattcccgttgctgcgagtgttcaccatctggcatggacagggcacaagaagagaaaccgggggaaactacttaggacagataattactttaacttttattgatcttaactgagtttcattattacaaactgaagactctcacaccactaaactcaccaacttcctaacactcaaaagcaaacaaacacatgcacttacatcccaccactgatgtaaatcacatgcaagacccacacacacacaaccaaacttaaaacaagcaaactaacacaacgatctaagacaacggctagacatggcactctagttcttccgagcatcggaggtcgattgaaggctcgttcggctcgtcttcatcatcttgggtagctacccactcaatcttggaatggttgcgcttggattcttcttcttcatcatcacttatgatgataaccggaggatctgctaaggttggagcaacttctttctccaccacacgaacctttggcgccaattgatagcgagggacaaatagagctctcttccttgcggtaagacgaatcctggccttttgaggtggtgcttctcccttcaatgcggctagttccttctccaaacgatccaccttgtcttctaacttgcaaatcttaccacgattccaatcttcacgatcttgagctgctaacacagtctccgcgcggctttcatccatagcccacagcatctcaaccaaatgccttgtggtagcatcattctcaattccttcagtctcaaggtaactgccacggtcacttccctggggttggccgaggatggtagcgatactcagtgtcggccaactgatcactgtagcgatcacggagctctcctatggcgatccttgccacctcctgacatgcatggatgtagtttcttcctccagcttcaaacatcactgaggggatatcttcactattactgttcaaggtgactttgactcggcacttctcttcatgacgatcatgaggaatctgggcataaaaaggggcagtcccaaatccaatgacaaaggacatcgtacgcaactcctggacaaaaccctcaacaccaaacaagtactcaggcttgtagcgcggcatctaaagacaagtgaaaggagggagttaagacatttatccaattaatagcacaagtttttggattaatttgaataaagattagaaattcaaagtaaaaaggtaagtaaataaagtaaaccaagctttgcgagataagttgaaacagttggaaaccaggttacaaattttgtacttttgaataactggtttcaaaagaaatgaaagaaacttataaaatcaacatgctaaatttattttattgcagcaagattaaataaaacaatattgtaaaacttttgctgataaaatgagccattagtacagtaatagatgtacggtactaataacactggaataaatttttgaatgagaaccattaaaagagattatgaagtgcatgtgccattagtttggttcaattaaaagagaaaggga

SEQ ID NO: 1087 - DNA, 6573 bp, Oryza sativa
aggcttatccggtcatcaagatcgataagcactccgcacttaaattcattaagggcatcacggttctttttggagtgcctaaccgtattattacggataacggcacccaattcactagtgaactcttcggcgactactgcgaagacatgggcatcaagctctgcttcgcctcacctgcccaccccagaagcaatggtcaagtggagcgcgccaatgcagaaatcctcaaaggccttaaaaccaagaccttcaacattctcaagaagcacggcgattcatggatcgaggagttgccagcggtgctctgggcgaaccgaaccacaccaagccgagcaaccggggaaacgcctttcttcctcgtctacggcgcagaagcggttctcccatccgagctcaccctgaggtctcctcgggccaccatgtactgcgaggctgatcaagatcagcttcgcagagatgacctcgactacttggaagaacgaaggcggcgtgcgggccttcgagccgcacgctaccagcagagcctgcggcgctaccatcagcgccacgttcaggcccgatctctctgcgtcgacgacctcgtcttacgccgcgtccaaacgcgtgctggattgagcaagctctcaccaatgtgggagggtccgtatcgagtgatcggtgtcccccggccgggctccatacggctggccacgggcgacggcacagagttgcctaacccgtggaacatcgagcaccttcgtcgcttctacccctgaggggggggtcgggtgtcaggtttcgggctcgggccaaccccgcacccccccccctcgggtgtgcagggttggccgggggctgccacacatgcacattctcatttctctcatttcagtatttcaataaaagcagtttcaatttcctaagggctgtatctgtgccgctttttcctttttgaagaatttttgacttgaaatgaggtcactcgtgctcaaccttgccctcgggggctcggttcggtcagctaaaatcgccaaacggggcccagaaccgagccgtgccccggggcgtggtgaactccgggggggaatcggcaaaaacccacaatcgggtcacccataaccctcggtcaccacgttcccggcctggccagtctcgacatgcggatatccccacgcactagccccgacccgcgcttttcgaggactgggacttgggcacgggcccttaaatcaagctaagacacaaaaagaggaccgcggcacagatcatcctcatctcattcgcatagcaaaataaaattaacacaaagaattttttcatcatttttgattgcagattataagttgatctatacaaaaaacaggcctgaaggccttagaagaaagaaaaagaaagaaattgaagattggcgggggcctgggggctcattccgatgcgcccgggtcgccggcctcgtcttccacgtcgtctgcaccgctggcatcgccctcctcgtcggagttgggggcgaacgcgagctgaggggccgagccctcgaagctgtggacgatgtggtcggcggcatcccggacctgcgcgcgcgcgctgtcttcagtcccaggtgggaactcgtccagcgccatccacggagagaagttggggtccctggcctggtagctcgccaggacgagctccaccgctccttgggcgaggtccctcgaggatgacttgatggtcttctcgagctcctcggggagctgctggagagccccggccatcttcgagaggcgctgggcaaggcctcccaggttggcggcaggctttattgtctgccctttccagaggcccgcctgccgaccggcgcgatccaggcgggagactgcatcccacagcatgccgggccctatctcgcccgccaaacggagggctcggcttccccggcggatgagtctagcgcgcgctgcatgtcggcgacggtgtgttcggcatctgcgaggcgggcggttaagtcgctttcgcccgcagccgccccgccgatgcgcgccctcgcgtccagctccttttcccgcgcctcgaggtcggcagcccgctgctccagcgcggctctctcggcgcggacggattccaaattgcggcgggcctgctccgtcagcgctgcttcgcggagggacagggagtccgccaaccgttgcgcctcggcctcggcctcttcgagagctcgctcccgctcggcaagcgcgtcctcgcggaggcggagtgcggactcctcttcggcgcaggccgactcgtgcgccaccagcgttgcctcccgggaggcgacggcggcctcgtggtccgccaggtccttctccgcgacgcaggcgcgctcctccagcgccatggcgcgcgcctcgagggcctcttcacgccgccggagcgccgcttcggtctccgctgctcgctgctctcgggcagcggcggcatcaaggaccccctgggcggcgtcgagcttttttttcagctccgcctcccagttcccgtgctgaaggcggagggagtcctgcgcctcgttcatcactgtggtggcgatgagggcagccccccgctcctcctccacctctcgagcgatctccgccagtgccgtcttgcgggcctcgaggtctgagacgtgccggcggtgtgccttgcggcccgcttccaccatggcctccaccgagtgccgcccctcctcgacacgcgcccatgcggcgtcgagctccgcacgctccgcctgcagggcctccacctgggcacttagcccatccaacaccgcggtgtttgcggcggcaagggcctgcagaaggggctctgcgctcagcggggcgacggaaggcatgggaaagagctgccttggagaagatgccgcgcggctcggcccgccaatggacgtgccggcctcggggatgtcccccggacctgtttggtcctgggcgtcgcccgaaggagtgggcccaagcgatgcgcccgcggcctcgtcgcgagccatcccagaagctgtcgcctaggcatcgcccgaggaggtgggcccaagcgacgcgcccgcggcctcgtcgcgaactgcctcggaagccgccatcgcctcagcctggcgaacccgggcggcctcctcccgagcggcttcttcggcttggcgagcccgggcggcctcctcccgagcggtatcctcagcctggcgagcccgggcggcctcccgggcggcctcttcagcttcccgtaggcggtctgcggcctctcgccggtcagattcccgcctccgtgcctctgcggccgcaggatcttcggcctcggactggccggacttgggatggtgggaggaacgcgatgggatatcactgaagcagaaagaaaaaccagaaggcaaacaagatgggtaagagaaaacttgcttttgggatagaagaaaagacggtcgcaatgagcgtgggacgaacctgcgagggggtcggttaaatgaccaccttggaggggaaattaggtttccccgggatggttctgtctcccccatcttgcgcagccgcttcttcttgcgctccccctcgggctgcgatgttggcgcggccccctccgggcgcctgctgctggcacgcaccgccccgccccctcggggaggagatgggggaggtgttcctcccaggttgctcttcccccgggcgtcggtagggcggttgctccccgagcccccggacgcggggcccagaagcacgacccccttcaggggtagattgatcccctcggcggcttccgcctgcgccgtcatggcccttaggagcctgcttctctgaggccccgaccgccgtcataatggtcaagatggaggcgcgatctggatcgctgcagagggggaggataccgtgggggatgagggacgcctcaacggagttgagatttagcacccgttggaccagtatcttgaagtcctcgggagcccaatcccatctgactccctggtgggtccgcatgtagtcttcggacccggtgtactcccaaggcgccccgagcgcgccgctggagcggcgcaatccgacgacggaaggtagtcgccgtacaccatggccccggtgagcccctgggatcgcaggcccccgaggcggtcgaggacggcgtcatagccatcccccagatctaccggcgcccgccagctgaagccttgcgccgggggttggctcgaaagtcgaaggcgcctttcgtcgccgaggggggtgtagaaccagtcgtttttccagtcatcccacttcttgcgaaggacgcaggggatgtagcggttcagcaccggcccccgcggcaggaaatagcagccgccgaccaccgacggtggcgataccgactgcacggtgaagaaccaccggaacagccgaagagatgggcgcaccccaatgaacatctcgcacaggtgtgcgaagatgcccaatgtcatcactgcgttgggggtaaggtgcgccatctggagatcgtagaactccaggacatccatgaagaaagaagaaaatggcggaaccagccctgccattgcaaagggaagaaagaagacggacctccccgggtagtctggcgccgggcgtccctcgcccagcatgactatctcacggccggtggcagattccggcataaagcggcgcggcaacccagcctgcttctcgctcacgatgcgggaaggcgcagcacactaccatcaagcagtgcggagccccgtgccatggcgccggacgaagagaagatggagagcgagcgcgtgtggcgaaagaagggcgcagggaagaaggagttagggcgcaagcggcgaaggcaaggggaatgatggcgaaaggaaggaaacaagtcccatcctcactgcctttatacccttgccaacgctgtgcccggctcctcgtttctcgcgcccattatttcgccccctcgtttctcgcgcccacgcttccactgatcccattcgcccgcttgcggcgcgtgaggtggatatgcggttgtagcagtcgagatagatcgtatcgtgcgcgcgttaattacgctcgccgaccgaagcgacattaccgtatctccaggcgaagcaaatcggctcgcccagattcgtgcgccgctcaggtgatgtggcagtcttgaagagaccgcccattattgacagccaaattaccattatcggcgtgcatggtttgagaccgttgggtttctgcccaaccatggagaccggtcccacctgtcaccaggctttaggagtggcgtcacacccggccgcttcccataagaagggcgatcgcccttgcataacgccgggggctactgtcggtgacatgggaccgggagtatcatgactagaggcttgaggcagacacaatcgcccacgtggcctggcaccctcgggggacgtcgagcccgagggtgatgtgtgcgcccacctcttggtctccccgaggggggggggtcggaccactcttgcctcgcccccgagggccgaggcgccccgaccccttgcggtttctactccacgtgtatgggttaggtgagcacagcggggctcacctaaccgcatttattgcgcctcggttaagcgtgtcacgccgcacgaagtgcagtgcagtgcactcgattatccggtctgtgaccagtcacagaccggtcaaatcgcgggttaggtggcgacaggcggtcagacgcacgcttcgccccatcctgtcaagacgagagcttctaggcactcgtccccggctggagctagcgtgttacatcccaaagatgacacgttagccccgatcgatatatgccaggcttcatcctaaccattacaagcaagatgttgtttgaagaagggcaaacatacacgttgctaagtcaacgcgtggtggacaagaatgaccgatttgtgaccggtctgacactgctcatgtcgtcagcacactgccaccttcccacgacgtgcccgcctcaggcacgagtggaggtaggtgtgtcccgtcccgtcaggaggatgcttggaggacgaccgtgcaaatctccgtccatttatgaagagaagaaaagtccagtttggaaagggaagggtgcatgtggtatccccttgaagtataaaaggaggaccttgcccatagaaaaggaggatgatcttttccagattcagaacctagaacaagggagaggttggctcacactttgtagctccttcatacatagatccaccaaaacacaggagtagggtattacgcttctcagcggcccgaacctgtatacatcgcttgtgtttcatgctcttttgagaggtcgcgattttcccatatacacggagagcttgagatctcaccctgagcccccggccgaaccggcaaaggggggcccgtgcggtctcccggtgaggagcaccgtgctccgtcaaagtggactcctaaatgtgcgcacgtatccgttgccacgtcttgccatcccacaatccaggacacgacgagcacgacaccagctccgcgcgaactcagcgcgtgtcaagccttactgcacatgatccgaaaacaaagccaaattgtgtttgactaagcaaagtagaaagaaccgaaagcagggaaaactaaaacaaacaaaacagctagatttattcaacaaatccgaacaaatcca

SEQ ID NO: 1088 - DNA, 1097 bp, Oryza sativa
cccgaccttaacaaggcatgtcctaaggatccttaccccttgcctcgcatagatcagattgtcgactccacagcggggtgcgaccttttgtgttttctagatgcatactctggttaccatcagattcgcatggctagggaggatgaggaaaaaactgcgttcattactcccataggaacttattgttatacgacaatgcccttcgggttaaagaatgcaggtcctacttttcaacgtactactcgaatttctttgggtagccaattaggacgtaatgttgaggcttatgtcgatgacttggttgtaaagacgcgcaaccaggaaacgttgctttcagatttagcggaaacttttgagagcctccgctccgcccgcataaaactgaaccccgataagtgtgtgtttggtgtacctgcgggcaagcttctcgggttcttggtctctgcccgaggcattgaggccaaccccgagaagatacgagctatagagcggatgcgcccccctagtaaacttagggatgtgcaatgtgtcaccggttgcatggccgccctaagtcggttcatatcaaggctgggagagaaggcgctacccttatttaagctcctcaagcgctctgggccgtttacttggacggaggaagctgaacgcgccctcgctcagttgaaagcatatctcagctctcctccggttctagtcgccccggagccaaatgaacccctgctactctacttggcggcgaccccccaagtagttagtgcagcgttggttgtggagcgcgatgaggacaatcctcattccgcgcacccccaccctgtgctgacttggcccgggagcgagcagggaggagaggcccccgagccgaacggtggcctaaggcccctgacgaccggagtcggccctctgcccgctcgtcagatggtgctgggcgcccccgaccctcaggaaggccccgaggccactgccggaaggctgcatctatcgccctctgaccccgaggctaaccctgtaccgattcgacccgggaaggagcagggagaagaggcccccgagccgaacggtggcctaaagcccctgacgaccagaagtggccctttgcc

SEQ ID NO: 1089 - DNA, 1112 bp, Oryza sativa
acccactttcactgcaaccttcgctataaggctcttttcccaaagctttagtatagcagcagccaaaccctgcagttttgtatttctacctgccagaaattagtcaagattatagttgggctacatatataaacatcttatgatgggttacttatgaatatacaataatgcttgtggaactttaaggaaataggttatgtgtgcataagatgttacaatagatagtagtgacaatcaacacttaaatcatcctataaagcatattcatttgaaactatcaataaagtgactatcgagtgcagaatatggcaggcctgcaggtcgactcacgtaggtcaacatgtgttggcaaaggccgtgcatgcttccgcaggtaggtcagctcctcatctgctagtgctggtctcacaccaggagggcattgtctaaatggagtcttgaagtcagggacaacctcaggaaggagatcagcatcaacaggcaatggtgtgttccaccaccaatcgataaatcgagggcccaaactgtccagtagtctgttgacttctctttcatatagtgttcccttgataggtttgtcgtccttatcatcagcttcatcattatcattggttaaagtttcatctttactccaatatttcccttgggatgtaggattgttagatgttactggggaaagttcctcattataattaacaaagtcacgatgccgctttgcgttttctaggtaactgcttcctctgtacacaaaatgtatgccccctcttgtccaaacaactaagcctcctgttttaatctaatgaaaagagaattaaaaaaataaatatcaaaggttttgaattgataataatgatttggacttaaataattcaaggtaaagagggtgtcgttaaaataagttctctggttaaccataggttaactaagccaaacataattcatcagctaagccaaccttacaatttcagccaattaaaatcttggatcaagcaccagcagtccaccaaccggtgtagcaacacctgcatcaattcaatcatttatctgccagaaaatgctggtcacatttgcaactttctaacagaaatgtgggtcatgatgcccaaaatgaa

SEQ ID NO: 1090 - DNA, 3842 bp, Oryza sativa
atgctatactggtaaatatttgataagctcctggtttggaatggtatattctggtttgaagatagaactgtgcagccgggatggttgtccagaatggttgggcctatgcaacagggtatgttgtatagcgttggattaatattgtttaattacttaactgttttattaaattctcaaatgtttgctaaatgctgcttttgcaaatgaaaccctactatgccatcctttgttatcctgtgcacttgcatatttgctgcgtggcttgctgagtatgtcatatactcaccttgcaatcattcatcagaggaagagttctacagtgaagctgatggtgtggaggattaggtgaagcccttgtcaagctgcctgtggagtggagccgtctgcgccgtttatcttattttccgctgcttagatatttattgattgagaggaactatctacctctgtaatgacattttattcgcttattaattagagtaataattgtactctattatcaatttgttattgtgtgcctcggctgattcctggacgagggttcacacacatgtaagcgtttggaattttggatagaaattccgggcgtgacattaggagaacttaagattaatatatcatgccaaaatacacaatttttttcacatgaatatatactaatttatccttgagctactaacttatcatataaaagataagctcgagctcagctcgacaaagctcgtgagcttgcagctaggctcgagttcggatcattaagagttcgaaccgcgctccaatctagtatgagcctcacgagctcgagcttttttgacagtcctaattggaagtagcaatgataggtcagcctcactgacttatttttaactggactgccacgtaggttcaaaactactccagactaagttgttgggggactgtggggtaatttgcaccattgcaatagttcaagggtgtaatttggactttttcctcttttgtatacttccttttcttttttaaaaaatacagtacaaacgcaagcctttcactcccactgggtgatcatcgctaccactgccccaaccaagtgtgttgccacactccgtctcgacgacaccataccaccgccggctaggctagtcattgtgtgatcccatgtcccgtctcctaaccacaagacatgtctcagcctcaccgccaccggcgccttcttactcactcatctcctgtcacacccaaagttttcccttcccttaggtttcaaatcactaataaatggcttcaagaatttgctttggttaccactagaaaaccctagttaacaatacatttaatagtcggaattgtcaggagaatctttttcgaaatctctttgctctaaaaatcactaacaagacttaaagagtcaatatcagatcacggaggcaatggtgctaagttaaaagtggccaagtaattcttcttcctttggcctttggtcgtgaattgtgcccaattcactcccctctcagcccgtggcttgttttgcatgaggaaccatatacgtgtcagtttgcggaaccatttcctttcctttcagtataggtagtcgagttgtctaaccgtaggtgcaaccctaggttcctaccggccaatcgtttgccgtaccggggctttaccgtgaatcgtgtctagcccgccggtttagctgcagtcgttgttgtgtcgttcactcgttcatttgaacgaggtgttccctgtggttcgttcgttcgtccgtcccgagtcgtcctttaggttagagccgttcagagccgccggctcctttcaccggtttcgattgatcatttgggtgatcctgtgtcacgtagaattgactcgttgagtcggtatcacgtgaggcacgcttgccaatcaatctatcctttgatcctatgttctttcgggcttaaatccctgtcaattgattaaggtttttctgttaatagtaatagcacagagcatcttctaaaattcataacttaataatctgagctccgttttaacccattcaaattgcagtgaattcgttaaatgtcaagaatccattaaaattggtttcttttgttgtttcagtagctttttagcatgtatttattgtgtaccttgtttgtcgtttagactccggcacttctgacgctccggtttattttgaagtggtcgccgaggtcccgtcaattgaagagcaaggcaagtcatacagatatcattgatcatattgagcctatttgcaaaaacccctgcttttctctcaaaattgcattacttttataatgtcatgtgggatggtttctacccatactcagcctttgtttaccttaattcattgatattctgggataaaaatttgactagatgattggtctaggattgcttagccaagcttagatcaactagctcacaatgggattcactataatttagtccttaatttgattatgctatgccttcttggcatatggttaattaattaaaatatgctttacttggtgggtcgtgggcacatgcatgatgatttatttggtggttgtgcccatgacaattaaggaccggttctcgggaatccctggaagatatactcgtactaatcataagccatatgggctctaggctgaatcttaagtataatattttctagctagcacaccattggcgaggatagatgtgatggagtatggatggacctggattttggtctatgctgcttccggatttacctaggcacgagcggaggctgcctgctcctggattttggagtgggggcgaaactggaggtgggcatgctggttaggggtggttatatggagggttttgtcacgatttccccctttgcagtatcgtggcggtacttggggcatggtttcatgtgtggaatcgtgtcttgtgggtaaagttgtacacctctaatcagagtaaaactattcgaatagccgtgcccacggttattgggcggtcaaccagctcaccatgattagtctcaccttaataatttgccttaatgaactagtgtagttcaggtggttttggtttgggcctgtcgcaacgtggtttagcgttggacagtgatgatgttaatactacttaattatatattgttttactgctttcaacttatgatttacaaatgatgtttttactgcaaaatatcctatgagccaatcctttgttttatccttgcatcataccttccccttggtatgacttgttgagtacggtggttgtactcagtcttacttctttttcccaatcccctagaagcagaagttggttcagatggtgagttctatgaagtttaggattgtgccagccgtcaagagtttgcctgtggagttatggaggaagcttcgcgttgctgtgaagattaaatttagttctctagttttttcgctgcgtatgagtttattttgttatttttgtaaaacgtggaactatatcaaattgtcatctgtgtactatagttgatgtctggacagaggttaaatgcacagatagccggtgattcgggttattaaatccttgggtgagacatctccaccgcccctaattgttcttccatcgccctagtcatcactataaagccgccctgaaccccctcccccccccccctccctagtaacctccaaccttgaaaccctaatccggtaaagcctatcggagttcgttagggtgttagtgatgaggcttgccaaggaggttgtggtcgccattgtcgtgactgccaccatcattgtccttcacgctcgctgtttgatctgatgacattcatcatagtctattgagatttttgggaaatgtaagtaaaccaatgaaagatacaattactttggtaactctgtgaacat

SEQ ID NO: 1091 - DNA, 1762 bp, Oryza sativa
atccgcttttgcaaagtccagtggagtaatcactcggaagaagaatcaacttgggaacgagaagatgaattgaagtcagctcatccgcatctgttcgccagttcttctgaatctcgaggacgagattctgttcaaggggggtaggtttgtcacaccctgagaattcaaaatatgtaaattattgtttaaatggaatttttagaatttatttttaaaagcctagaaaagaagatctaattttaattaataaattccaatataaaatggggccagataaaatttcattaaatactttgcttaattctataattcctagatttttctgggatttatttgagctaaggaagtatttttaataaatggaattgcatttaagaaataatctaaattgaaaaaggttttaaaaagtcttcttttggctttgggccgaaagtcggcccaaaaccttctctctctctctccccggcccaagtcggcccagtccgcagccgagccgcccgcgcgcgccctcgctgccgctgacaggtgggtcccgcttgtcagtcgtcgtcttcctcgcgcagccgccgcccgaaaccctagcgccgcgccgccgccgttcctttccaaatccggccgcccctttccttctccggccgaattgatagaggggaaatgatcctcgggatctcctctaccttttctcctttggaaacatcggctaaatcgttttggaagttcgtggaatcgagttcgattcggatcggcctctttccttcaagccacgaagtttcctcctcgtcgccggccgccgtgggccttcgtcgccgcctccgagcccctttaaaaggaccccgagctcttctctacccgccgccacccttgccttcgcctctcgtcgtcggaaatgccctagcgccgtgtgccctagcgccgtcgtcgccgccgtcgctccagccgtgcgccgccgccgttccagacgtcgccgtcgctcgggaaggacgtcatcgtggtcgccaagtcgtcgccgtcctcgtctgccgcttcgccaccgtcggagaccgccggagcatcgtcgccgccgtcgacccgaagagcttcgccgcttcctcctcgtcgccgtcgccgtccgttgatcttccgccgtcgctttggtcgccggtgagtccgtcgtgccgtccgctacccgttggtgccctccgttcgtgccgtagtgccgccgttcgccggcgagcgtgcgccgtccgagccgccgagccgccgccgccggtggtgacatcaccgctgacgtcatcggggccgttcgtcgtagaccggtcgtggaccgatcgatctcggccgtccgttttggatcaagtcgatctcggccgtccgttcgtgtgaaccgccgccgtgcgcccggtccaccgcaaaccctagcctgctgacgcaataaatccccttttccttttcaaaaataattcattattgcgtcataattcaattaaaatcaatataagtgttttaatccgattaaatcttcaaaaattcatatctaattcatcttagctccgatttagttggttcaagtctctaattttttctaaaattgagatctacatgttaaaaatatccacatgtactgttcatgcttgtttatgtgctgttttggtgtttttgctcttttctgtttagattccgtcttttccggagagtccgttttcgccggagaagagtttgaagagttccaaggccagcaaggcaagtcacacagatcccaaacaaccctttgagcatgttgatc

SEQ ID NO: 1092 - DNA, 2395 bp, Oryza sativa
cggttaaccctagggcgtggcatgtgggctttgttgaactttggtctcttcaacttatcgatgttaaagtattattgaactttgtttatattattcgtcgaacatattatcatatcattaatcatcatataatggtattatgtggagtgtaatgatgtaagaataaagttataaagttatcttcatgtataattaaatatgtgattatgcctcactttgttgtttccaatatgaattttcttccaaccaacatcgctaggttctgtttcgacgtttccatttccaatatactgatatcgttatcgtttttttataccgtttcgattccgttttcggaaaaaaagaaatatagaaataaaaatggtagagggtttttccgaccattttcatcctaaacaccaacagcaccatctctctccaaattgtactagcatcgtgttattacttattccacgttattatggtaaaaaatttcacggcgcaaagcatctaggctagtccttaattcactacgtagactcgtggtaccgtttgtaaaaaaaaaaattgctccttggaaatcgagcgattttacaaaaaatgataaaaatcctagtatgtcccaaaaattgtttagagttttaccctgattccaaagtagcaaaaacttataaatttccttttgttatgaaggaggcccaagttgcttagatgactacgtacgtggtataattttcaataaaaaatcggtgcgtgttgtatacgtgagatcctttttgtttgactatggcaaatgtcaactaaggaggtcccacttgcaagacgttgatgttcccttaattattttgcaagtaaaaaaaaagattttgcaaagtaagcgtaattcaatcgattaggtttttttttagaccaatctacccaattgaagttatagacttgacatgggtgctcatatttatagtttttattattatttgatgggaatagcttattattttataatggtaaacgacatacccgtcgatagtgagtcgtccgtggtttcgtcaatctcaagatatatcggtcggtctttcgaaggtacttgtatgactagggtgtgagtgtttgcatttagggtaagagcgcatatgttgtgtacttgtgtttgtatatgtttgtaccatatttctcggaagaaaaaaaaaaggattttgccaaatgcagccgataaagtgttgagtacttctattttgcccatatatattgaaagatcagtagtgttccttcctttgcaagaagttggtgtaccattctggaaagagactaatctattgatctttcaacaaatttggaactctaaatcttgcagaatattgaactaatgtatagaacccattttgaatgaaaaaaaaggataaacacataaaaatcataaatctagagaaaaaatagttgtcaaaaacataattttgatgcactataactaatataagttttatgtaactaagtataaatgcaatgtaattgggtataactacaagttaaatctacatgtacacaaatctttgatgcaatgcaatattttacagatgaaaaatcaaaatatatactctctccgtccctaaatatttgatgccgttaactttttaaaacatgtttgattgttcgtcttatttaaaaaatttaagtaattattaattctttttctatcatttgatttattgttaaatataatactactactcaagcttttgaatattattcaaaaaagtttttaaaaaaagacgaatgattaaatatattttaaaaaatcaatggcgtatgatctagaacatatttaggaacggaggagtatgatctagaaatctattctggttcatgtacggcgaacagcacaaagggcggaggcgcccaggcttcgttccccaattgggccccttagaacaacatctaagcccgcgggccacccaacttaaaatcccaacatcggagcatcctgggcccaagtcataaaccctagcttctcccttggaatcaatcgaaccgattcgcccccctcctcactcactgtcgtgcttgcctatcgtctccgctcccggtgcgcagccggcgagccggagccgccgccccctcttcgcgccggcgggcttcttccgcctctctgccgccagtccccggccgatcccatcggcagtcggcgggcggtctccccgcgggtggggtgggggcgggacggacgatgaaaccggtggtggggatcgtggtgtcgaacaagatgcagaagtcggtggtggtggccgtcgaccggctctttcaccacaagatgtacaaccgctacgtcaagcgcaccttcaagttcatggcgcacgatgagaccgaggactgtaacatcggcgaacgggtcggtaaccgagcttcccttttcacttcccct

SEQ ID NO: 1093 - DNA, 531 bp, Oryza sativa
actatagggcgaattcgagctcggtaccccccgaatttgccgaccaattcttcgtggcgaatccctttggtgaatgcggcgatgatgacgtcgtcggtgatgtcggagatcttgttacgttgttcagaaaatcgccggatgtaatctcgaagagattctccggacttctgaatgacgttgtaaagatcatattgtgtgccgggacgctcgaaggtgccttggaagttggcgatgaagtggtcgcgtagttcggcccaagatccaattgtaccacggggcaatccatggagccaagatcgggcggaatctgctaaagccaccggtaaatagttcgccatggccttgttatctcctcctgctgcgcggattgcgagaccgtagacggtaagccacgattctggattagtggtaccgtcgtacttctctattccagtcggtttgaagccggctggccaatccactcgacgcaggtcgtcggtgaaggctgcaactccgtcaaggtcgtcgtcgcggcgatccggcgagtgatgg

SEQ ID NO: 1094 - DNA, 1206 bp, Oryza sativa
ataatcttgactaatttctggcaggtagaaatacaaaactgcagggtttggctgctgctatactaaagctttgggaaaagagccttatagcgaaggttgcagtgaaagtgggtatccaaaataccaatcatgaacagatggccagaaatcttaaggtgtgtattgttctcatgaaatatattagagtcattaggatttctttgatatccatatgttcaatcttcatctgtgacactgaatcttctcagtgcagcgtcttacaggaggaactgtcatattgaggaacaaggattatattattatatatagaggcaaagattttcttcccggtggcgttgctgaatcagttattgaacgggagtctcaggtacatgaccagcaggcgaaagaagaggaggctcgattaaagatggctgactcacttcaaatgattgttggactatcatcggagagaagttatgtgggaactttcagagagtatcaggatttccatgatagccatgcacgtagaacaactgaaaacaacttcagaattcaactagaggcaaagaagcatcgattggaaaaggaactgaaagaccaggaatggagactttccatggtatgctttgatctaactcgtcttgtaccttcttttgaattcccgaacttccaatggtaatgtaaaaatggtacgtactgcagcttaccaagaagattgaaagatcaaaccaagtgctggcaaagcttcatagttcttggagcccttcaaagaaagatggagacagagaactcttgacagaggaggaaaggaggatattccgaaaaattggcctaaaaatggatgaacatgtgctgcttggtatagccttttgtatcaaactgcaatattccatgcctatatgtgtctctatccttgaaaccaagaaaagctatttaccatcctatgatgaaaggtattcatccatggttttcccttgcagggagacgtggtgtctttgaaggcgtaattgaagagattcatcaacactggaaacataaagaggttgtgaaagtaattaccaagcagaaccaagccagccagatcacgtacacatatatgatgcttgaggttgagacaggaggcacattaatagcaatagagaggttcactaccagccatgccataatactttaccgaggaaagaattatcgtcggccaacaaaatcagcacccagtaatctcct

SEQ ID NO: 1095 - DNA, 9803 bp, Oryza sativa
acaaaatgcactcatcaaggttaagaaaagataagagccaaacaacctaagattagagaaaaaaaaacagctccctcaatatgaacatatttattatttgagtaaaagcataacaacactagctatctaaaccgatagcaattaggattaatttgttcggactccagatagcaatgatcaattagcatgatcccagggtacaaggtttgtgttgttctgccagctgaagtgatcatcagcagccatgcccgaattccagctgtacaaagcagaatctggaacagttgatgcaggttctagagtgctgatgttattggtcaccatttcagcagttgaggttgttgcagttcccaagctgtcaacatacatggcattctgagatgcagagctgatcatgctttcctggctcatctcacttggctcccatcctgaattctccatcaatccctctgcttgattgatatagcctgcaaataataaggtccaaggaatcaatgcatgcttttttgaaattaaaaataaagctgacaaagtcagggagctacagcaatttcattacttggcatgcctgaagaaatcatgggcttttcatcatgaaatggaattaagcttttatcaacaagtgccatctcattctgcacttcctccatctgatcccactgttggtatgcttggctgaccaattgcttgatttggacctgcaattgagatcaaagcaaatttaaggtaatcttaagaaattagtaagacaatcaaatttcattgaccatacagggattaattaatttggtggaatgaaggaagttaccatttggtgtggaagcagttcatgcaaagagcacatccgaccgccgaatctcactgctaagatctctcctacggggttgaatttaatctcacaaccttcagatttgaaaacatagcatttccctcccatgtcacatgattttgcttgcttcaatgtcgcgctccactgccgatctgacatgccaacaagctgaacagtgtgtgcacaacagaacaaattaaagcagaaataatttgtattatacaaattatgaactataatcccccaaagtgtttgaacaaaattgaaacaggagaacctacacttttaagcttgttgggattcatggtgttaagcttcaaaaagtcctggacgttcttgatcccctcggcctccaatctcttgtcgattggcccatctttgcctatgttcctcagcctccagacgttgtccgtcagcaaaggagggaaatgcttcttgtacactgcaggtaaaaggaactctgtgattaataatttgttccttctattgttgtacttaatatgatctgttcatcgaacttacattcgcctcgatgatctttgactgtgaagctctcactcactgcctcttggatcctcaatccgcaactgtctgtcagcatgacaacgcgcacaccgattctgaacttcctgctcctgatccagcttgaattgtcagtgaatgatacatcatcaatcactgcaactccatggttgctcatggtcacactgactgtacccactagcaatggcctcctcccttcccgagccttgacgatcgcggtgctgaattgatcatcagtccacctagcgccgtcttcatcgtatcggaaatcgccatctaggacaagtacttccagttttattgctgaatatcctaggtgagtgtttgatggtgttacaatgaggttggtccttgtgtcaacaagctggatttctattggattgttgtcgatgtcgacgagcttgttgttggtgaagattggtagcttgagctgcttggtgaagacaagcttcaatggaggtgagacccctacatcttggatttgtaatggaagagatctgatagagatggttttattgtcagattatgtgttgaatatgtttaacaagtactatttccatgcgtattgctcaaaacttgtttttgtacatccaaatttgcagaataaaaacgtttgccatttgtttcagtaatcttacaaggtttcattatactaacctctggccttgtgctatatatatgcatcttgttttaattcaaaacctcgcaattaattttcagagatagagagagattgagaaattttatttcaccatacctatgtggtaagtcatgaccatactggggaaatatgttccgaatttcctcacgcacctaagaaggtaaaaaagaaaaatcatccaaaagaaaaagggttaaatgaatgttcatatatgtgcactaaaaactgaaaagcataatgaaattcacacatacaagagaaggaaatggtatacaactacaagaagaacaaatagtcattcatatgtgtggatgcataacaggtaatgtaagttttattgattctagacaaatttattaaaattcgctttctctacaatccacagaaagtgaataacttaatttgaatccaacgtctcacacatgaaaaataatcattaattatttctccattgaaaatgactaataaatcgaggcctaatacatgggaaagggaattgctaaaaaattatcgcgaattcaaatgtgactatagtatacttgtactgtatagcatagttgtagtgtatagatgaattaatattaacttaccaccctacgaatgaccggttccaggttaagaacaatttgttgaattgtttccgctgccactgcccttctcaccaccctgcagaaagagcacacaactatcacacacccagttcgcttcaagtaattattgaatttgttcgaagttccagttgaactaaattaaaataagcatgcataatatgcaaatataatagatacaatactgttcatatctctacatatccagagtgatcaagagatcgagattatgatttatatatctcaatggacaggagaagaagcatggaactgaatcttgccaataaaccgtaatcaaatttgacgaggcttgcaaagtgatcgatcgatcaacatgaaaatttgacgaggaaaaaattgaagagaaatgagttgaactaacgatctgaaggagagcacagggcggagacgcctggcgccatggcgtcgctgctgatgttcctcggccgaaccgctgctcccatcctgatcatcgtcgtcgacctcctcctctacccgtggccttcgcaccgacatcgatcgatcttcagaaccaagaagtaaaatcgatcatctgcttgcagggcgtacgtgcaagaacaatattttcagaaatagttacacgagcagtaatatgtaactaatgactgaaaataagctcgattgctaattaactagacgaatatttatacacacaataattaagatgagataaaaatgaacgcaactgaaagtacctgtctgccgaactgaacaattaatcaaactatatggctagctagctaattaagcttagccataattgcacactaactatataatatggggatcctctagagaaacgggttgttggtagcagtatatataggccatggagatagagggccctggtcatttcctaggaattgttacagaggaagtgaagaagttgctgcaagttttctcctgcagtcgacagaaagactgtggatggatgagagacaggagaatgttccggggaggccgcaggaaggtagctggaagctatgcctcgccgtcgcatatgcatcccaatttctcgcgtactactagtagtagtagcctgcatgtgcggctcgcgagaggaagtagctgcagcttttgcagcagttatatttaccatttacgttatatatactccttggttctactccatttttataacaccaaattagtttcattaaaaactataattgaatatattttcataatatatttattttaagttgaaaaggttgctatttttttctacaagattagtcaaacttggaacaggttaattttgaaaaaaaatcaaaacgacttttaacttgaactggagagagcagaatataagcttttttacttatgaatctgaatatgtctatattctttgtaaaaattactactccctccatctctaaatgtttcacgccgttgactttttttaaacatgtttgactgttcgtcttattcaaaaagtttaagtaattattaattcttttttctatcatttgattcattattaaatatatttttatgtatacatatggttttacatatttcacaaaagtttttgaataagacgaatggtcaaacatatttaacaaagttaacggtgttaaacatttagggaatgagggagtatatattttgggatagaggtagcatatccattccattataagtttttttatttatttagcaaacactaagattaaaaaaatcatttcagtcatctaaatggttaatttttttataaaaaagagtaaatttaagcatacctaggttttatggtcaaaattgcaaaaaagaaatcataggtattattacatgagccacttaaccccaaatattatggtttgaaagttttacaaaatgccaccttaagcattttgagcacaaaattaatatataaaatttttaatggtgaagttctttactaaggttgatagtttaattctttcctattttcaaaattttgtttaaaatatgctgacatttatcaagattttaattaaggtggggttttatacaacattgagacattatgtgtcatacatcatataagcattggttttctacaactttaaccataaaaacacgagattttccgaaattttttagttaaaagaaaatagaattgcttaaattcctccttgccagcacctgattggcgcaaattgtatgtattttgatgcatgcattgtaagaacctgtggcatataaatgtctatatcgtggtatgaattcccaattttatatgtctacaacgacaaaactttactttgggtatgtattttgtagacaacgaaactttcttcggctgagttcttatcccaatttttccaactcacatctctcgttttcagcacgcacgcttttcaagctgctaaatgatgtgtttttttgcaaaaatttctatacgaaagttattttaaaaaaccatattaatcatttttaaaaaataagttagttaatacataattaatcgtgcaataacgtgtgctctgttttgcatgccggggtgccgaacacagcctttgaaactttttattaccaaattaaatactccatatagcaatgacgactgggagcgggatgcatggtataagcactaatcagtcaagaaaggtgctggcagaaacgcgttactagctagtacgtgtgagtccggccaggagcatggatgcagcttcttgggcatgacgaagcaaatacgtatacgtgtagcatggatgcgaccgagcgtgaagactcggtcggtcggtccgccgtgttcatgttacatgcggcgacggtttcatgactagaccacgaccaccacagacgacggcatggtcgtaggttaacttccagggcccttctgtcaaactaaccactctgggacgagatatacgtagtgcaaaacctagccaacatactagtatagtagtagtggtgtagtaggagtactactgtacgcacttccacgaacattctggcctttctcggtcacatttggattttggagatagggcctttttaatccctggcaagttttttcctcctatcatatcgactgtttggacacatgtataaaatattaaatatagacaaacaaaaaaactaattacacagattgcgtgtaaattgcgagactaatcttttaggtctaattgctccatgatttaataatgttgtgctacagttaatatttgctaatgacggattaattaggcttaataaatttatctcacagtttacaggcggaatctgtaatttgttttgttaatagactatgtttaatacttcaaatgtgtgtccgtatatccgctgtggcatggtaaaaatgttcacccctgaatctaaacacagccataatgccaatatcattaacgtgatgtatcaatcttagctaggttgaataatatcatagataaacaaaaataatatatagcttaagttttccttcgagaaaagcaatagcagaagttcgccgagagctgacaaaattctagatcggtatgcgtgttatcctatggaaatgtaaatatactcaaattaagttgaatagaaaagttacattaaagttcgaattttgatttaaaaaaactacttcttcacatactcccggcccttatctccactaatcacaatagtctcttatttaatttctcaatttacttttccacctcaaccaatcacaatcatctctcattaatttcacttttttttatatccataaaaatctccgtgcaagttgaaactattcgtgtacaaatttaattaggtagctaataaataagaaaaagactttctccatttcaaattactcaccatttgttgtaggtttatcataaataaaatatgtgaacattaatttttgaaaattcgtgtagtttaacagcatatcaattatatactaagaaaatatttctagtggtgaatctataaataaaaatataaatcttatgatattaaatctatatagaaattggtatttacatattaaaatatttaacttacgacaaacctagaatggacgataagtaattggaaatgaaaggtaggaaatagtgtttttttttaatttctgcttaaccttctttcaatcgtggtcgcttcgaacggttaattttatcagatatgcaatttcgttgttattaaccagctagttgacaggcgactggacggaccgacgaagaacgccgcatggtcagtatctaccgaccaaagctaagcttccaccacttttctgcattcctcaatctctaacgaaagcaactactggtactagcgtttttttctacatctcaaaagttacactttggcatgacatctccttaatttggagagacttgagtagaccacgccaccatttaaattaaagtgcgttgatcgccggtcaactaaacagtgtatgagtatgacatcagacagcgactgttaattgattagcaaacaaaatacatcaaatcgagcaagcattcaggtatacttactactctaaatctattataagttacatccacctaaaatcccttacaatttaaaataaagggagtacctgacgttcatgttcctagttttcatcagcgaatgatggcatgatcaaatcctagccacggccccacccaccctgatagaaagatttgttcttttaagagcaggtacaatagcaagctataagccagctgcaaacatattttaagaagataaataaggagagagaagagcagcgggatacagatttgtagccaggtgtagcacgggctccaagacgtaatgtgtgtatgacaggtgggaccagatattaatagtgtaatatgtaactattgtatgaatgagctattagattggctatatatgaattggagctattagttggctatactattaaactttctcttagacctgaaacaactagaattacatatgttaatttatttcgagacaggtcaacacatgttaatttgaacttgtggaaccatacagtaataaatctcctacaagattttgcaactgattttgatcgataccgttccgtcccaagctagccagtagcaatatcagttcagctgtttttcatgtgcccgatcctctactttagccctaacttaatgcagcttgactttgtaccggcagtcaaggtcaaggtcaagtatatatgtagatagagctaatttaagtctacaagtagaaaagaagaaccaaattaacaaatctccctctctttctcggttagcagaccaaaagaaactgaacgtacaaaagttccattcttctatctttttttttaaaaaaaaagtaaagtaaaacccatgacaaaagctccatttttattttaaaaaatttatcaaatcccatgctttatggtaaaaaattaaaaaaatcgcatgtattatagcttgtaatacatataattgcatgttttagttttgtggttcaagtgttacatcagtcttgttgaaatctcaattaattttagtgtgtcggaaacaatactaggttttgaagtagtgaagagttaaaataaataacctaataaagaaatcaaaaatatattttacactcaatactctaaaattttaagtaaatataacttcaaaactcctgtcaccagaagttcagaatacctgaactttgctaaataaaaatatgttctataatccaggccaggatgggccgggatggatagaagcatgcccgtatgggctggaaattgcaataggaataagttcactttaggtcccttaatttgtcagctagtctaaatttcgtccctgtttcgcaataccagatatggcacgtcccgcaactctcaaaacagtataaataaggatctaaggcagtttggatggcggtttcggctgacgtgacacttatgtggtgttgatatggcacttcaagcaaaaagaaaccgttggacccacgtatcatccggttaaaaataaaaacaatacagtgggacccacgctatcaacccatatctttcccttttatcactcttcctcctctctcatcctacccaaccgtgcgcccaaacccgcgtgcgctctttggagcgtcggagccgacagtggcacgcccctggggtgcgcctgaccggccatcgccgtcgcgcttttcggcgttgggttcctcctccttgacccgctcctcgacagcatccactcccgtgacgcgctcatatcctggtgacagtgactcgtccatccttcatccacactccttgtccacgcagtacatggaggaaccgagcgagtttgtacactaaccgtcaccggtggtgaacgagtagaggttgcttgtggcaaacgcacccttggcagcccatccaagcgtcatctctgcggacaacatcgcaaagaagggcacggacaccacatatgtgtccctccagtagatgtcggggtcgtagttgagcgcgcgggcacggatgcgaccagtagaggtcaaggaggccttagttgggtgcgcgagcgagtttctcaacgtagaccctgaggccacgatcggcaatttgctgctgtgggaagaggagcagcagggaggtggggcgcaggaggaagaagaagagggagcggaggagcatggtggggacggggaggcacgccatggccgtcttccaaatctcgctctgcttgcttcagatggaaggagccaccatggtctcgctcattctgtttgcttcacctactctctcccgctgctcccctttttcacttccacgaccattctcctggggctttccatcatgaagttggatgtggacaagagcggcgacaacgcgggggcagctggtcttctgttgcttctagtggcgcccgctgtgtccgtcataggtatactgctttggctcgcgcgtgcgcggtcaaacctcgagcccgcctgtcctcaccctcagcttcctctccccacgcccgaccatcttcgtctcgaggcatgtcgtcccccaccgtgcgctcgtccggtgcaacaccgcgtttgccagccggccgcctgccattgtgcctttctgcgtgctcactactagccagtgcaccgtcagctccacaccgtgtcccaacatgtgggttactcactaacacgtgggtcccactttttatctaacttgaagtgccctgtcagcgccacgtaagtgctatgtcagccaaaaccgtcgttcaaactatgttgagaccttatttgtattggttttgga

SEQ ID NO: 1096 - DNA, 743 bp, Oryza sativa
aaaagacgaatgattaaatatattttaaaaaatcaatggcgtatgatctagaacatatttaggaacggaggagtatgatctagaaatctattctggttcatgtacggcgaacagcacaaagggcggaggcgcccaggcttcgttccccaattgggccccttagaacaacatctaagcccgcgggccacccaacttaaaatcccaacatcggagcatcctgggcccaagtcataaaccctagcttctcccttggaatcaatcgaaccgattcgcccccctcctcactcactgtcgtgcttgcctatcgtctccgctcccggtgcgcagccggcgagccgcagccgccgcccccctctccgcgccggcggcctcctccgccctctctgccgccagtccccggccgatcccatcgccagtcggcgggcggtctccccgcgggtggggtgggggcgggacggacgatgaagccggtggtggggatcgtggtgtcgaacaagatgcagaagtcggtggtggtggccgtcgaccgcctcttccaccacaagatgtacaaccgctacgtcaagcgcacctccaagttcatggcgcacgatgagaccgaggactgtaacatcggcgaccgggtcggtaaccgagctcccctctccactccccctctctctgtttcagcttttttctttttttttaatccatgctgatttgtgatgcgagcatttgatttctctggtgtgatgtcgttcatt

SEQ ID NO: 1097 - DNA, 1594 bp, Oryza sativa
tagttggttcaagtctctaattttttctaaaattgagatctacatgttaaaaatatccacatgtactgttcatgcttgtttatgtgctgttttggtgtttttgctcttttctgtttagattccgtcgtttccggagagtccgttttcgccggagaagagtttgaagagttccaaggccagcaaggcaagtcacacagatcccaaacaaccctttgagcatgttgatcctatttaaagctattgtttctattcaaatattgcatttattttcgaatgtcattgggtggaattaacctattgtttgttatagcccttttgttcttgattactttattccttgataccttgggttattataacttgactagttgagctttatatattggttcaactagatattagatataattgcttagccctgcttagaaacattagctcactattgggataacttatgactcactgttatttaatgatggtttaatgatagttcacgatggtcaatcgtgactggttaattaattaatgtgccaactaaaacctggtaatggtgggttgtgagcacatggttttgatggttgtgctcatgacaattaaggaccggttcacgagtttcggttgtgaaacattaaccgtgccaaccacaagccagcatgggcaacggctttatcttttgtgtagcatggttcattgcggggcaccagactgagaagtggcggagataagcccacgggggtcgctggggagtccatgccttgtttataagggggtgattatgatctaggaaggtgcgctgcagtggattgtgttatgcaaggggtattgtcacaactcctttccgaggtaccgtggtggtattgaggcacatggtgacatgatgtggggttgtgtcttgtgggtacagtggtacacctctgatcagagtaaaactattcgaatagccgtgcccgcggttatgggcgggtctaacaatgtctttcgtgattagtctcacccttctcaccacaatagaagatgctataactggtaataatttgattagctcctggtttggaatggtatattcctggtttggagatagaactgtgcagccgggatggttgttcagaatggttgggcctatgcaacagggtatgttgtatagcgttggattaatattgtttaattacttaactgttttattaaattctcaaatgtttgctaaatgctgcttttgcaaatgaaaccctactatgccatcctttgttatcctgttgtcacgcccagaaattcacgaaccagaatttctaagctgaatgtgcattaaacccctgtccaggaccagccagggtacacaaacgacaattgttgacatacagatccacgtcttacaaaaatataaaagattacaaatgcagcggaaaaagataaaagcgagctaagcctgaagacttgactcctgcagcgggcgactccattccacaggcaatccttgacggcagcgacgaaaccaacctcttcgagacatcttcaactgggaaggacttcaactctggtgtgggggaaaagagagcaagactgagtactacccactgtactcagcaagtcacaccgg

SEQ ID NO: 1098 - DNA, 1922 bp, Oryza sativa
ctatccttgaaaccaagaaaagctatttaccatcctatgatgaaaggtattcatccatggttttcccttgcagggagacgtggtgtctttgaaggcgtaattgaagagattcatcaacactggaaacataaagaggttgtgaaagtaattaccaagcagaaccaagccagccagatcacgtacacatctatgatgcttgaggttgagacaggaggcacattaatagcaatagagaggttcactaccagccatgccataatactttaccgaggaaagaattatcgtcggccaacaaaatcagcacccagtaatctcctgacaaaaagagaagcattacaaagatcaattgaggttcagcgacgaggggtatgaattgacatataattctcccttctccccttaatttccaattttctggctgtctgggtatctcatttcctcattcgttttgcagtcaatgaaatacttcgctcaggagaggaaaaagtccattgatgaattgaagagagaactggttagtttacatgctgtttatatcaatacgacgaaatgaaacttcatatgcttaagcaactggaattttatgtacttgatttatcactcttgtgttacagaggaatgtgacatgggaaatcaggaagctaaaccatgatactgaacagtcttggacagcatgatcgctatcaacattgaagattggaataacgattcatcctctcttttttttttcgtttttaacatgataactacaaagaacaaagtacacagaggccactagatctggtaggtatggtagatatggccacaatgaattatcttgcaagtgtgaagatgtttttttttttgtttatgtacatgtgatacactaaagcacatgagagcagaatcattcaatttggctctgatactacgacgaaatacgaactgattactgggtgttgattaaagctcggggagtttgctgaatatgcttagcgctttcatgttctaaaagaaaacaagtcgtatgacctattgaagagaaactaagaagattcagaaggatgctgtactatctagttctacatcactgttacaaagttactataccttttaagggcgaggttacgagggtacaaaaacatgtgctgaaattctttccccaagcaaactacagaaaagatcctgcctagcaaaagcggtactagtcacctggcccctgaggaaattttacaggatttttggaagatttgaactaagtcctgttatccggtgaaaattctgcaaaattattgtgttcgaagatcccaataaactatgcattggtcgcccaaacgagagcactcaagcagaaggacacagagaagcacaagtgctgaagaatctcactggacggcagatggcaagctttgcattcatcagcttcattgttcttgccgtcccgtccttcatggtttgcgaggctctcccctgaactgctgctgctgctgctgctgccgatgatgatctctcttgggcctctgcggcgcgttcttgggattggtgaaccaggtggtgtagaggaactgcttgtgcggcccgtcgtggtcgcagatgaggcggagcttctgcttctcccgcatccaccgcatcatgatcttcatctgcctcttgctcgtcaggcccctcagcccaacgtcctggacacgaaaatgccaaagattttctcgctcgtcagggatgcatgcgatcagggtggcaatcagaggaacacaagatcgttcagggatgacagtttccatctgtcaagcactgctggttcattttgacactgtgagacattacgtcgaacaggtggcgcgcgccaccgggggggccagggcgaacggtttaaaaggtaacgggtgggcccggcggacagggagaaggagcagcagcaaggatgcggcggcggcgatcgagac

SEQ ID NO: 1099 - DNA, 621 bp, Oryza sativa
ccctcaggcccagaagatgctttacgctattctgatggcctcgaggaaactgcgccattatttccaggcgcatcgggtcactgtggttacgtcttaccccctcggtcaaatcttgcataatcgggagggtacaggacgggtggttaaatgggcaatcgagctttctgagttcgatttacactttgaaccacgccacgctatcaagagccatgccctcgccgattttgtggcatagtggaccccggctccagagaccgtttcagtctctgaatccagctcatacccctctgaactgcctcacgccgtccactgggtgatgcaattcgacagctccctgtctcttcatggcgccggcgcgggggtcacgttaacctctccgaatggagacgtcttcaaatacttggtctggctcgacttagagcgaccaataatatggcagagtacgagggactccttgccggactaagagtggcagccggactggggatcccgcgtctcttggtgttaggcgactcccagctagtcgttaaccaagtctgtaagagagtaccggtgctctgacccgcagatggacgcttacgtacgccaagttcggcgtatggagcgccattttgacgggat

SEQ ID NO: 1100 - DNA, 550 bp, Oryza sativa
cttctgttgcttctagtggcgcccgctgtgtccgtcataggtatactgctttggctcgcgcgtgcgcggtcaaacatcgagcccgcctgtcctcaccctcagcttcctctccccacgcccgaccatcttcgtctcgaggcatgtcgtcccccaccgtgcgctcgtccggtgcaacaccgcgtttgccagccggccgcctgccattgtgcctttctgcgtgctcactactagccagtgcaccgtcagctccacaccgtgtcccaacatgtgggttactcactaacacgtgggtcccactttttatctaacttgaagtgccctgtcagcgccacgtaagtgctatgtcagccaaaaccgtcgttcaaactatgttgagaccttatttgtattggttttggaagctgaggagacatgttttatctagtattgcgaagttcagactcggcgacaacttgaggtacctgaaatgaacttattccattgcaatatacgggctgaacacggacagatgggcccagaaaaaaaaatatcccacactccaaacggacat

SEQ ID NO: 1101 - DNA, 2623 bp, Oryza sativa
aaggaattctttctgccgtaacactcatggttcaggcacggtgaacgctgatcctgaagaatctactatgttgtgcgcatactgcagaatggaaaatttctgccttgcttcccccgaatgaatcattatcctgttggtccagttctaaccatatggactgcagagtacagaatgcattgtttcacataaagagaaagaccaaacctattcaattttgtgtttgatacttgatagatcctttgcagatagtttcgataggcttgtgctttgccatttgttgtttgcagcattaaaaccatcaatcaaaattagctacactgtccgctaactttacattggtgtctacatcggattgttagtgttaggttttgtggcattaattgacagcctgaatgggctagaaggacatatttgcctgagttgtgaataacaccagcaatttactggctgataatttgcagttacagtaacaagcacaacgtatttcattttcctattaaaaacaggatattctactctaaatgattctttttcttgaaccacgtttttctgattagtactatataatttggctcaaactattttttgctaatcaataatttaccctgtgattcgaaacacagggacagaccttctcaagttgctctggacagggacaaggacaaggtggcagcatcatccagttcattggtatgccctgacatgtcaatttgcaattgatgccttctcacctgttcttgattttctctaacatactttcttgacgtgaactctgcttttgcaggtttcaggtacaccaccgttgagagtggatctcaacaaagttagagaggcaaagagatatgctgtctttcaagcacagcatgaggggtgccttggaagctataaaagttttgattcctcgtttggtaattatcttgtccccgtcatcccaagcaatgacttctttgtgcaaattacaaataaatgattggcaataaacaaagtgcaattctacgccgtgaatcatgaggatgtagtttctgttctgtcatgttatatgtggaaattgtggtactaatatttcaaactaattctaaccaaccagataacagttgaaagttcagaaaaccaaactgcatgctttcttttacttgttgtaaataccaaaaccttctaatttcttagtaaaaggaactatctagattggtgaaaactgaaaagggtttgtattgtggaagcatttcttagtgtatatctggacctttccctatctttcttttatttttgggtgggaattttatcagcttcatatccttccaatcccatgcctccaatggaatgtatatctggacggcaatcattttattcttgtactcttccatggcctaaacaccttctcaattattgatggggctctttctgacattagttctctcctctggccctctaggctcccagcaaatcaaatatctgtagtactgaagaattttggcaaccaagtatatccatgcgtgcaatgcccccggtgataccgtactgattatttgtcggtcaactaacttgttgaagcgctagcagttaaggtgtccaagctgtactaacatgcttacttctcatatactatctagcagttaaggcttagctttcactgcactcgttttccacaaataatctccatcgttacattataaaactcaagcttatctgattaaaagatatgatcagcaaaccagttgagcctatgactaatggctttagggcctatatcacgttttgcgtgagagtgattgtgcgaaagctgtttctgacattgactaatcaaatcgtggaaggtacccatagatatgcgcctttcaactcttcgtccttgttagcttatcgacagtaaccaaaattttaatcttcacacttaattttagagttatttaatcgtaacacatttcgatatttttaagtattaacttttaaaccactaagaacatagatatagtgttttacctgtaatttatctaaaactgtttttcgttgctttgttcactgctttttgttgcctttgttgttaaatataataatttttaactataaatttagatatatatttgtttagattcgtaattaaaagttgttatattataggatggggatagatgttttattagcagtagctaaaacgatcgtgagttttgggtgtgcggcgacccatccgagcgtcggccacgacgatacgtagtgggccggatggatggatcgctcgctcgctacagtcgtgaattatcgacgcccacgcccaagcgcgagggaagatatgtgctcagagtcgctgagcacgcatctccaggcagccggccgttgcttcatcgacacgtatacttctgagctcatggtcacgtcatcggtactgcaggtgggccccaacgtgcacgtgacccccgtatcataatcacgtcctgccacccttttaactaatcactcccagccttttgctgatcggtgggcctagttgcccgagttctgacaaagtaatcagttggacatttggaactgattactcctactactctagtgaaaattagggaatttgacgggaacacccttcttggctctcctaaatgcacggccggcaggtgccatctgctggtcc

SEQ ID NO: 1102 - DNA, 1154 bp, Oryza sativa
attcctgcagccccggatggaatttgctgggattgctttgaattcgtgcacgacgccgtcgatctcgatgaggctgcaggcagggaccttgtcgatctcgcttctcctcatctgcctcctcaccttgaccgcctcaccatgccggccattcaacgcgaacgcgtacgtgttcgacatgcgtcagcgtcggccacgcgccgtcgcatcacccgctcggcgcgctcgacgtcgccatgcgcgcggcaggcggcgagcagcgcgatgagctcctctgcctcgtctagtctcccggcgcggctgagcatatcggcgacgcagccgtagtgctcgatgcgaggttccggcatggcgttgagttgctggagcccctcctcgacgagtccggcgtgacagcaccggtgcgtacaaccctaaacacgccgcaggcctgaccggcgcccggccgccacccagccggggcaccgcgccgccgcacctagcctcgtcgccgcgccgacccctttcccctacgccgcagggccacctccaggccgccgccgccccagccagggcaccacggagccgtcgcctcggcccggtcgctggccgtgccgccgcacctcgcctcgccccggttgccgactgcgccgtcgaatggctgccctcggaatggcgaaggaaacaaacttcatcaaatggcatcttcagcttaagggcaactaagtcatttggttgcgccgttatctaccgttaccacaaaaaataccgttaccacaaaaaacagacggaatgatgtggagggcgcgataaagttcgacgatggcataaagagatgctcgaactttttagtggtatagagacaggcaccatattttttaatagcacataggaaaaaacctccaaggcacatggacatcaacatgacaacatcgaccagaaattttggcatgctagtatatatgcaccaccgctggttttacgtaccgaaagggagtgattaattgttggcttttgcatttgtccaccatctctccacgctatgggcaagagcagtgcatgtcatgacacaagctagccagacctcaagtgccatatagacttcaggttctaattaaatactccgtccgtttcgaaatgtttgacgccgttgactttttagcagggctgcaggaatt

SEQ ID NO: 1103 - DNA, 704 bp, Oryza sativa
ttactccatggcattcagcatattgctcgttaattacacagctaattaccttgcttcgttcaatctaatggagcccaacacgcatgatcaaccagcgcaaagcaaggttttatatgccaaatctacttgtgtttgtgattaatggtcaaggttttatgtgcatgcttcacccgctgttaggtttgcctaggctcaagaaaatttttagatccgttactgattagatgaatcaaacaagtgtgctgcttgtttgcagaatatgcggtctaccatagcttgtatgatgactttgtgtggatggagaagttcggagatcccttgttccgcaggcacgtcgcaggtacccctgtatggctatatcttactttatgtatatttgtcatggcagctgtgtctgttcttgggggaagcatgatggcatgacattttcatgtacatgttttttcaactttgtatgaagaaacatgaatattgaaacattctctgctttgctgggaattgaacctcatagttttctatgcaattatattcatatcttacctttttggccaaactatatgtagaacttggatatagtacggatgtattgttgtagtgcacatgtactgagaacttgcaatgttccactgcatttatataattgcctaataaattaagtatgcaagtaacttttggtataaaaatttatgtgtgctccatcattt

SEQ ID NO: 1104 - DNA, 11210 bp, Oryza sativa
ggtttggctgtggagtggagtcgcccgctgctgaagtcaagcttcccggtttagctcgcttttatcttttccgctgcatttgtaatcttttctatttttgtaaggcgtggatctgtatgtcaacaattgtcgtttgtgtaccctggctggtcctggacagggatttaatgcacattcagcttagaaattctggctcgagaatttctgggcgtgacaagttggtatcagagccgaccttgaccgtaggacaagccaactggaaaccctaagagccctctgaacccctttttcatctgcatatgcctttttgcacctggaattgtttcgggaaaatttggagttttgcctctttggtttgcgggaaaaatcttggtcgttctttcggatcggattttttttttaaaaaaaaaattagctcagtctagggctttagaaaaattttagttggagtttattcgacagtcagtcgggaatttattgggggttatgcattaggtcgtgtctatattcgatgggggcaatgttatgcgcatcattttccatgcaactagtctatgcattaatttattgtttagttgcattagtgtctttatttgagttcatgaaaaatgttctatgcataaaaatcatcctgctcggttatttatttgagtcttcttttgctttgtttaatttggatttgagcatgaattggttcctatcccttgtctactttagatgtcagtcctatccctcgtttgcaagcgccgccccgagcttcagagtcgccgcccttagctttatcgccttcttagtctgtttgcttgctagttttcgtgtttaggtttgttgcttgtgggttagttggcggtcgatattatgtgtcagtggtatgactgcctcaattaggagttgcgtgcctctttttcagtgttttaatcaagattaagataattgcacttaaattcataagcaagattagtttctgagccccctgtttttcttccttttctcatatttctacctatccccttcagatggagataaggaatggttcacgcgactcgaacaacgccagtggtagcgaagagccgatcaatggagcacgtgccaacggtgcatctgacaacagtccgtccccaccgcccgagaacccaacaattgctcaggtgttggacaatcagactcagatgatgacaatgatgatgcaacagatgcagcaacagtaccatcaggtgttgcagcaggtgcagcagcaagcacagctgcagcagcagaacctgcagtttggtcctccacctcctcagtccaaactgttagaatttcttcgtgtcaagccgcccaccttctcaagcaccaccaacccaatcgaggcccacgactggcttcatgccattgagaagaagctgaatcttttgcaatgcaacgagcaggagaaggttgcttttgctacacaccagctacaaggtcccgcttctatttggtgggacaactacatggtgacccgtccagctggggcagaggttacttggacagagtttcgtcatagtttcaataaagcacaggttcccgagggaattgtggcacaaaagaagagagagttccgttccctgcaacaaggaaccagaacagttatagagtatttgcgtgagttcaacctcctcgcgcgctacgcccctgaggacgtgcgtaccgatgccgagaggcaggagaagtttctgtctggtcttgatgatgaattgactaaccagttgatctctagagattatgaggactttgagaagctggtggataaggctatccgtcaggaggagcactgtaacaaaataaaccgtaagaggaaggcagctcagttcaggactccccaggggaagagtcagaagcctcgtttcacgatgggacatcacggtggaccttccaccatgattatccggcagcaccgtccctaccacccgggtagattcaacaagaaccaccatagtgacagtcacaacaatagtgagcagcacagcctcaaccctactccgagttcactaaagattccagcccaatcagttcagccagctctgccagaacaacccaagaggttgggagaaaaacccgaactctgcttcaattgtaacaaacccggacacacggttggaaagtgcccgaagccaagacgtgccggacccaagttcgttcaggcccgtgttaatcatgcatctgcagaggaggcgcagtcagcaccagaggttatattgggcacattccccgtcaactcgacaccggcagtaatattgtttgattctggtgcaacccattccttcatttccaagcgttttgctggtgcacatgggttatctttagtgaagcttaagataccaatgcgagtgcatactcctggaggtggcatgaccacaactcactactgcccatctgtgacagttgaaattcaagggttgatttttccagccaacctcattcttctcgaatccaaggacctagatgtcatacttggaatggattggttggcaaggcacagaggagtgattgattgcgccagccgcaccatcaagttgaccaatgcaaaaggagaggtggtaatcttccagtctccagtgccgcagaagccagggattagtttaaaccaggctgctggtgaagaacaagaggtagcagtggagaaaaccactaagaagctggaggatattcccatggtcagagagtatccagaggtttttccggatgatctgacaacaatgccaccaaaaagggatatcgagttccggattgacttggtacctggaactgcaccgatccacaagaggccttacagaatgggagccaacgagttggcggaagtcaagaagcaagttgatgaacagttacagaagggatacatccgcccgagcacgtcgccttggggtgctccggttatctttgtggaaaagaaagacaaaaccaagaggatgtgcgtggactaccgcgcactcaatgaggtcactattaagaacaagtaccctttgccaaggattgatgatctgttcgatcagctgaaaggagctactgtgttctctaagatagaccttcggtcaggctatcaccagttgaggatccgcgaagaggatattccaaagacagcattcatcactcggtacgggttgttcgaatgcacagttatgtctttcggactcactaacgcacctgccttcttcatgaatttgatgaacaaggtgtttatggaatttctagacaagtttgtcgtggttttcatcgatgacatacttatctactccaagtccgaggaagaacatgagcagcatcttcggctggtacttgaaaagttaaaagagcaccagctatatgccaagttcagcaagtgcgacttctggcttaaggaagttcagtttctcggtcacatcgtgaatgctcaaggagtagctgtggatccagcaaatgtggagtcagttaccaaatggaccccaccaaggacagtcactcaggttcggagtttcttaggacttgcgggttattaccgccggttcattgagaacttctctaaaattgctaagccaatgacacagctattgaagaaggaagaaaagtttatctggtctgctgaatgcaataggagttttgaagaactcaaacgacggttggtgtctgcaccagtcttaatcctgcctgatcagacgaaagatttccaggtctattgtgatgcatctcgccaggggctaggatgtgtgttgatgcaggatggcaaagtggtttcttatgcttcacggcagttgcgtcctcatgaaggcaactacccgacgcatgatctggaattggccgcagtcgttcatgctttaaagatctggcggcactatctcatcggtaaccgttgtgaggtatatacagatcacaaaagtctaaagtacatcttcacccaacctgatctgaatctccgacaacgacgatggttggagctaatcaaagattatgatatgggaatacactatcatcccggcaaggctaatgtggtagcagatgccttgagcaggaagagttactgcaacgtcgcatgggtagaggaactatgctgtgaggttcaacatgatttggaacgtttgaaccttggtatagttgagcacggattcgtggctgccctagaggcacagcccacactggtggagcaggttcgcatagctcaagcaagtgatcctgaaatagcagagctcaaaaagaacatgagggtcggaaaagcccgaggttttgttgaggatgaacaaggaacaatctggatgggagaaagattgtgtgtacccgaaaacaaggaattaaaagacctgatactaaccgaggctcatcaaactcaatattccattcatcccggtagtactaagatgtaccaagaccttaaagaaaagttctggtgggtcagcatgagaagggaaatagctgagttcgtagcactctgtgacgtctgtcaacgagtaaaggcagaacaccaaaggccagcaggtttgctacagccacttcagattccagaatggaagtgggaagaaatcggaatggatttcatcaccggtttgcccagaacgtcatcggggcatgattctatttgggtagtcgttgaccgactcaccaaagtggctcacttcattccggtgcacactacctactcagggaagaaattagcagaactctatctggcaagaattatgtgtttacatggtgtacctaagaagatcgtgtctgatcgaggaagccaattcacttcaaagttctggcagaaattacaagaagaattgggaacccggttgaatttcagcaccgcttaccatccacaaacagatggccagaccgagcgagtcaatcaaatactagaggatatgttgagagcctgtgcgcttgactttggtggagcatgggacaaaagcttgccgtatgctgagttttcttacaacaacagttaccaagctagtctacagatggcaccgtttgaagcactgtatggacggaggtgtcatactccgctcttctgggatcagacaggggaacgccagttgtttggtatagaagttttaaatgaggcagaagagaaagtcagagctgttagggaaagattgagaatcgcgcaatctcggcagaaaagctatgcagacaaccgccgaagggagctcgttttccaagtaggggattatgtgtatctccgtgtcactccgctcaggggagtacaccgcttccaaaccaaaggaaagttggcaccacgctttgtgggaccatatcggattttggaacgcaggggtgaagttgcttaccagcttgagcttccctccaacatgcttggcatccataatgtgttccacgtctcccagttgaagaaatgtttgagagttcctgaggaacaggcaagtccggatcaaatcgaaatccaggaagacttgacgtatgtggagaagccaactcgtatcctcgaaaccagcgagagaaagaccagaaacaaagtaataagattctgcaaggttcagtggagccaccactcagaggaagaggccacttgggaaagagaagatgagttgaaggccacccacccgcacctcttcgccagcccttccgaatctcggggtcgagattccgtttaaggggggtaggtttgtcacgccctgaagttttcccccctttgcttgctttaaaaattggctaaataaatcgtccgaagaaattatcttaattaacctagagctaattccctaattaataaatgcacttaataatcggaaatagcgtggtggaatttttcttgagttccccatgctccaatgcattaacaagatttttagtggaattttcagagccttggaaataattttaaccaattaaaaatgagcaagcgcaatattttaatcccaggaaaatcctttttctctttttcttttcttttccctcctttttctttgttgggccgtcggcccatccctctcccgcggcccctcctccttgtgggccggcccaagccgcccctccctcctctctcgggacgccgacaggtgggccccacctgtcggtcgtctcccacctccggccgctggagccgaagctccaaccgctgccgccgaaaccgccgcgccgccgtcttcttcgttcctcccgcgtccacgtcgcgcctccactccgcgcccgcacctcgcgcccacgtcgccgccctctccccgcatctcccgcgcgcgcgcgcccgcaagtggtgggggatttgaaatccccaacgccctctctctctctcctccacctctccacgttgccggccaaataggggccatccccggccgtttccgcccctccctcgcccataaaaaccctcccctgagtcccctccctcgtttcccccatttgccgtcctctcccacgccccctaccgcgcccacgccgtcacacccgagctccgccgcttgccgccgccttcggccgcgagccgccgccgctagagtcgccgccgcgccaaaccgccgccgccgttagcttcgccgccgcaagagctttcccggccgccgcctcgcgtcgccggaatcccaccggagcacctctcccctcgtgagccggtgagtttttccctcccctccatctccggccggcaattcaagccgccgtggtcgtcgtctcctctcctaacgcctctccatcttctcctagggtgtcgccgccgcccgtccgtgcctccgcatcaccggtcgccgccgccgctttcttccttcgcgccggccgccgtgctcgaaggtgaggaatcccctctcctccttcctttcctctctctcccatgagcgccgccgccctccgcgcgtgcgccatcgtcttcggccgccgccgccgccttcgcgccggtcgccgccgtctcccgcgccgccggtcaccgccggtgaccacgcgtgccgccgccgccgccccatggctggccggccggcttgagccgtgccgagctgccagccacccactccctcccccttgagccactgcccagtgggcccgcttgccagcggccccctctccctctcttagtgccgctgaccagtggggcccgcctgtcggcgcccgccccccttccgctgacgtcagccctgggctttattgcgcaataaattgattaaggacttttctttattagtaaaaacacagtttatcttctaaaattcataagtaattcatccgagctccgtttaagtccattcaagtctcagtaaatcaagaaaaatgcaaagaatccattaaaaatagttttgtttcctgcttcagtagtcttatagcctgttttgcttgtgtgctttgtttgtcgcgtagatttcggccgtttcgtcgatccgcagttcctcgaagacgttgctgaggtctcatcagttcgagagcaaggcaagtcatgcaatacgtttgatcatattgtacccaatttacaaatatcccgcatttctattaaatgttgcattcttttacaatatcatgtgggatgggtccgactactcagccatttattgtttaccatatgccattgataacctgggtatcaaaatgactagatgttggtttaggaaatgcttagccatgcttagttcaactagcacacaaatggggatcaccttattacatagactttgtctattggcatagctttagattggtgccaccgcaatggtgttagttaattaaaatacattgaatggtgggttgtgagtgcatggttttgctggtcgcacccatggcaattaaggaccggttcacgggaaaccctgggagacttaccgtgcttaccacaagcgggagtgggtaactgcttgatctgaagtatagctcgaccctttcctaggcaccggtggcgagggtgggcgtgatggagttgggtcggccggggtgtccggttgtccagctgccggattcaccgcggcgcaagaggggaccgcccactgccttttgaggggtgggggtgaaaccttagcgtggtgtggatggttaggggagggttatgtggagggtcttgtcacgatttccccctttgcagtatcatggtgatgcttcggggcatggcgacatgtgtggaatcgtgtcttgtgggtacagttgtacacctctggccagagtaaaactattcgaatagccgtgcccgcggttatgggcgatccaccagattcaccgtgattagtctcacccctagtttagcttaatgaactggtgtagttcaggtggttggttgggcctgttgcaacatggtgtagcgttggacagtgattggttaatattgattaattactacaactgttttactgctttcaactactgcttttaaatgctagctttatgcaaaagaacctctagcctcctgtggttatatcctgcatcatacctcctcttccggtatgacttgctgagtacagtgggtagtactcagtcttgctctcttttcccccacaccagagttgaagttcttctcagttggagccgtctcagagaggttggtttcgttgctgccgtcaaggtttgcctgtggagtggagtcgcccgctgctgaagtcaagcttcccggtttagctcgcttttatcttttccgctgcatttgtaatcttttctatttttgtaaggcgtggatctgtatgtcaacaattgtcgtttgtgtaccctggctggtcctggacagggatttaatgcacattcagcttagaaattctggctcgagaatttctgggcgtgacacgtcgcgcccgctccgccccggccgccacgcacgctgcccaccgccggcctccctcaccgaagaagagcagagagaagtgagaagaaaagaagaggagaagaaaagaggagaggacggctgacatgtgggccccacatattttttaaatttttctttgctgactaggatgccacatcagcgaaaccacccatatatgtgttaacaaccaaatttggtaatatcggcatcgggaaagaagattagatcgaagcaaagtcggaggcggagatcgggttcggaaacagagcaggaatcggctagagtccagatcagctacgattaggatcggctgggtctgagtcggactaggtaagctgatgcagccgattccggcaatgcgacttgatgtatgatatcgggttgagttgaggcacttcaaggtgattgccgcacatggatagagtcctgagaaggcaattgtatctattaattaggatgttttatgtaatttctttagagatacgcttgggcaaaagtctaccgtaaagacttatggtatcttagagtttgttagagatattagtcgtgtccgttatggacatatattgtaattctcgggtataaatagacccgagccctatgtaacttttaacacacacgttcaatacaatttcggcacatcgccactctttttgctttagttttgtttcgacgagttcttactttcgggttgagctgcatcggtttcaatcttcaacaagaggtaaaacttattatgacggcttgtattctcgggattagggcttccatctttatgacactctaatcttgtttatgtaattcgttgagttatcacatatcttacataatctctggcaatattgttatctaacctacaatcggctaacatttgttagtagagggcagccgattaggttagatttcgacgttagtttagattatataagatatctaccactctatgaaacttctagtggcttgattgtctagatattgttcttcttttcatacttaatgctgcataagtttagtttgatctattaagtcgtgcttagaatattaatctctagcctgccttttggttgccgattaaggtagcatcggagtttcagccgatcttatctgatttaactatatttgctccatatgcttcattgacatgttaaatccgccctttatgtcaagatattgctgtatctaagtatattaagcctttgtttgatacattattcctgttttaatatcctgatatagagtagcatcggagtattagccgatacatgccagatctatctgattggctatgctataaacatatataatcatgttattaatatatatttcgatctaagtgatttatactgtctcggcatggcgaccgatctatcccaatcacttgatttaagtatatatcgatttaaggagtatatgttgttaatatctacagccgatcgagtagatttagttccttcttatttattcatgaatgacgatcgattcacatatgacatcggcccaaagataaatgatatgtcatcggcacctagccgatcgattatcatttatagatttaaccacggtttctttactcctatttcttgttgattacatgatcaaatcgactggcacgctcatacattcgaatgcgagctttggacctgcaccggagttaagcagatctcccaggcctcgtgttttctgtcaacaatatgctgccatgggacctcttttgaacggtttgagtgagtttaggggtacacattaatttctggttttgtggttaaaggacctcagaaaatctcgctgtcaagttgagagacctccggtgaacttattcctaacccaaacgatatagccaattatccaagatcaagggcccaattactcgtaactggacttaatggcccaggccgggctgcaaatgcaaagcctaatagtggtgaaacaaggagaggagagcgttttgggttcaggcccgcgaagcagcaggtatctgccgtgagcatatggcagcggagggatcagagcttggctccccaccggcggcggcggcgccgcctcccaagcgtcggaagatcgagccgtcgcggaggtaccgattctatcttgttcacggcttcttgcgagccttttataattaggtttgatctggtgattcctgcttcgaaccatccccatccaattaggtggatatattacattattacgcctgatttctagcgattgcgctgcgccatctttctagtttcgagcagattggaaagggaggtgtggatgttggttagcggggtggggcgatccagtggtgggggatgactacaagtgtagggttcttttaggcaagattccggactaggtgatcttgtgagcatctctatacgttaggttttggtgttcttataaaggggctttggaatgtggcgttgtgcgtttatctatatttcggcaaaagcctcgatattcccacggaaccttgttgattgaggcgaatctctcgaggccttttgcatttctgccctagacagataat

SEQ ID NO: 1105 - DNA, 2170 bp, Oryza sativa
ggaatttgacaacccagagaggcctgaatgcaacaatcttctctcgatctaccagattattacagggaaaactaaagaggtggccaatctttacatgcatgctttgcaaacctaaccaaccagagcgtgaagcagggtcacctgcacatgatggtttctttcgtgtccagtccagcgtcatgttttcttgttgacgatgacaagataattttcctagttcactatccaagaagttgatcgtttcaataattttattttgacaggaagttatcagagaatgcgaaaatatgaactgggggtcgttcaaaacaactcttacagatgcattgattgatcatctgcaacctatccaggtattccaatcccaggaaacgttctgatagcacagctcattgcttaccataattattgtacttgataccgtggtctgctaatcatttttttctgggtcgagtaatcaatttcgtttctacatctccctcttttcacccgtctaggtccgctacgaggagataatgtctgatcctggttatttggatggtgttctcttagaaggatcaggaaaagctgctgagatagcagacatcaccctcaacaacgtataccaagccatgggtttcttgcgcagatagcatgcgcttcaaccatccggaacatttcaaagattttttacgaggtcaaaaagttttgttcggtctgtgttactttgttccccttaccattggccttaagattgtttttatgcacatattggccttactagatttacaagagctccattctccaaattttataggaatatcaatcgttttgcttgatgttacgtagtagcctctttgtttctggctctacaaaaacctgtatggtccattaaatttctcatcttaatgacactgatttctttgaagttttgagttcaatgttggctccatgactgaatggtatttggacgtaaaaagtaacatgtttacgtggactgttttgacattttgcacccattgaagtgtagctaacaaaaggtgaaagcacataacacaaactaaaatgtcgaaattttgttttatctttgtttactgttcctatttgatacagtttactttccactctgtagctatcaaaggtacatgtaccctttattccctcgagtcctattttgatacagtttactttccaaagctttgctcttcacccttcgctctttggatttaaaacccacaaattcctctatttttcttccttttttttgttccaaataagtgacatgaacatttcatttatcgcagtcaacgattaccagtcccccgagtagaaagcatagttccatttccaccgcttccccaacagttgtttatgttaaccctccacttaggactagcgaggcctggttgatgaccctagcaatcctgtaaatctcatgctgcacagatcgccaggattcggacgtattcgtcctctctgccatctgaatggcatcatcaacacctggatacacctgcgctccgtaatcatcatgcagtgatggtgcataaatctgcgttgttttgttccccataagtaaagcactcagcagttttttaaaaaaaaataaagaaaaggaaaaaactacagcagttcatcaaccaacaatattggcacaaaaaacttaccaggtgtttgtaccatggcctcccagatagtccttctcgatcggtgaatgctcgctccgtcatcatcaaccgctcattgagatctctgaccttcaggggattgtttctccaggggttccaaactttccttgtctgtaaggcctaataggaaagggaaacaggaagcttaaagttttttccttttgagcggagagcttaaagttgaaactatggatcaggcaacagcatgcaacaaacataagaaaagacaccttcatttcagaatccatttgtagagctgcccttttgaactcggcgattgacttttgcaggggagatgagctgacaggcactcccagcaatctcttatttatatcgattgcacccttctgcgaattgagagcaaccattatgacactagatttggacttctcataatgcatagaagttgcatggttttgaaaaagaaaatcattaaatttgtttgagaacagaacgataagttacctcaagctctacagcataagtgctgtagttgaagggta

SEQ ID NO: 1106 - DNA, 8157 bp, Oryza sativa
  unsure (1)..(8157): unsure at all n locations
tcaaaaattagcgcgaagcttctattgataacatgtaaagaaaatactccctccgtcctattttaagtgcaactataagttttcgcattcaacttttatcatccgtcttatttgaaaatttttacaattagtatttttgttgttatgagatgatgaaatatgaatagtactttacttgggacttatgtttttaatttttttcaaaagattttcaaataagacagtcggttaaagttgggcgtggaaaatcgtggctgcacttaaaatgggacggagggagtaataataactagtatggtgacccgcacagattacgtgggtagcattcttttttctcgtataatggcgccggcatatatatttccatattttattattaaaatatattaaaatagcaacataacttttaaattatgcactaactggaccaaactaactaatgtgtactctcttcgtcccaaaaagaaacaacctagtagaggatgtaacccctcttgtccacatacattgtcctaggaggggtcacattccctcctaggttaattctttttggacggaaggagtaatatttatattgtactatatatgtgtgatagttattaattattttttaactccaatcttcttttaaacatctaaaaaagtattaatagtggcggagttgacggtgccatcaagcccgggtgactaataatgtctttcggtgatcgattataggtgccaattgctaacgagagtgaagatggcggagcctgggcggtcgcccaacctggccatgaagtggctccgccaccgagtattaagcttcttcccaaatgaaaaataagtgtgcaagtattacactttgaattggaggaaaaacataggaattttagaggattttaatcctataggaaaatttcctatgaagccctttgaaataaaggattgaatcctatcaaatccttaaaattcctatggaatggacaatcctatagagattttggaggaaatttagcaagagcttcaacctcttggtaaatttcctttgagtctatctctctcatccaattcctgtgtttttcttgcggttcaatcaaacggccattcctgtgttttttctgcgttttgcaatcctctattttacacttacatttctatcaaaatcctacgtttttcctattcctacgttttctcaatcctgccaatcaaaggggtgaaagaactaagggcccctttgaatcacaggaatgaaaaaacagaagaataggaaaaacataggattctgacagaaatgtaagtgtaaaacagaggattgtaaaacacaggaaaaatataggaaggaccgtttgattggaccacaggaaaaacacaggaatttgagagataaagactcaaacgatttattccatgaggttctacctcttgttaaaattcctccaaaacttgtatgggaagaggcattacataggaatttcataggattccatagggttcattcctttgattcaaagggctttgtaggaaaaattcctatagggatgaaatcctctaagggcccctttgaatcgcaggaatgagaaaacataggaataggaaaaacataggattttgataggaatgtaagtgtaaaacagagaattgcaaaacataggaaaaacagaggaatggtcgtttgattggaccgcagaaaaaacataggaattagaggagagataaagactcaaagaaagtttccaagacattttacctcttgttagaattcctctaaaccttgtatggtattaggcaatccataggattttcataggattccataagatccattcattcgattcaaagggctatataggaaaaattcctataggaatgaaatcctctaggcccctttgatttggaggaaaatcataggaattttgaaggatttaaatcctataggaaaatttcctatgaagccctttgaaacaaaggattgaatccaatccaatcctttgaaattcctatggaatggacaatcctatagagattttggaggaaatttagcaagagcttcaacctcttggaacttttctttgagtctatctctctcatccaattcctgcatttttcctgcggttcaatcaaacgttcattcctatgtttttcctgcgttttgcaatcctttgtattcctatcaaaatcctgtgtttttcctattcctacgttttctcaatactgcgattcaaagggggcctaaaatttctatgaatttcctttgaatcaaatggggcctaaaattcctataaatttcctttgaatcaaatggggcctaaaagagggaggagaaattaaatcctgaacgttccttcccagatggatggttggatcagtggctactgccaatccgttgggtacacggctactacacatcagtcttccgtaatcagtcggggtatctaatcaagaggatagagttgcgtggctactccacaagcctacaacgacagtggaaatgtagtagtgctacctcgtttgatccaccagcaccaatgtgggcattctcgatcggttccatgtgggctgttgcctccggacttccatcgatagattgggtaggataacgacctcacctcactatcgtttgtactgtcatttgatccatttattccgataaaatttagtttccgatcaaggtttcccgagattggtctactgttgtcaggacatatcgacgcattgtgccactggccaaccagggggagcctttgattgcacgaaatcttatgagtaactcagcccactgtctcccgaaaatattacaggctgttccaactttcaaccctgatggcgcaaaaatatcagtaaactgcacgtaaaatattcaggtacaaaattgcaaacgtagttgaagattaccaagtgcctgcgtcttttttactactgctgtcagtactgtcagtaacggattaacatccttcaactacaaattagagtgtgtttagttggggaaaaagaatttttgggtgtcacatcgaacgtttgaccggatgtcggaagggattttcggacacgaatgaaaaaactaatttcagaactcgtctggaaaccgtgagacgaatcttttgagactaattaagccgtcattagtacatgtgggttactgtagcacttatggctaatcacggactaattaggcttaaaagatttgtctcgcgatttcccccgtaactgtgcaattagtttttctttttatctatatttaatgtttcatgtatgtgtccaaagattcgacgtgatgtttttggaaaaaaaatttggggaactaaacatgcccttaatggtttgtgttgacttgcctccttgcctgttgtcataccagtatgaagtactactccatatgctagttctaactgccgtatgttacgaatagcatggaatcagtataactgctatactactttcatgttgaaaagtttgtgtagtaagtacaactgtgcaagtacgctgacgactattcggtgttaaatatgccaatccagactccactgtactcctccaatcggcgttcattccaaatggagcagacggtacttaataatgtataatgtttgctaaaattagaacaaacatttctctgggccggtcagagacataaggctttttttaacggttgatgatattaaagaagttataaaaattacaaccctgatgttgcaataaatagaaatacaagatttgccattaaataaaaaaattccacatctgggaatactaaataaatgcgagcaaacgatctaccaagctgacgaactcttgtacgcgaaaaataaaggaaggagtgtcagccaccatttaatcatattggcatgttcctttagcaaataagcaaaccgatgcaaccaaataagtcaggcgacccgaactctaaagacaacgctccgatcactattggggagggtctctttcccgctcagtaaccccttatagttttaggttacaaaccaggacacctatctttagtttcagttaaaataatcaggagtaaaaaaaaatctttaatccagatcagtaacattaaagatggtagcgccatctttactccagttaggctttttttctttttttatccttgttttttttgttgcttgcatttattgtcaccctcaaatcccaacaaatcatccacaatttacaagtccatccacaaaatcatccataatccacaagtcattcacaaaatcatctccaagtctgaaataaactacaacaaaatttacaaattgtttcaaaaatgaaaaaaaaatcacaaaacacaggcggcccgccgtgtgccgnctnccgccacccggcctcccatcccgtcagatctggcggaggggaggccacccggccatgcgccgcctcccatcccaccgccactgccactttagcggtccagccgccgcccggccaccgctagaggagaggccgccgcacgcctgccgcctcgtgcgccgccgcggtggcttccgccgggctgccgcccactgtcgctgttgtcggaggagggagtagggcgaggagagaggggaaggggaggaaggggaggaggtgaaggagagaaaatgataggggaggagatggagaggatgagagggaaggagaggatgagaggggaggaggaggggataaggacgaggcacagctagcgcgcgcagctcggggcagggattttcacaattttttttattttagtcccgagcggtataaataactggactaaagatggatctttagttccagttggtaacaccaaccaggattaaagataaaaaaaaatatccgtcggttttcaaaccatgactaaaaatatttttaatcccggttcttacttaaaccgggactaatgtgatttttgcatgattcagtaaagatcatttttccagtagtggattgatttgtcgaggatcttgccaaagaaataaccacaaagatatatgaagaggaaaaactctaaaaaaccttaattaactccaaataaatcacagacacaaggctgtttaatttgccgtgctcttgtctttgaaagttttctctgagcttggacttcgtcattttttttcagacatcttatacaaaagcaattcattcttgcgttgtaaagaagatatccctttatatttagttttttactgatagattacctagtactacctccgtcccaagataagtgcagccatgaatttacgcgtccaactttaatcgtccgttttatttgaaatttttttataattaatttttttattgttataagatgataaaacataaataatactttactcgtgacttatgtttttattttttttcaactttttttaaataagacgaatgattaaagttgggcgcggaaaaccatggctgtacttattttgagagtagtacccagcgcttaggcctgttagtctccaaatttttttctcaagaacatcacatcgaatctttggacacatgtatagagcattaaatatatatttaaaaaactaattatacagttagaggggaatagcgggaggaatcttttgagactaattagtccatgattagccataagtgctacagtaacccacatgaattaatgacggataaactaggctcaaaagattcgtctcgtggtttccaggcaagtgatgaaattagttttttcattcgtgtccaaaaatccctttcaacatccgaccaaatattgtgacatccaaatattttctttccgcgaactaaatatgcccttacatatataggacaaatgccatgcccttttcgcaaaattacaacgaaatgataatgaaacgtagatatggtcatggtcaccgcctatgatatggtcatatcgcacggtagcactgacacgcatggccgaatctgcagctcgcacacttctttcaattattcttatctacgttcttaatatccgtgctagttaaaatatacctactccctccgcctaaaatatagctatttctagcagtgtcttgtcccaaaataaagctatttcttcacctacctcctctcaaccaatcacaaccattcttcttcacctactttcctttttcaaccaatcacacacttcctccaatcattctcacctactttcttaatacccgtgccaatctcaaaaatggatttattttgggacggaggaagtacattttaagatggatgaagtactgtatactcctaatactccctccgtccaaaaaaagacaaaacctggtttccgtgcccaacgtttggccgtccgtcttatttgaaaaaattataaaaaaaaattaaaaagacaagtcacacataaaatattaatcatgttttatcatataacaacaataaaaatatgaattataaaaaacttcatataagacggacaatcaaagttagacacagaaaagtagggtttgcttttttagacggagggagtactatgtagtaactggccagtgaccactggtacatagtacgtacccagctacagttcatcggacgctggcaagcacgagcgacaagacggccgctgtagaatctacagtacacacttgacaggccagtcgtagtcggtcgcagcaccgccgtgcggttgtgtccgagtccgaacggagaaaccacatgtgcacttgggactggagcacgtctgcacttgcctgctggcatcgtggagcgccgagcgcaacggaaccatcaaccatcacagccgaatgccctgtagctccttcaaaaaaatttcgtctcttggaagctactgtaactctgaaaggcttatagttcagactcccaggccgtctttagttccatgcctattttttttacatatacggatacacatttaaagtattaaaagtagtctaataataaaataaattacataatctacctataaactgcgaggcgaatttagcctaattaatctatcattagtaaatatttactgtaataccatattgtcaaatcatggtgtaattaggctcataatattcgtctcgtaattcacatgcaaactataaaattggtttttttccacatttaatgttccatgtatgtgtctaaatatttgatgtgacagaatgtttgaaagtttgaataaaactaaacacagcctcagtcactcagaacatatactacagttttggtaaaaaaaatgtatactacaattagtccgtccactgtagaccaaacgtactccgtatcatttatccatcagtgacgagctcacaacagaagttatcaatcgtcctgtatgtacatatatcgtacaattcggatcctctaacacatataatactataattttcaactaataatatagttaatactccctccattttaaaatataagacacaaccatcttaacccaaagaccaaaaaaatagttattactcatctcgtactttggatcatcctaataaatataatgcatgcatccaatagagttagagaatgtgagagtaaatgattttaaaaaatagtaatgtaatggagaatatgtcatatttaatgacatgcatgcatgcatgtcttatattatgaaacatatgaaaaaaagtagttgtgtcttatattatggaatggagaaagtacccgctaaaacaagtaaagattaaagattaagattcagtggggagttccgccttcacatccacacttgcactcgatgtatatgctcgcaagaaacttctttctccatttcatattataagactttttagcattgtatatatatatatatatatatatatatatatatatatatatatatatatatatatataaataaatctagacatatatgtgtgcttagatttattaacatctatagaaatatgggcaatgcaagaatgttttataacctgaaaccatatatatgttaataaatctagacatatatgtgtgcttagatttattaatatctatagaaatatgggcaatgctagaaagttttataacctaaaaccatatatatgttaatgaatctagacatatatgtgtgcttagatttattaacatctatagaaatataagcgatgccagcggtgtgcattccctatctcaccgaggtaagtcgtcgaatgggattcgttgtgcagtttatgtatggagcctatttggagctacatttggtgttatagtgtggactactccctccgtttcaaaatgtttgacaccgttgacctt

SEQ ID NO: 1107 - DNA, 3342 bp, Oryza sativa
ccaccgtctcgtcctggagcacctccacatatgtatctgtcttgttgtgtggcaacggtggcgcgggcgtccagcggccgtcttgtcgtgggcgaacggcggcgcggtaccccggcgtggcgccgcgggcgtccagcggcttcggacacgcttggctgggcaccagccgggagctcggaagtgaggaggacgcggatgatgtggatagaggggaatcgagggagaagagagagtgaaagggcaagagggacattgttccttcccggacccacatgtcagagctgccaaacagttaaatccaaacagaatagcgacggaatggggtggaggacgcgataaagttcgacgatggcacagagaaagactcgaactttttagtggcaccgaggcagacaccatctttcttaatagcatatagaaaaaaaacctctgtgccttgtggggtgcagccttgcaggtaaaataccgttccagcgtgcacggcacaagatggccagacactgggtacataccaggtaaattctcgtacacgcatgtggcccttggcacccttcggcagtcagctagagcgctctccgatgataaacttttaacgcacgtagccagttgagttgaatgctcaactgctcatgttggcgtcggcatgcaccaccacccacggcggcctgcattaacgcatgttgcacgcgctccactccaattcttcgctacacggtgtgagccccccaacatgccacaccactgtagaagtgtagagtggactgtagagatctcccaccgtcgccgctccagcacagagatcctgcacatgcggacagaagcggaagcggcaccagtggcagtggcagtaatgggactgaaaggcgcaatgaaaccgatcggccgttacgcatatggtgatatatactgatacggatggccgacccctaccgagccctcccatccgttccgatccgcgccacaaaagcagtcaaacgcaggtgccgacgtgccttacgtaggccgtaggcgacgcgagccatgggtgttgccgtgttgggtgccatgcccatgccctgccctgcgccgctcgccgacgcgtgtgcttggcgtctgcagggaagcgaagcgacggccggaggacgggctgtttctgagccgggcctctgctacctgccgcgtggcatgcagttgcgcagcgcagtacgggttggcgggcgaggtgggcctgttattggcatgttgagagcaagtataataccaactgaaacaccgacgataggactgccacgttggataggatgacgagctggcactgagaaggaatgagagagaaggtaagttggcgattacagtgtcaccggactgcacacacaattcaagaaaaaatgatccttagtgcagcacgttgagagtagacatggttgagaaagaaagaatataatagtatttatatgaaaaatttatagactacttactgtaagtgttggcttttagatcgacggtaaccaaggaaataaatttgagccaccgatgggcgctactattaaacctgctctgatgaatgcacgcgggcctactactccactactcctgatgtgctctcgtaatcgttcgtacgctggttgagtgggcgcttcttctgcagttctgcgtcaggaagtactcccgtacgtgcaccacacgctagcagctggagtgtgcagttgtgcactgcgcctatacgggatggaaacctggagagggcggggccacatatacttctgcctgcagtatcagttctgctggtgttggttacacagtggcacgtacgttcgcgatcgtacgttagccgtgggtgttggttacaccgtgacaccgtcgctcagtggtgttgcaaatgtacagtgaactagtgatacagtggccatcagtgtgtccgtgcgtgcagtactaatgtgacggccttaattagattcgcggtgtgggcaaaatgaactggaaccgatcgaaagaccgaactaaccaagtgtgtaaaaactggttaggagttcgctcttcagttgtaactagtcgaatttaatatggtcatttgagggtgtgtttgcgaaggaggggattgaggagatttgaaagatacgtaaaacgaggtgagccattagcacatgattaattgagtattaattattttaaacttcaaaaatagattaatatgattttttaaagcaactttcctatagattttttttttaaaaaaacacaccgtttagtagttcgggaagtgtgcgcgcggaaaacaaaaatatctttctctctttctcctgcactcgaacgcagccgagtccctgcctcagtcaaacgaaaaaagaaacaaaattgatggcacaacccaacagcagcaagtacatgcatagcccagcaatattaccagattatgaggcacaactctaagggtgtatttggttcacggttaagattggatgggatatggcggtccatattttgttggatatggcgatccagttttttgtttggtggagtgaatatggcgatccaaatttttatttggttgtagggatgaaggtgaatttggtgatctttttttgttagggggagtaggatggatgagtggatgcaatcacccctacaataaaggtggtgagtatacccctttaaattcatcaaaaacacaaaaatataaatcactacaaacaaaaaaaatctcaagggaaatatcagaaattacaaataaatagaacagaaacagaaggggaaaggaaaaaaaagaaaaaaaagaaaaaaaaaaatcatccgcgctcttcttgccggccaccacctctggattctccccctcgcacgccggccgccgcctccggtctcgcctcctcgctcgcacgccggccgccgcctccggtcgccgccccatctcctcgctcgctcgctcgctcgccggttgacggcgatgacgacggaacccgctagatccggtcgccgtcgcctcttcccgctgccgccgccgtcgcctcttcccgccgcgtgtcgcgctcccttctcgcactggccgccgtgctcgtcgccgttgtcgcgtggtggggggtgacgagaccctgctcgcctcgctcgccctgcactcgagcggctgcccggatccctccatccggcatatcagtggaatattccctgttgggccgcccgatcctatccctatccatcaaccaaacacccacaaaaaatgggcgccatctcctatccacccaaatccctccatccaaacacaccctaagcctacaccctcggttcacttccttagcacaacttaaaaagtggatttgtttgattttttaagaaactataacatatattttttaaaaaagattgtgttta

SEQ ID NO: 1108 - DNA, 980 bp, Oryza sativa
ccatacccaccaccttgaccgccgccgccaccaccaccatgtccacctccaccaccactagcaccacctgcacctgatccatatccagagccataaccctcacctgagccatacccagatcctgcaccaccacctccgccaccttcaccgcttccataaccaccagctccaaaagcaccagagccatatcctgatccagaaccttgtccagaaccatacccggagccagaaccaccaccttcaccaccgccgccgcctccaccaccaccatggccatacccaccagcgccagcaccacctccctcgccataccccgatccagagccgtaccctgatccaccataaccacctcctccgccgctaccacctcctcctccaccaccgccaccttctcctccatgccataacccaagagagttctagcactagtggtcattcctatgctaaggaggacaaggattattagcaacacaaaatgcttggtggtagccatctttacttgcaagctctagctacttcagtgcaagtagtgcagctgtgtgatgagagtgaggagatggccattggtacttatagggcttgctctagtgctttttgcatggcttgatccaccagtagctcactgaatggtccagagctaaagaccacaacaatgcagcacgtagatagcacacaagagtttggacgcgtttggtgtgaaatgaggaccagtagtgtgttgtagtgctagtggttatcgcctttcttgacgttttagagggcggtgtgtgatgttacttgtgttgggtttggtttgctttatgctttctttcttttttttttcttgcttttctggaaccaaataattggtgtatgatcagtgtatctcagtggatgccatacactaccatacacacattcacacccagctagctagtcagctgatgatcattagtcactcgattcagttatagcttcacactggcaacatgattaactgg

SEQ ID NO: 1109 - DNA, 10254 bp, Oryza sativa
  unsure (1)..(10254): unsure at all n locations
agtcaaggctggtaagaactcccagccatacgttgtaaaggaagaaaggctggaaggtgcactgcaagctaattacatagtcgcaagttgtatttcaagatactgtgcctatctgcttgtctcagagccagatttgctacctgatacctacttaagttctgcggaggtatttgaaagcaccgtgaaagaggcttcagatgttctaaagggatctgacaacctgcagagcatatacagaaaactgatgtatcatggggatgttgtgaatgtcgataatatgaacagacgtcacccaagtgtgatactcgcgagaagtgcacaagttgctaagtccttggttgaaactgaagtcatggatcgttgggagatgttggctggggtgtgggccgaaatgttagtacatatagctccctcttggaatgcagcagctcacaagaaatgcctttcaaccggtggcgagttcgtaactcaaatctgggccattctttctcattgcaacatacaagaaagcaatctctggccacagcaggaatctccaaatgataatgaagcagagcagcaggaagaaagtgtaagtggcaatcaggcatctttttcagcacaacagcgggcagctgctggtcatggtggagtaagggatgatgaagctggaccgagtgggacaaagccaaatgatgaaacaaaagacgatgacgaaaagaagatgtcggttaatttgagttcaagaacaccaataaaacgtgacagtgtgagttagtataatattgttgaactcgagctttcttatgtcacatatatgttcctttcttaagaacatgtctgttcattctccatgtgtagtagtttatatggttgttgcttgcatgtactaaggtgtggtctcttgccgtactatgtactttaaacagctgcaaatatcgtgttactttttttcttatgagtgttgatcgatctccagttatttttctgcgagtagtcccagtaaatcgctctttgcaactcgtaccagtatttgcacaaggagattgaaatcagaagagcctacttgagttgcatgagcttttaggctttcatggaggttggagcagagagatgttgatgagctgatgacaaaagagaaacgctaccatgaacttacaagtagtagtagttccatggtagaaactagtactaggtggcaggcacggttcacgcgcacagttcgcatctttgggccgcgataaggctgcgccgcgcgttatcctgcgcgttatcgtgccacaaccttacaccgagttcccttatcctcaataccagaaatctttatccctaaacaatacaaaaccattcaatttaggtcccatagcagtatagatgtctgatttcgctgatgtggtatcctagtcagaaaaaaataaaaaatatatgtgaggcccacatgttagccgcccttttcttttcttcccaagtggcagcggcaggcagcacatggagggccgcaaagacatcgtcgacttcctccttgccatccagcttgtggggcccaccaagctgctcgagtccacgaccttcatctggttggactcacaggctgacaccaacaacggcggcggactttatcggtgcagcggcggcggctagcggccagcgacaatggcagcgggggtgacaccagcggcgagggtgagtaggacagccgagagcggcagcgcggggaggaggaggaagaggcggggggcaccatgtctttggcaagaggtcctcctccatcttcgatgtcccctccctcccccctcattcccaccactgccgccaccatcaccatccgcccaagaggtcctcacctcccttcaccgctgcaacgggtgaaggcggaggctcacctcccttcgtcaagcgtggcagaggcgctcccttcaccgccgccaggaggctcacctcccttcaatgcgatggcgggtggaggcggaggaggaggcatatgaggtgtgcagaggtggaggctgctcttcagatctcgggagtggcggcggcagctgaggagccccccgccggccgcttctcgcctcccctatctcgcgccggccatccctatccccatccccatccctatccaaaaagaaaagaaaaggaagaaaagtgcggctcacaagtaggacctacataattttttattttttattttgcttactagaatgtcatgtcagcgaaaccagatatccatactgttgtagcatccagattgcacggttttagtacagtttaggggttaagatttctggtattggggataagggatgtcaaaccaactcggtgtaaagttgagggacaacaggtgaacttattcttgcgcattttcggctatcacatgtgggccgtgtgtagctttgggctccgtatttagacgggagtttcactcgacgatgctccctggggcgcgagaatgctaaagcgnnnnnnnnnnnnnnnnnnnnnnnnnnnnnnnnatcccacaagctttttcgttttcggcacggaatttttattgttggattttgtgcaatggaaataagttcactttcagctcctcatttttgccactgagtctgaaatttgtccctcactgcatgtaacgcttcgcttttcgtgaggcgttaaaaactaattcggcaaaattctaatttcaaaaattttgttctttgagtgatagtctaagttgtgccaagatctcaattcaaatccatccttgatccctctcgtcaccatcaaaaattgcctcctcgaaattccccttccgactcaagtctccaaatcaaactccgaaattctatccctctctttgaatcatcgccaaatacttccccagatccaaagtatccaaaaccccatcttgaatcctccttcgactccttcctctcatccagatcccaattccaaagtctaagtcaaattccaagttcaaattctcttcgaatcaatctcctctgcaaaagtttattttgcctccctctgtttttgtgggccgaattcctttccctcgccccatccctcctctcagcccgtttcccctccccagcccatctctctcctctgccatctccctcccgtgtgctgcacgagccgtcgccgagagaaggatctctctctctctctctctctctcgttttctcgctccctctctattcctctctcacgccaacgcctcttcctgctatcgctgcccaaaacctccaccgccttcgcccaatcccgcgcgcgctcgcgaggtggccgaccggccgatcgcagccgcgtcagctctgacgccgctcggccccgctgcccccgcgcgcgtgcgtccaaagccgggagggcgcgcctctctcacgcgctctccctcctccctctgctcgcccaaatcggcaaggagcagggctcccttttcccctcccttttctgctttttcccctgaccaccaccgccatgccctgtcgccgcctggtcatttgcgcccgtgtaaacacgcgccttgtcagaactattcaagctatccaacaggacaaggagccagtcaggcccagtcatagcaaacttcctttccggcggtagcgcccagaactctctgatggcttctcgcaacgatctcgccactgtacattcaacagtcgcatggaaaccattttcctcctttacaccacagatagggcagatgcctactggttgtatccttcttttccgtttatacctataaagtttatacaagtaaggtcccaaaagcagtttggacgacggtttcggcagatgtggtgcttacgtggctggtttgaattggtcattgtcctacgtgacggtgttgtggcgttggaagcaaaatataaaaattatatatttttttaaaaaaagtggcgcacatatatcagtcagacaaaagattaaaaaatagtgagacctacgagtcactagatcccaccctcccctccatctccatggatggcagcgcctccttctcccctctctcctctcctcttgtcgccattggtccaaagggaggagaatggtcggaattggcgaagctcggcctgagcgtcctctggatcggcaagatgatgccgcgtactttgccgccatcctctaccctacctacccgtctcctccaaccaatccctctcctcgacccccacctcttctcccatctcccctccttgtcgatgtcgccacggccgtccccaactcgctgccaccaccaccttcatctggtcggcttcccatcaacgttgacgagactagctagctagtcgacggaggctgggatagccctggctggatgacaatccaagatggtgtgtttgttctccacctccggaacggcctccacggtttttgaggggatccacctcgatcccatcctcgatggagggcgaggcggcatcggacaatctcacactgctgccacctagactgctcgagagtgggtgtgcgacggaagtggaggttgaggacgacgtacagggtgcgggaaggctggttggggatggcacggtcggtgtggtcgaggaggatgacggctggtccgctccattggtcattgccattgagtcatctatctctctgctgcccacgctgcttgggagagaggagtcaaggcgacgcttgagctcggtgacgccgaccgtcgcccttcttctctccagtatatgttgtgccctcctcatcgctaccaccatctactgcgctcatctccgcagtgaagtctcctccctcaccgcctccacaaattgccaggggatccctcgtcctgcccctcctccccttgcgatgggggtgggtcaagtcgccgccgccatactctacttgtcggggatgagcgggtgttgcccatgttccacgaggtggagaggcatggttggtatggatttggttggtagccgaggctatgggaggcccccctcgccagtcttccggccgcctctctcccgaccccgctcaccggcctccccgccttgtccctctctgtgcgctctcaccgacggggagagaggagatagaggtagagagggtgaggtggaggaagtgggattcacatgtcagtgggtcgtactatttttaattttcttgtttgattgacatatgggccgcacatattttgttttaattttttttagttttcaattttgctcctttatttctttcggatcaaattgctacatgggacgaatacctagtcaaataagccacgtaggtgccacgccagccaaagatgcagacaatactaccgagggatctcatttgcacaggttttataagttggaggatgtatcgtatccggttttgcggtgtcacaccccaaactggtaccgccgtacaacggcacctgacaggagcgtgtcgtagggaaaacggcgtgaaccgcttcctacgaaaccgcgatctcggtaccagtcccaggacatagtgctggtacccacggtgacaaataggaatcatagcaatccttaaaataaatagaggacttatttaccttaacttaggttgcagctcagaacagcccgagaatgcaaccgacgacacgaacgaggaaacaccaacaacagcagcagcagcagcggaaccaacgaactaacacccaacaccacaggtgacggctgggaaccaggacgaaaccctaatcttcgcttcacttcatcttctcttcaagacggaggaactatatatatatttatatagagcaagggtgagtactttcgtactcagcaagccatgggaattaagtgtttaatgcaggcttcaaaggaaaggctgttgtttttgcaattgattttatttaaactcctttttggaacagctaagtgagtgcttctcaaatgacacggatgagacggtgcgtctcgtccagtcggagtatgtgcaatgtatcagtctttgaattgattcaaggttggcacccggccaacaactttcaaacggccactcgggcctagctgatcccatcagctgcagattttccaaacattgatcccattccacaacatcaatttcacaaagcagtagtcaaacaaaactacgctaggaatcacctcacatccgcccatgaccgtgggcacggctgttcgaacagtttaataacctctgcagagggggtacactttacccacacgacgttactagccttggtcacctagcccgtgtggatcagacacgtttggtgacttggggctttcacgacaaggcatttcgaaagccgacacaggttcaccatatgccaacgagaggggtcctagaccaacaccaggttaggtcccagaccatactgtgccaggaaacccgggggttctccccggcaccaccctgttgaatccacatgtctcttggcatcatggctccccagattagctaattactcagccaggggcgtcccattacacccatgtggtcgcacttgtcttatgttcggatgaaattccaaggaaaaaggtccttaagtgcaagagtgggaaaccgtactcccggtacgttccccggtccgcgattttggaaattcatttagttcgcaagcactgacccaggtgtcgggttttccaagtcttttataaaaccccaagttttacccatcgttggatatttaaattttaggggaggtgttccaatgcgcgtgcccgaaggctcgtgcatcgaagcacaacagtcgacaaaggaggtttgagtgttcaataattcaaggagggtaattgcagctattaggattagggccggcaggttatctcgcaagccgcgcccgatttacttgtgtaaatcctattgatgtaatatttgcgaaaaagaaatacttaaatttaaattataggtgcaagatgatcaaaggtgacttgccttgctcaagatcttcacgaagcttcacgaatctttgagaaaacccgcgatcgacgaaaatccggtaaccacgaccatacgcaaacaatcaaaaacctaaacaaggaccaaaagagaaatcctatttaggctaattaatagtgccattaaatagatctcaactttagagaattactggaagtggaacggagtcaatcggagttacggatcgggagatatgaattttggaagtttaagtggaatttctgggcgaaggaagatatttgtggaacaagggggaaattgatttattaaatcccttggaaaagaaaaggaaggagggatgtgatttagacttcctagggcggcttgggcgcggcccgagaggagaggcacggctcggccgaactaatgggccggccggcgcgaggaggcggcccattaggggcgcgcggaagagagggagcggtccggtggaccgggtgcacctcgcggggtcccgggtggagcccacatgtcggcggcaaggttcacggtggggagagcgcacgcgggtgcggtgctagggtttggtgggtgcggtgtgtgggcggtgtgccgggtggatcagatggcggcgggcccacatgcagctggttggcgcaccgtggaccgcgcgcgcgcaggtggggaagggaggcggcggctgactaggtacttgacccggtcgcggccgatgtggccccgacgtggcgccttcgtggcagccacgcgggctggcgagaggaggaagaaggagaccggccgagacggacggcggacggcggtggtttcaccgggggtacaaagcgacgattcgagagggagggagtacaccggaactatgggacggacgagaggaagtgagccactggctcggattcgccggagagaggccggcgacgacaaatcgcggcggcgcacgccggcggtgagaaaaggggaaaacggcggaggggcgacgaggattcaattcaaggaggagggagcatctctggggttcaaggagtccatttccggcgtcggataaggcagagcgacgccgtggagggctagcgacgacggcggcctccgggagcgggcggcaatggcggcaaggccatgccgctcggcggcggggcttggggcttcgtctacgcgtgttcgagaggctagccgagctaccacgcgagctggaggtggcgagagagagcgaggaaggggaacggaaggctatcgcgtcaggacgggcgctgggagatggccaacggcgcagggcgggctctccggcctcgggccagggaaggggaagaaggagggtgcccggagtcctcttcggctcctcgcgcgcacgccggcttcaccagcacgtgcggcggcgaagggaggcgaggtcggcagctgcaacgcggtaacaatggcgcggtagcggtggaagagagatgccgagagagaatgagatggggaggctcggcctgggctttatagatggaggagaggtggtttgggagggggaaccgacatagggcggtcaagggcgcaaggaccgcgtgtggagagcatggttcctcaggaacgatatgatcgatggaaaggggacagccacaattgcagagtctgtaagtttcctcgtcaactatgagaaggtacagttgccgatccgacaacaaagcgatgacatcaaaggaaaaggattaatgtatgatgaaccaatggagaaattagtgcaggtttagacaaccaatcaggttgataaatggcacgcccctcccgaaggttcagcaaaggtaaatgtggatgctggttttatagaagacacaggagtttcagctgctggaatcatcattacggactgcaggggtttagtgctgtttgctgcgcaaaaaactctgaaatcctgtgctactgctgtccaagctgaggcattggcatgtctagaaggattaagggcagccatggaatggattcatatgccaataatcttggaaactgacaacatagaggtgttcaaggctctgtcacaacaggagctgtcaagatcaccctgggcagcgacaataaaggaagcgagagggatgatgtagtgtctccaaagtgtgcaggtttgcaagatcaagagggaagcaaataggattgctcatgctctcaaatggctatgaggtctagatcgtgtgtggagtggtagttgtgtgctcccgcaggaatcttagacttgatagaccaagaatgtaatcctctcttccgtaatcaataaaattccctctttgaagtcaaaaaaaaagttgggcttaaattagaaatacataaaaaataggcttagcttcaaatacgcatgtaggttttctttaaaaagaagttgtatttttttggccaaagatgtgcttgatactgttatcatgggctcgatgactttgatgtttgaacggctgaagataaaggctggaattttcatggactccaaaaggcatgtgggatttgctgggatgcatgcgcgcaggccttttcttgtggttgtttcctgatcacacggaagaaaaaagagcaaggattccggtctctcctcaggcgcgagcgatcactcgggcatcaagggacaccctctctcccacttgatgctgctcaactcatgtgactgactgactggattaaaaaaaaaaaaactcaagtgactacagtttgctcaggaggaaaataaaaactcgtagcctatcaaggtagtggctactctccagttatgtattattgagaaacgcccatggtcttttggctaattccacgagggacgggctagatgacctgggtttcaaagtctcactccttctaattacttaatattagatccttttctaatattagcgtcttttttagttagataattattgacgttttgaacaacaacaaggtcttcaagcatatctttgactataattttctattacgatataatatacaatacaacattaaatattactccccctcctaaattataaggtttatagtgtttttacacagtctttaatgacatactttgaccattaatatattccatattatgttctcaacaaatgtgaaattagcattacataaaagttactttaaaatatttaatctagtgatataatatgcataatatttagcatatatataatttgtatgactattgatcaaaagttcccgagtttggtttttcttaaaagaggacgtcctaaattaatttaggatggagggagagtaattaacttttgttataataccttttaagaataatctattgttctagtggttttaaactaaatactttaaagttattgatagttaaagttgtaaaagtttaatcacaaccttgatcaaaacgtaaccggactagttttgaagaaacataaagcccatacataaaagtttggcgtttcccgtactcgaaatgcaagcgtgtaccactgccagtcgagagttcaggatcaatctgaacaggga

SEQ ID NO: 1110 - DNA, 635 bp, Oryza sativa
gtaagttagttgctagaatccatggctcctttgccgacgctgagtagattttaggtgacgggtggtgacaatgagtccgtgtcgagcgctgattttttcggcctttagagcgagatttatacaatagaatttggcatgagattggattgcttttagtcagcctcttatagcctaaagtctttgagtgactagatgacatatcatgtaagttgctgataggtttccagttttccgctcctaggtctgcatattgtacttttcctcttactcgacttaaccagtaccaacccagcttctcaacggatttataccatggcactttaaagccagcatcactgacaatgagcggtgtggtgttactcggtagaatgctcgcaaggtcggctagaaattggtcatgagctttctttgaacattgctctgaaagcgggaacgctttctcataaagagtaacagaacgaccgtgtagtgcgactgaagctcgcaataccataagccgtttttgctcacggatatcagaccagtcaacaagtacaatgggcatcgtattgcccgaacagataaagctagcatgccaacggtatacagcgagtcgctctttgtggaggtgacgattacctaacaatcggtcgatt

SEQ ID NO: 1111 - DNA, 587 bp, Oryza sativa
ccccagcgcttgcggcactgcatgggcccgcgctcgacgccgtgcggcgggcagtaggtcgacaccgccgcccacttgagcctcaccggctgcggcgaccgccgcccgcggtgctccatggcgcgcctcgcctggagcagcaccagcgtctcgtgccgcgtccaccgcggcagccgcgaccgcggcgtgccggcgcccgccgccggcgaggtcgcgttggcggcgcccgacattgctgctgctgctgctgcctcccggaactcgatcgatcgagagggatccaccaagctgggatttatctgcggccatcgccgccattaaatcgggaatcaaagcttgcaattttggcatccagcagaaacaggcaagaaattaatctcatcatactcatctctttttatctcatccaactaagaggccatagaaaatcagtgtcatttacggcgaatcataactacggcaaagaaaattagcaagaagttaatctagtacagctaatgtcgtctcataacaagcatgttcattaggccaaataatcatgtcataccactaaccatgtcaatcaataggacataaatagcattgca

SEQ ID NO: 1112 - DNA, 1812 bp, Oryza sativa
gtggtggttatggaagtggtggcggtggcggtggcggtggaggccaaggtggaggctccggctctggctctggctctggatatggctctggctctggcggaggcaacggacaccactaagctcattcctctatcagctagctacaatatagcctgttgttataagtgaaccgtgatcagtgatgagtctctctcgctgctttacaaagagcttgtcggattgtatcgatatagcactgtgtactggcttgccgtttcatcacataaagttggcaaagcctagtaaataaaacgaccttttgtactcagatcatacttctgttattcacggagctgatgttcactaagattgatatgcaagaacatagatttaacccttgtcctagctagttgtttacatagtaagcatgcagaatggacttgttaactctcggtgatcttgagttgtaaactggacttgttctcagtagggctgctagctagcatttctagattccaacatgttcgcttacacggtgttaaaaaaatattgctgcagattgtaatgaaactacccagataaagtttcaattggtcagcaccattttgaaaaacttggtgattagctatgcatactctggttttggggaaagaccgcttgagtaataactttgatcagtgatatttgtagtacaaagtacaaacgagtttggtagaaacaaactcaaaactaactactcctctagctagtagaagtatatcgatctctaactctacgtacgttcagttagtcgtttaaatatctgtaacacgtacgttcaacacaagatccagagcatgaagggtatcgatcggctgatttctcggaacttcgtttctgcatgtttatttggtacatcgggtgtgtcatgaaatttgcatattttctcctctggctatgatctctattagtgtggcatcaccattgtgaactgatctcctccagattccaatttaggtgtgtaataataatctgctctgctacacgcctacacagtgtgatcgaggttaactaatggtaaaaatgagtgtataaacatctagatctagttcatccctacgttatagattaaagtaattaatttctaaccgtgtggtttgcagtcgcaagagaacggtcaaatgcatatagcgtcatagcgagtcacaccttatttcaggtccagttctttcagtcgcaagatatgcgggtaatgcaggtcaccagtgctgcgttccactgtcattcttggcagcttccttcgttttctcttatgcgttttctcctgtacaactgtaattttttttttcattgttacttgtaccgccggtcactcaaaagacaaaactgatatttgtaacaatcagacaacacagcagtcagtccatggctatcagctagtagatgcacgtgttctttgtctaagacttatcttctctttctttacaaattatcgttgctcgaccactctcccaatccaattctgaatttgtttcctgggaggcatgtaacgcaatttgtcagacgatgtaacatgcagtttgtctggcggcttgacgactgctattactgatctctttgtttctaaatatttgacatcgttgactttttttaaacatgtttgatcgttcgtcttattaaaaaaataagtaattgttaattatttttctatcatttgatttattgttaaatatacttttatgtatacatatagttttacatatttcacaaatttttttaaaaaagacgaatggttaaagatgtgttaaaaagtcaacggtgttaaatatttagaaacgaaggaagtacttagta

SEQ ID NO: 1113 - DNA, 7940 bp, Oryza sativa
cctgcagccctttaacaacgccgacgagctcctgctcctgtgcggccacgcactccgccgtgcgacgcttaaggcggccctcgccgtcgccctctccgcctccaacggcggcgccgcgccgccctagcgccgctcctctcttcgtcgccctctccgcctccaactgcggcgccgcgcccctcttcgttgccggagacaactcgatctagggttcgcactgagagaggaccagaacacgcgcctttttttcccctcgctgctgactgtaaaaccgaaccccccacggacgctgactcagcgacgcgctgaccgtggtcaaagcgccacgtcggactaaaccgctagccatactgccttaggacgaaatttgcaccggttttgtaagttaagggacccgttgtatctggttttgcggatggaggacgaaaatcggattcgttgacaagttaagggacctaaagtgaacttattccctatttatatagatgcagcccacaacctcgtaaccattctgtccccccgtttccaccaaaccggcccaaggcatcaccgctgcctcgcccagcgcccgcggcatatggaagcccacggttccacggcccgcggccgcgacgactgtttctcggcggcggagttaggccgatcgatcgggacaaccggtgggcagcaggtcgtcgcacgccccccatcaaatctgcgtgggtttctgtcccccgaaaccaaaaaacgacgccccatgcaacgacgacgacgacgagacgttcgagcgacggtggtgccggtgtggtggtcgctagctagcgcgcgcgtagcttatcccgccggttggtacatactctcttcatcgatgccgttgacatttttaaaaatatatgaccgttcgtcttattaaaaaatttaagttattattaattcttttcttatcatttgatttatttttaaatatacttttatgtatacatatagttttacatatctcacaaaagtttttgaataagacgaacgataaaatatgtttaaaaaagtcaacgacatcaaacattagagagtactagatactactcctcctatacttggttggttgacgtgccaccaccgcacccaaccaacaccgccccgccctgacccaacctaacgcccgcactagctccagagaccgcgcgcgatcgatcgatcgtcctagctactccctccgtctcgaaaaaaaaaagtcaatccctgggtttgcgtgttcaactttaactgtccgtcttatatgaaatttttttataatttatatttttattattgttagatgataaaacatgattaatattttatgcgtgacttgtctttttaatttttttcataatttttttaaataagacggacggtcaaacgttgggcacgaaaaccaaggtttgtcttttttttttgggacggagggagtaagctactagtcggcaccacacacacatagcacgtactacacgcacgcgcgcgcgtctcaaggtacgcagctacagcttagctagcgcgagctggagcgcacaatttggttatcgccatctcttcgatcgcggcaggtcgcggggcgtcacgtaccgcgtgcgactggttcaattctattaattctcgcatgcatgcagtagtagtagtacgtactggggatatgatagtgcaggtgcggtgatgtgcatgtgtcgtcgatcggttaggcctcagctttcgtgggccttaatatatatagtacatcaatggtcgtcctcccttaattcagtgtttagtttctatcattattatcccttagtttctaagggcagtcccaaccctccatctagaatggtgtctatggcattaactatattgccatgtaggacttttagcttatgtggcactatattaattaagagagagtgaagagaggaataaactgagtctcatgcaagacacagtttcaacacgagaacctatgtactagacactatcaagttttgcattgggagataatagtgtctttataatagatgaagactaaatatgattggtagagaagagagatgatgtatttattaatggcccactttaaaaaaccatgggttgtagagtatagtttctattatgatgtcttattgacatggcaccatagacactgtttatggatattatgggttgggactgccccaaacactgagttgatcgatcgattatcgaccagcagcatcgatcgatcgatcgatctccggtgtgttttgtcaactgtcaaataaagcggggatagagttgattgggggtgtctgcggttcagctggccatattaattggttggttattagtacccttctgtcacccgcacaaatcatatcgttgaatcagtgtacgtacgtacgttcatgcatactatgccttgtaacttggagtagattgcctaccagccctttttgttgactcggtacgaccgtagactgttgtactgcatgttgttttcaggacataaaaatgatggcctgactcgatcagtccagcccagcctcagacaagttcggttggcccagcacgaatctcagtacatatgatctgacgtactgtgcacacagtgctcctgtgggtgccatcgtatcacttattcgcgaaataaacgtgtcgaaacatgaattcggcaataataaaacggggtagcgcacgagacctaaaagtggatggatgtggagacaaaggatttagacaggttcaggccctctcaatgagaggtaataccctactcctgtttggggatttgaatccgccgagtgtgtattgatctgacgatcaggttgtctcatatatgccccctagagggcctcctgcccaccttatataggatggggggcaggattacaagatagaaaccttaaccaatacggtatcggtttcctaaatcaggactttaggccgttccgtaatatacaaggaaacgtaacacccaagtcatgatcttttacatattacatagatataagttatcccctataactagtcggataaccatgccgtgtgggtatggggtacccataatctccacagtagcccctgagaccttcacagtcggaaagataaccttctctcgaactagatactccaaagccgagtgcttcaatcatcttcgccatggtctcccgagtacttttaccaaatctgaagactgtggagggctgaaaaataaagtcaggtgcatcgaatagatgcacctaataggtgtagcccccaactatgtgattagctgaacaaactaaacatatagtcaaggaataaattatccaattaaccgagtggtttttaataattatagtcaaccaagtgacttgataccaatatatagcatatgcggtgtgaatccccgaataatatgatccaagtgatataccgactgcttggcaaaatatgatgcgtacaacctaaagttgacaacatctttgaaagttcacatagcaaaacaattataaagaagcttgaatgctgtgaataaagaaatttccaaagtattgggcatacgccatgcgcacactgctttaacagatgtgcttaagtccctaaaagacacatggtttcaccacacctggaaatatatggcatatatggtataacatccgagtaagtaaactcataaaggatttaccaaccgcctgaaaaatgaccataatatataatcagcctaagccataatattggtcaataaaaatgcacacttacgtggcaaaaagcaatgatattgtatccaatcaattgcttaaaaacccaaacagcaccatggctatattaaaaaagccagcggggcagctatataaagctttactgtttgacaccttttaagatgcattgtaccaactcctaaaaagtcgagtaactgcggtataaaaggattttaaggtattgggcacttgatcacgcgcactttggcctaagcgaaaagtgcctaagtccctaaaagaacgtgacaggccacacctgaaaatatgggctgcagacatattaggcctagaccaaaaaatatgccttcgacaccctttaaaggatgacgcatgtaatatgctctcgagtaataaatcttccgggtgatatagaccaggtgtagctcatatgaatagcttctgatctgagtgattatcccttatgagatactccaaaatatatataataattgaatcccgactggcgcaagtattcggttgatagcccttacggggaataataattggtccagtctttgagcatagaaaatagactcatgactatgaatccatgtggaatgtatccggaacaagtccaaattggagatataatcctcacgcttgagttgatgagcccctgagcatatagcttgtccttctgtcatagtcaaaattgtctattggcaatagctgacgcagtcggcatggagatgaaatgaccaacatgaagacgaaattgctcatcagaagtaacggaagatgtcagtggtagtaaagatgccaccaatcaaatgtaatgaagttgcataaccatggaggcgaagaaaccagtcggcaacagtcaggttagccagcaatgaatatgaaggcgctcagcgataaagttgtgtagctatggcagcgaaataatcagtcggtggtgacaaaagcaaaccgacgatgaagacgtagatgcgcatcaacgatgatggcgaaatcaaccaatcatgaagatgaagaaaataatcggcggcgacaaacgcatccaacggtaatgatgattagcggcaacagagatagccgactatgatgacgaagtttcccatcaacggcagcagagtaggctatgttgatgaggcttgacaagatgttgatgaagatgacgatgtcggtgatccagtcaatagcaatgtagcagccgatgataacgatgagatcctctatcggcagttgcgtagtaggccaaccgtgaagacaaataattggaggagagttgatgttgttgcccaactcgtctaaaccgaaatatttgaagttgttgaagtagaatgtctgttccgaagcaaagatgaagataatgactcctggagttgactcattggctgattaattgatttcttcagcttgacataaaatttgtcaaattttgagccttatatttgtgtagcccccgactctttggttagttgggaaacaactgaacatagagtcgagaattatagcttcttgtcgtcgagtagtcattgcttgattgaagatatgtgttgaaggtgtccaagtagaaatcctgaatattggagagtcacttgttgtagtaaaatatcatggcattgcatgccgagatgtcgaggttcacaaagacgtcgtggttggtgaagtagtaaaacttgcgaagtagcagcaatagagtttgccagtgccgaagataataaagatgaagtcgctccaccatgatgacaaagttgcatcgccgtgatgaagtgaacacgagtcggcggcaacagaagcaaactggtagcgaagacgcgcagttgtgaagataaaagcactagtcggcggcggcataaccagtcggcaacaaaagacgatgatgtccatcagtagtggtagctgtataaaccagacgtagaggtgagggcactagtcagcagcagacgagacgaccggcggtgaagaagataaggccaatcaacgctggcagaatcatgcagccatggaagtgaagaaaccagtcggcagccatggcaaacgtaggcagcttgtgttgaagatactgatgcctattagtagtgacagcgatgtagccagccgtgaagaaggtagcatcagttggcgttataacaggccagctgtgcaggcagtgacaccagtcagcggcggatgcggcggccggtcggtgaagacgtagacgcccaacaacggcagcataaaggccagccgtgcaggcggaaacaccagtcggcagcggtcgaggcggccggtcggtgaagacgtagacgcccaacaacggcggcataataagtcggccgtgcaggcggaagcaccagtcggcggcagacgaggcggccggtcggtgaagatgtagacgcccaacaacggcggcataaaggccagccgtgcaggcggaaacaccagtcggcagcggcgaaggcaagccggtcggtgaagacgtagacgcccaacaacggcggcataaaggccagccgtgcaggcggaaacaccagtcggcagcggcgaaggcaagccggtcggtgaagacgtagacgcccaacaacggcagcataaaggccagccgtgcaggcggaagcaccagtcggcggcagacgaggcggccggtcggtgaagacgtagacgcccaacaacagcggcatgaaggccagccgtgcaggcggaaacaccagtcggcagcggcgaaggcaagccggtcggtgaagacgtagacgcccaacaacggcggcataaaggccagccgtgcaggcggaaacaccagtcggcggcggtcgaggcgagccgggggtgatgttctgactgatccattcctggagcgtaagagataagcttaaagccatgaatcccttttatgcatatctggatctggatcctgcagaacaaacatataggatgagtagtatctgatataaatataatactcgagaaaaattcaagcagtttataaatacgtatttcttctcttgttaattttgatttccccgagcagatgactcattacgtttaaacactctgcccgactagtcatagccaccaagcactgggagtcggcctaagcacttcccaaacatgcatatgagtgacatgagttcgtcattaatggaacaaagtttcacggatcggagtttactactcgggtacttttgcaattattaagagcagaaaataaatttatctcatctctatgcttttgatttattccgaataatacttagcaccttgcgttactcggtccatccaacgagcccccgggtgctaggaatcggcccaaaggcaaccatccattggcaaaccaaacggaaagcataggaagatagaactccataactcgataggtacttttgtactcagattatgtcgcaagcaatcaagataaatattatgaaaattgtttaaaaaatacgatataacatctatagcccccgactcactagtcaacggcgaaccagttgatgtagtgaggcaaagaaaaagacaaaatatcatataaagaataaaataaatgatgacttagctttgtaatattccctcggtgacagcagaagtagccgatgtgggaataaagcagtccatcaatggtgacaaaaacaccagtcggcgccagtggaaccaagccagtggtgtagatgatgaggcccattaacagcggcggagtccgccaaccgtataggcaaaaacaccagtcagtggtggcgaaggctagccggtcggcgaagacgtggacgcccatgaacggtggtgtgaccaaccaaccgtataggcgaggacaccaatcggcggcgacggaggcaggccggcggtgaagtcgtggacgcccaacagcggcggcataataggccagccgtgtaggcggaggcaccactcggcggcaacggaggcaggccggcggtgaagtcgtggacgcccaacagcggcggcataataggccagccgtgtaggcggaggcaccactcggcggcaacggaggcaggccggcggtgaagtcgtggacgcccaacagcggcggcataatagaccagccgtgtaggcggaggcaccactcggcggcaacggaggcaggccggcggtgaagtcgtggacgcccaacagcggcggcataataggccagccgtgtaggcggtggcaccactcggcggcaacggaggcgggccggcggtgaagtcgtagacgcccaacagcggcggcataataggccagccgtgtaggcggaggcaccactcggcggcgacggaggcaggcggcggtgaagtcgtagacgcccaacag

SEQ ID NO: 1114 - DNA, 711 bp, Oryza sativa
ctgcaccccacatgagcctatgcttcaaactccatatcattgaatcagttgcaacctgtacaaactgattgcattcctgaggtatcagtaagcacagctggaacggcgactgagaatgagaaaagcggtcagcaagctcaacagagttcaaaagatgttcaaagcaagactcaggttgcttcgacgaggagttgtacaaaggtatagtattgttttcttgatggtcatgacaatgtgcatgtcttttctgttgcacaattttcttttacttaagaattactgaatgtttgttgtctagattatgctagctgttgagaacaaactatccagtcatatcagagtgaattgattctggtggtgttaaagcacatattgttcttttattcagcacatgaagttttttcttctcgtagttgacatgctgaagttctcgttttgtaaatttcttgcaaaatctcagttttatcccctttgtggtatggtaaacccaattttgctatttcttgtcccaaaaaaaaatcatgagcaatattattcagtgcagcatgagtgtgtcaagtttgactattggtctgcactatgtaataacatcatgtcattgattcttcatgcaggtccataagcaaggcgttgcacttggcagatctgtggatctttcaaagttcagtaactatgatgaactcaaagctgagctagacaagatgtttgaat

SEQ ID NO: 1115 - DNA, 722 bp, Oryza sativa
tgggggttaagtggacttggagagggggagcccagctgggccggcccacgcggagaaaggagggaaggaggaaagggagaatgggccgagcccaaagacaaagaggggaagtttattttgttttctttttatttaaattggttaaatgatcttcgtgactttaaaactatttctcgagctccgaaaattcacggaaaaatccggagagtattttagggcacaaagaatattacaaaatattcccggccaatgatttttaagggaaaatttcaaattctcccattattccacttgattaaattgatttaacttttatttaatttctagaaaatgtattattaattgatttttaaacccgaacgaaaatcggggcgttacaaatctacccgaacgaaaatccagtggctcggattcgccggagggagctcgacagcggcggattgcggcagcggcaaccggcggagagaaaagaggaaaacgacgacgaggtcacgaggggccgattcccggtggcgagagcatctacgcggctacgggaatccgtcccttgtgccggattaggaggaaacgcatcgagggaggccggcgacgagaggcgcttccgagcttgggcggcgacggcggcgagcacacggcgagcggcggcaacggtcggggcggcgctggctagctacgggaaggctactcgtgctactacccgagtctaaggggaggaggtggaa

SEQ ID NO: 1116 - DNA, 6969 bp, Oryza sativa
caccactcggcggcaacggaggcaggccggcggtgaagtcgtggacgcccaacagcggcggcataataggccagccgtgtaggcggtggcaccactcggcggcaacggaggcgggccggcggtgaagtcgtagacgcccaacagcggcggcataataggccagccgtgtaggcggaggcaccactcggcggcgacggaggcaggccggcggtgaagtcgtagacgcccaacagcggcggcataataggccagccgtgtaggcggaggcaccaatcggcggcgacggaggcaggccggcggtgaagtcgtagacgcccaacagcggcggcataataggccagccgtgtaggcgaggacaccagtcggcggcgacggaggcaggccggcggtgaagtcgtagacgcccaacagcggcggcataataggccagccgtgtaggcgaggacaccagtcggcggcgacggaggcccaacagcggcggcataataggccagccgtgtaggcggaggcaccaatcggcggcgacggaggcaggccggcggtgaagtggtagacgcccaacagcggcggcataataggccagccgtgtaggcgaggacaccagtcggcggcaacggaggcaggccggcggtgaagtcgtagacgcccaacagcggcggcataataggccagccgtgtaggcggaggcaccaatcggcggcgatggccagccggtcggtgaagacatggacgcccatgaacggtggtgtgaccgaccaaccgtataggcgatgacaccagtcggcggcgacggaggcaggccggcggtgaagtcgttgttgctatcagcaatggcggtggcgaggacaagccggcggagtggactcgcggccgatcgaccggaaagctgagacgcctcgagtccatgaccagcatcaatcgcctcaatagtgccgcgtagttatatgcgaacaacaacaaaaaatagcaagaaattaatctgagattaaaaatcaatatgataaataatgataaaaatcagattgagtttccccctgactgatttggatcaagtcagagaagaggagcttgaagaagtggtcgacggaaaggaagtgaaaactcccaaagcgaaaacgaagtcggcgactcatgaaattgattccatcgcgctcgttgataggaaactcgacgcaacccctacctggcgcgccaactgtcgaaacatgaattcggcaataataaaacggggtagcgcacgagacctaaaagtggatggatgtggagacaaaggatttagacagtttcaggccctctcaatgagaggtaataccctactcctgtttggggatttgaatccgccgagtgtgtattgatctgacgatcaggttgtctcatatatgccccctagagggcctcctgcccaccttatataggatggggggcaggattacaagatagaaaccttaaccaatacggtatcggtttcttaaatcaggactttaggccgttccgtaatatacaaggaaacgtaacacccaagtcatgatcttttacatattacatagatataagttatcccctataactagtcggataaccatgccgtgtgggtatggggtacccataatctccacaaaacgaaacgacatatttgcaaacgaaaattaatttgtaataaaactttatatacgtgttcttaacaatttaaaagcaaaggttaaaaaataaacttcgataaaaaaaaccctcaaaatcagttctaaatttaaggttgaaaatttaatttttggctgataagtataagcataagcaaacatatggtaaaatttgctcggatacacacttgtttgctacatatgacacccttttatggttttggcttaggacatttttgtggttgttggctaaaatgtgctccctccatccctaaatgtttgacgctgttgatttttttaaacatgttgaccgttcgtcttattcaaaaaatttaagtaattattaattcttttcctaccatttgattcattgttaaatatacttttatgtatacatatagttttacatatttcacaaaattttttgaattagacgaacggtcaaacatgtttaaaaaagtcaacggcgtcaaacatttagggaaggagggagtactacacttcaaccattattgtagtatatatattttccaatgaagagataaactttacaaacaacggttctatccttgggcatcatgtaagatttggatataaacaaatcaatatacatttgctgaatttaaacttattttcaaaattcaaaaaccgcctccaaatgtggaaattagacaaggtacaaaaatttaaatttcacgaatatttgttcaatttgtttcattttttcctcaattctcatttcgtaatttggcacaagttttaaatttcatggaatatgttttaatttagtcaaaatttattcgaatttaaatattgcagggtggcctaagggcgagatcgttttgtataaagtaatatctctccattagaaatgaatacattaaaataattaacggtccgtgtgtatttcagaagacagcaaaaaaaaaaaactgaagtaaatcccacagatcctaattagatctagcccttgtccatgtgacacgtggtacatatatactccggattttacctcgtgctagttaagggaaaaaagaaaaaataattaactaaacggcacgaaaagcatgggagagaaaaaaagtagcctacacattgcagagtgatttgagatcaaggtgttgatgtactagtggcgctgatgaagaactttgattaaccgttgcaatcatgcttggccaacagaattaacaaaaaaagtaccatcgttaattgtaactttacaccaaaactatcacactgtcaattaattaattattagtctgcagatatatccatcttaattaattagctagctagtgaaatctgtcactagcacccagatattaatttagcgtcatgtagcattatatccttgctggattgcattctatttggtttttcatttttacatccatgtgatcctcgtagttcgttgcaaatgacgattattttcagtgatgtaatcccgcatggacgcatttgtaggtaaattctaaataaataattcggcgtccgtatctaaaagctatcgctcagtgcatcaatcggataattgttccacgcccgtttctcagttcatcaacttgagcatgttgcgatttaaaaaaaaaattaaagagccaagtcaggagcatgcataagtgccttatcccatttcaacaggattcagataattaatccatgtcaattggttccattccattttcataatatcttaaaccaacctattacattttaaggtggattaattcacgaatgttccatgggaatcaacaccgtaaacactgtttaaaacaagtttcaagattaataatttcaatgaaagtcctgtgatttgatgaaggtaattgtgagttttttttttctgtttcgacaccttaaaattctgagaaacgtttaaactacatatgaaaaatctgggtttcctagcttctagatcctatagcgatagaaatttaaagtatatatgagaatcttgactatttaggatagctgaaaattctaagaaaatctactgcacggctaaaaactttcgaaataggaccttaatttattactttatcatctcttctgatggccttctcggtgcttccaaaaggttaatttcactgtagcacgttagttggcacagcatcgacacccagcgagtccatcctgtcaagaacgccaatgacttgcacagatagcgtcaaattatttggtggagacgggcgacgtacgcgtggaaatcgcatccatctgctcgcggcgacttggaagtaagcgatcgagacgagcgctcacagacacagtacacatccagctgtagtcggcacaagcgatcgatcgaggctgtgtctagttcagcgcaaaatttaaattttggttgaaattaaaaatgatgtgactgaaaaattgtgtgtgtatgataggttgacgtgatgaaaaaggactgaagtttagatttaaactttggatctaaacacagcccgagtagcagtgtactagtgttcttctcaggacatgatggccagcgattgtcttggcatccagaaataaaaaggttctctccttgatgatatatctctgtgtagactaagggtctgttcactttaataccattttcaaccttaccaaattttggtaaagttgccaaaaaagtggctacatttagtgtgctaccaaattttggtaactatataagaaatcctatcaaaattttggcaagtttgctaaaattttggcaactataccaaaatttggcaatgccaaaatttggtaaggttttttttggcatcaaagtgaacatgccctaattcaaggtagcctagccatagctgtgtgatgtcgacgctgactttctttgcctcttcttatctgcaaattaaaaccgttaggtcatgatcattttttagctatttttattttcgtattaaaatgaaaattccttacgctcctaagctttctttctttctttataaaggcaatacaaatgcaagtgcttacataaaaacgcgtgtatacttacccgtatgaacacgcacacacaccctactttatgagtactttcgaatacggaaccggcttatcttgagattaacctattgcctaccactgaaaaaaaaaactaggcataaaatgctacatccatatatactaattaagtctaggacttttagccaagttgaaaagttccaccatcagaaacttgactagttaccattagggtttgaagtttcagaatttgttttcttgccgatggggaccggtaatttcataatttttttggctgaaattatttgaaaatttgactgattttgaatgaatttgaataaaatttaaccaaattcacaaaaaattacaaaaaaaagaagaaaatttcgggtgagatgtgagcttgccggtggggttcgaaatttcggaaatttcgaaccgaaatttcaaaccctagttatgatacgctcacttcgtgactctcttgtgttcatttgatttatgttccccgaaatgactatattaccattctctcgtatttatacattgtgaaaatttcatactttattataaaatcaaacaggatagatatattaggtccttataataaaatcaaataggatacaaattcataaatgttagtgtttttttataaacttaaagttaaagaattttgacttaagaaaaaactaaaacactaaaacaacttacgatacggaacaaagggaacaataattgttgttctagatacagatatttgggtggcatgcttaaaataaatttcagtaattacgccccccttttgaatgggcaatttgtgaacttcatgaaaaaaggcgggtaccttaggagcataagtactgaattttatattctaattgatcaaatgaatatcccctcgtttattacttgacattcaaatgattataaaaaaaataatatgatagattaatctatatatgatatatcatttcacaaacatgtaactaaataacaaattaaactaactattatgcatactcatatttatatttgttttttttataatttatagaagttaaatttggtgttgaatgttaatttctagagtgatatatcatataataatctatttcattaattttatttattttttctaattatttgaatgacatgtaaaaaataaaagaacattccctcaagggattagatagtttgctggttcaatgatgcatttttatttgactagtatatatattattccctccgtttcataatgtaagactttctagcattgctcatatttatatagatgttaatgaatctagatgcacatatatgtctagatttattaatatctgtatgaatatgggtaatatgctaaaaaagacttgcattatgaaacggaggaagtatgtcgccaggctcacttaacatgtaggtctagatcggtttaaaatgctgcatttaagtcggaatcagatcatgtatacatgtaacacaatactggtaagtagtaagaaatgccgatctagggatgaaaaagaataactgagataataacttaccatgcaattttattattgcacaaatttaattaactgtttagtttgatacttggcctcatatatagtacgtagtaattaattaaaccatctcactaggctccaactagaaatcagatccacgtctactagtacagatatgtgatgagcagatataagtgcatctgccacacatcactgaaccagcacatggatcacattaagcacgtcaatgtatgctaattaattgattaactataccatgcctaattgcttaattagcagccaacggattcgattgatcccattcgccaaaaccggccggagtcgctctcatgaaaacagcctcagatgaccttgaagtatggacagaatacaatagcaaaccgatcgaataattctatctctgcttacataaaagcaaaagcaaaagtaaacacacacacacaaagcaaaaacaataaatcagtattctaaaaataaatcagtaacatcaccacaccgctctccaagtgtcaaaaagaattaaaggacaacagctactggcactctccatgaactctcctggtcatcatttcacacccatatactgtgtccaaagtccaaaagctctaacgtctctagttttggaccatgcagactgatgaacatctgatgagatagccatacacgagatgcaccctataaataccccagctccccttcactccaaccacactacccagctcactgaagtagcaacgcagctcatcagtgtcaagatggctactactaagcatttggctcttgccatccttgtcctccttagcattggtatgaccaccagtgcaagaaccctcctaggttatggcccc

SEQ ID NO: 1117 - DNA, 789 bp, Oryza sativa
  unsure (1)..(789): unsure at all n locations
ccatacttctctgcaatctaagttgctgtaaccattntgttatcccttntaggtggacatgcatgcaagctttcaagagtaactatctgccagctatcactcttagtattcttggacagcaagcatacccaaggacagcttgcccaatcacattttgccctaaccctcttcaagtcatctttgatgaagtttataaccttcctctcagctagagcatacttagtgacagctttcttaaactgcttctttgagctaaacttcatgcccaattcaaaacaaggagtccctaccttttttttgtatcttgggaacttattttccttagtgctaacctcaccatctgtgccaatctcctccattgattcatcctctgggctctcagcagcaatgccatcaccttccccaccagcttcattattcatgttttgccatccttgtcctccaagatatacatcatctaaattatccagctgtcctgccttcacctttctcttcatatccttgtagtgcttctctatctatatgatctcctcatcatcatctgaccctgcatcatctccaggaatgtactcactatagactcactctctgaaggtgcctggcttgccaatggatcattgtcacaattataaaccacaagtcggttctcaggaatttcagaactaatggctttgcccttcctaacttcatttgtcttggtcctaatttcacctccttcaagagctactgcattttcagtaccctccatacgggctgcaggaatacgatggcagctcactcactctccgt

SEQ ID NO: 1118 - DNA, 7212 bp, Oryza sativa
gggagaggaggaggtggaggggaaggtggcggacaaaatggatatggagatggctatggatctggggttggatttggtcaatttaacggcggctggccatataataattgatactataaggctggtggtcgagggagtggaggtggtggtgggtacggtggacctaatagatttggacatggatttggttccggcgttggtataggtgaggctggtaatcaatacggtgatgagtatgcgaagagtaaaggtgacggtggaggtgccggtgatagcgctagaggtggatatggtgaaggtttaggtcatggatcgggatatggagacaccggtcctcaacagccatgaaattaacctttgtataatttgaataagatagaataagtgaaagcccaacaccaatataatgtagcacatagttttcatagtcagtatattaaaaggcttcttgtgttttggttatatatactccgtaagttgcaaccttgtacactctaatcgtacatcggatattttcctggtaacagttttaacactgtttgcactagtaacctatcgctcatgaataccacgtccatgtgagtacgctttgaatatgatattaatgattgaggtcaggaatttgttgtcgatcttcattctttagacatgcgttagaggacatatttatagatgtgtgcacgtggtatacgtacatatataatgccctttttttgagcaaaggatcttggcactccatttctacgtacataatgcgtatgcacacatgtatatctatctattatattatcaaaacagctttgaaaggaggcaccacgttcgctgtgggggctaaaaattcccacattaatcagagaaaaagaaaaaaaagaaaaagagagtccaagtaggaatacaatttaaaaatagctgaaattcggaattaaaagtaagcaatattgaaagaaatttccatataggaacccaatacgagattaatcaaaattcgaaataaaaataaaataaaatccgaaattagcaaaaaaagagtctaagtaggaatacaatttaaaaatagctgaaattaggaattaaaataaggaatattaaaagaagagtccatacaataacccaatacgagattaattaaaattcggaataaaaaaaataaatatcgaaattagaaaaaggaaaagaaaagaatagttcaagtaagaatataatttaaaattaactaaaattcgaaattaaatataagcaatattgaaataagagtacatataagaacccaatagtagattaactaaaattcggaataaaaaataaaatataatctgaaattaggaaaattaaaaagagagttaaagtagaaatacaattttaaaacaactgaaattcaaagtaaaaataaaaaaaatctaaagaacacaatacgaaaaataaaataaattctgaaattagaaaaagaaaaataagatatcagctaggaatacaatttataaataactaaaattggtgataaaaaaataaagattactaaaagaaaagaccatctgaaacacatgacgagattaattaagtaacatgcagtagagtggtggcggttgatggaacatctaaaaactattaataaaacatcaaatagaatattaatgacgactaaaaagaagtacaacgggcaggtcgtgaagcaatcggtcaaggcgtttggcgggtcttctaaaaagtaaaaaaaaataaacccaatgataattatatttgatttttacgttcactgtgggggctagaaatttccacattaatcgaagaaaaagaaaagaagagtccaagtagaaatacaatctaaaaatagcttaaattcgaaattaaaagtaagcaatattgaaagaagagtccataaaggaacgcaatacgagattaatctaaattcggaataaaaataaaataaaatccgaaattagcaaaaaaaaaatctaagtaagaatataatctaaaaatagctgaaattcggaattcaaaataagaaatattgaaagaagattccatataggaacccaatacgagattaatcaaaattcggaataaaaataaaataaaatctgaaattagcaaaaaaaaaagagtccaagtaggattacaatttaaaaatagcagaaattgggaattaaaaataaggaatattgaaagaagagtccatataagaatccaatacgagattaattaaatttcggaataaaaaataaaaaaaatcaaaattagaaaaaagaaaagaaaagaagagttcaagtaggaatataatttaaaattaacttaaaatttaaaatttcagaaaatttgaaggtaggtggcaggacttctagaaagtaaaaaaataaacccaatgataatcatatttgatttttaaaatctcaataataataaaaatgagaggcagcggtcgagtcgtataggagtacaatggcaaagtcgccgatggttggtgagtcttctataaagtaaaaataaataaattccaatgatagttatgtttgacttttacaatcctaataaagagtatgcggcggacgggtcatagaggagtatagtggcagcgtttaatgggatttctagaaattataaaagaaaaatgaaatccaacaagacaataaactccaatttttaaaggttcgggtttctaaaaagtaaaaaaaaataaaccccaatgataatcctgtttgattttaaaatctcaatgacaatgaagaagggcggcagcgggtgagtcgtagaggagtacagtgacaaagtcgctgacgttttggcggaacttatagaaagtaaaaaaataaacctaaacgataattatgttcgatttttaaaatagcaatgacaatagagagaagatgcagtggacgatcatagatgagtataatggtagtgtttgacgggacttctagaaattataaaaaagatgcccaacaggacaataaactctaaaacctataagtttttagatccaatttttaaagattccaaggagaatgaatagaaaactgtgatagatcgagcaaacaaataaagaataatatgacagaagtaaggggtagcaactgttgtgactttagaaactaaagaaattagaaacgcgaggataataaggtttagtctttaaaaatcttaagacaacgagataactatttaataaatttgaagtaaagtcatattaaaaatatataattttatatgggtgctagccgcgcaattgcgcgggccatccagctagttccttgtaatgtgaaaaaaaaatgatcaacatcatattgatatgtagtattatatccattctaaaatatagttatttttagcacggtaactatttcttcacctactatctcctctcaaccaatcgcaaccattctcttcatctactttatcttattcaccaatcgcaatattctccaatcttctctactcactctcttaatatcgatatctaccttaaaaatacttacgctctgcaacgaagaaagtagataaacaacactacacatttccattgaacagtttcctctctaataaaataatagtaacacataccagctcagacttctgtttggtcatctcgccgtcacatacacggacacgctcggctgccccgtccgcatgtagcggcagcgcagtccccaacgatcctcgcgcgtggtctcggctgataatagatacaactacctttctagcatcaccgatatttataggaataagttcactttaggtcccttaacttgtcaacgaatccgattttcgtcctccatccgcaaaaccagatacaacgggtcccttaacttacaaaaccggtgcaaatttcgtcctaaggcagtatggctagcggtttagtccgacgtggcgctttgacttgtcgtacgtggcgctttgaccgctgagtcagcacggccgttggggaataaaggcttctcgcgcattcggcgccaatcctctcacatttcagaaaccctagcttttcggcgtgtaggttgcagcgattcagacggcggcggcgtcgtgattcggacggcggaggagcggcgatgggaagctcaaggagtgaggggtcgtcgtcgtcttcggccaggcaaccgtatggctcgcctattccctatcgcgttggtccgttcgagtacgaaccagcggtgctgtgtcggtgcgaactgaaggcggcgaggtggatatcttggagcgtcgacaaccctggtcgtcggtatttcaagtgccgcaatgctcgggtgagtgaatttgccgtgttaattttggattggttttatttcggattgggggcctaaatattagggtttttgacgcacagaaagggggctgcgatttttatgcttggcatgatggcccgacaagcagctttctgagggaggtgttgaatgatttgcgaggtgctgtgcattctctaaggagggagaaggcagatgcagtgaaggaggttgaggaacttcgtgtgaagtctgaagagcaatgcagggagtttgcttcagttgggagggagttggcttcagtgagggagttggttagtgagttggatgtgaaaaatgctgttttaattgatagcaaatgtaggttagagaaggagcgaactgtgctcatttggtgcatcctgtcatgtatgtgtgttgttattctattagtgctgggcaagaactgatattgtgtgggcatggcctcaatgtttgatggaaaaaaaatgtgtggcagaactgtgaggtgcaaaaatttatcaatgaaatgtgaagttctgaatgtcttgccaaaattgctgaatgcaatgtcatgtatgtgtgttgtgtacaaatatgcagcaattatgttttgtatgatagaaaaacaaatctcagcataaatgtagccaatataaattaggaaacatcacaggaaccaaatgtcagtcaacagagctgcttcaaatgtggcattgcatcaaaaattgatttgcatcacattgtcagtcaccaaatctggtttgcatctggagtaacaaatgtcatcaaatattctttctcagcagacatgcattcactaaacaagtgttatgttttgagcacacatgcatataatgaaaatctggaagacaaacattagcagtgcaaataacatatcacagtattggcttaaaggttgccattacatcacataggtcttagtttgcgcaaaacacataatagatggcctaaagtttggcattacatcacagaggtctcagtttgcacaaaatacatcatagctggctcaaagtttgccattacatcacagagctgctatacacagcattcctaaaagcttggcattacaaatgacaatgcatcatagtttgtcagattcccatggagggagaagaagcagtggtactttagctttgttctttgtagttgtcctggcaggttcttgagctgaaactatagttggccatgtgggccgcccggctcggcacggcccaggcccggccgtgcctgggccgaggcttgtcgggccggcacggcccgaccaacgcaccgggccgtccgtgccagcccacgtgccgcactcacggcccaggcacggcccaacacgcctcgggccgtgccgggccggcccgaaggcacgatgggccgtcgtgcttttcctcagaataagtctaaatttcctccctcctattgggctgtgacatatgtacagctacaaaaagtctattttacctccctcttctttgggctggggtatataaatagctaaaataagtctatttaaggtccctattctttagacagttacatttatatgtctatttttagtccccatactttatgtaccgggcctggcctgccggcccatcgtgccgggccggcccgaccgtgccgggccagcccagcgtgccggtggggaggcctaggcacggcccgacggtcgggccgggccagcacgggcccgacccaagtcgggccgtgccgtgcttgggccgggccaaaaaggcgtgccgtgggccgggccttcgggcctcgggccttatggccaactatagctgaaacagatacagatgctttccctgaagtaacagtgacaactgcacttgtagagctgttggagcctgcaacattggcctgcaaatcaaccctagctgagccaccagaaggtgtagaaatttttgcccttgcattcactctgacaatttggaggggctccatttgtgcctgtagaatcagatgaagcacacattagtttaaatcaaaatatgcacaatgaaatggcatggctgatttagcttacctttttttgtcggcttggttgcctttgactgagaggctgaagtagtggtagtcaaggtgccagttgccttcctttttctactttgtgcacaactctggggggtgttggacagtacaagattgtggctgggtgttgcaacctgctgtgaactgccacctgcagtttgagctggattgtgtttgtgacagcttgatttgttgtggccaacctgcttgcaagtcctgcatctgaccttggtgccaaattttgatgccttagaaggcttagctggctcatgagcctctctccttctttcagttctgggcctgcctggcatctttatatacccaggtgcagtcagtggctccctatcatcttctggccatgcattcatgccctccactggtagtaggcaatgcttatatgtgctcttgaaagcatccactttgtagcaatcagcagtgaactcatccagtgtgttagttctgtaaaatatacatgcaattgcatgggggcatggaagaccagagagttgccaatacctgcaagaacactccttcttgtccagctgcacagtgaacctattggtgtggtgttttacctcaaagctgtcagctccattgcatatagcatgacagtatgctgactcagtgatatacacattcaatttctttaggatccctggacagaccacagtgttccatctagcagaaacctttctctgctctgaaatcctaaccatcaccttcctccttattgtctctagcatggttataattggaaaaaatcttgcttctaggatccatttattgaatgactcacacatattattatcaactgaatcgcagtttgagcctaacttgaaccatgcacggctccaatgttctggatgggtattaagtatggcctgtgctccagcaggtgtcacctgtgctagctttgcccttgccaggttgaagagcatcctacatggag

SEQ ID NO: 1119 - DNA, 654 bp, Oryza sativa
ccaaattcctgtgctgtttaattctctagcattgcagatctgccttatatatttttggggttacattttgttgttttacaactttatagatattttaaatacaatattaaatatgttatttttttattaatattggttccattcaatttgagactaaatgttagtttcatgcagaaaatgcaaacactgctagaagatgttgaaagatccagaatgaagacttaatactgatgaatcccctaatgatttttatcaaaatcattaagttaaggtagatacacatcttgtcatatgatcaaatggtttcgccaaaaatcataatcagacaacaaaatgtgcgaactcgatattttacacgactctctttaccaattctgccccgaattacacttaaaacgactcaacagcttaacgttggcttgccacgccttacttgactgtaaaactctcactcttaccgaacttggccgtaacctgccaaccaaagcgagaacaaaacataacatcaaacgaatcgaccgattgttaggtaatcgtcacctccacaaagagcgactcgctgtataccgttggctgctagctttatctgttcgggcaatacgatgcccattgtacttgttgactggtctgatatccgtgagcaaaaacggctta

SEQ ID NO: 1120 - DNA, 1083 bp, Oryza sativa
ttggtgaatgatgctgatcttaaaatgttggtgaattcagtgcatctttcaatcaatgtttcaccttgggctcatcctcagcctcaggtgagtcttcagtccgaatacagagttggaattcaaacagtgcacggcttgtcaacagatacctcaagcagggctagtcaatggtaaacacgccataccatacaatgagggaacacgaagtattacatcatgtatacgagttatttttcagtaatatcacatagcacaagtaaatgtgtaagaacgcaatcaagagaagtgctatgtacagtgacgatgttaataagttttactagattgtgattgtgttcttgcactgaaagaaatatccaaacttacaaaatagtgactaaatgtcaaacgtgccaaaaaataagtatggaagtaaacagtcacatgtttgcaagttaaattacagtctttggcttcacagatacagcttcataattgtaaattgcatgcctgaagacatagttgcgcagaggttccaagtcatcccgcaccgcaaaaaagccgaagattttggcacgtccaggctgagtatggcgatagccggagattttcaggtcaatgaactggagcaaattcttcgaaaggcacctacacccatttaagcaatcaacggccccagcgctgtcgacactgactacaaaattgataacgaaagaatgagaaatatgtgtggttccacagtcaaatatagacaatgatgtgataaatgatagcacaagaaaatttaaaggagtttatttaaagaaggcatttactttcagattcatcatcgagtcggtaataagaaccaaaccaatgcctgcgtttatcagtgagaggatcattgaatgcacggaaaagactgagcggtgacgggcctccaaggcgaagatgtggaatatcaaagagtgcatcagtctgcacagaatggtcactactaagcctgggaaaatcatcaactgtaaaagggcggtgctttcctacataaaaaatcataggataatcaaatcaactcaaacaatttccatggctctggagtttgatgtaccaccatctaatcatatg

SEQ ID NO: 1121 - DNA, 1400 bp, Oryza sativa
ctatagctcctgacctcctccacgtcgtgcctccacgcttccggggatcgcacacagttgctgctgggttagcgaacaactcctgggttggtgacatacgtggcgccctcactgtcccggtcatctctcagttcctgttagtctgggacgcggtggttcctacccagctctcgccgggtgttgaggatcacctcgtctggtgttggacgggtgaccagtgctactcagcgcaatcggcgtatcaggcgttcttccttggccagcactcttttgcctgtgccgacttactctggcacgcgaagggccctgctaaatgcaagttcttcctttggtttgcatttcagcagcgctgctggactgccgatcttctccaaaagtgtggtatcgatagccactctgcttgccccttttgcgctcaggagcttgagacagcgaaccacatcctcatcgattgcgtgttcgctcggcaggtctggctccgtgtgttgtcccctcctggctgggctgccctctctccccctcatggcagctggctccaggattggtggtcatcctccagggtatgtttacctgagcaccttcgcagcagcttcgactccttggtactcctagtctcctggcagctgtggaaggaacgaaactccagggttttcgactctgcgctcgcttcggtcgcagtggttctagagtccttccgctcggagggccagctgtggtctttagccggtgttgcttgttttggggatttcttgggagtgtagcgtggctctgccccctcccgctgtttggagttgcgtttttaaccgtcgtagtagttcctagcttcaagtccccccccccctttaggcataagccagtctagctgattgctttgtgtaacaaaaactcttttcctgctaatatattgacgtgcaatccttttgcgcgttcgcaaaaaacttttgccggatatcttttctgtttattcaagatgtgtgccactgcacattactgcatgcatgacaattgctttgcttggttattttatttcgcgactattttcagagtcaattgatgtatgtctctttaaatcatattatttcttctttacttcgatttgtgcctccaataattagacctcgtctcgtgtagagtactaatccaagcagtatgttatctccaattgagaaattggttggtgaaaagtgaaatttttgtttgttcctttcgatacttttttggatcatgagtacgggagacatagctaaacaagttccatgttgcgaaacagaaattgtatgcctcagatcttcattcctcggattattgtgaggatttcaagttatttcttatttcacaattagcataggaatctctagcatttacatcttattaaggtaaaagcttcaagataaacagca

SEQ ID NO: 1122 - DNA, 2931 bp, Oryza sativa
tgtcagttttgtagtggcatctacaatgctgctatgtacatatgcatggtagcagatgttgtttctagaggagccccctaattgagcaggctttataagttttgtcaatcagaatattgaagtttgtcagatatcgccgttgttggccgatgggatcgcggcctcctacgccgagccgactggtctcttcttcaacgagctcgacgccctggccgcggagtttggtccggctgtgccttcgccgcccagggtatcgcctgtgccgccgtccgcctccggtgcaggcacttctctgccgaggactgcctgcacaccgcctactggtggggagtggctgaggcctgagtcgccgcttcctcagcaggctccaactttggtggttgatgtgcctgacggcgtcctctacgatgtgccgatggttgtccttgacctcgatggccgcccactggcgcactcgcttccatcttctgtggcagacaacgccgctcttcgcgccttcctcaccagctgctccaggcctctccctcctgcgctcctatcgccgcctttgccgctgccgcctctcgctgccaaggcggtgggagttgtgccgaagcgcagtgagcgtatcgctgctaagatggcacttgaggcgcttgaggggccgatccacgcagtgtcgcgcgcccagcgcaacctgatgcggaagctcggcctagttccggagaggggcccggtcacggccgaggcggtcgcggcttacaacgccctcttctccaagccactttcccaggagcacatcatcgcgctctcctcgctcttctctagctccttgcccccggccaaggctgcggaggagttggtcgtgtgcggctgatcggtttcttctcttctgctctcggtgtggtccccctcaatgggatcatgcaacgagaacattttggtgtggaacgtgcgaggtctgaactcgcgcgcccgccgggatgctgtgcgtgatgtagtccgtgatgagcatgtctctcttctctgtcttcaggagactattatggatgtaatcccctctcgtactattctggaaatgctaggcctcgactttgattattctttcttgcctgcggtcggtcggagtgggggggtgttgcttgcctggcggacgaccgtctggtctgtctcagatgttcaccttgcggaattctctcttaccgcgttggttcgacactcttctgatgtcgccccctggtggctctccgtcgtctatgggccacaggaggagccggacaagcttcgtttcttagatgagcttcgttcgctgcgctcctctcgcacggggccgtgggccgtcgtaggcgatttcaacctcattctcgaagctcaggataaaaacaaccttaatctcaatcgtcgtatgatgggtcgttttcgtcggctcgtcgacgagttggaactccgggagctgccgcttcacggacgtcgcttcacttggagcaatgagcgtgagtcgcccacgcttgttaagctcgaccgcgttctcttctccgcggattgggaggagcttttcccctcttgcctcctccaagcggcctcttctatcgcctctgatcactgtgctcttctccttcatacctgcgtcacctccccgaaagcgcttcgttttcgttttgaggccttttggcccaagttcgacggctttcttcaagtcgtgcaggacgcctggcatccccctgccaacctaccccctcttgccgctcttgcctggtgcttctctaccacggccaagcgcttacagagctggagtgaccgtcacattggcagtgttcgtctacagcttcagatggcgaaggaacttgtcttccggcttgatgttgcgcaggagagtcggtctctttcctccttggagacctggctgcggcgagatttaaagttgaagtgtcttggtcttgcctcgcttgagcgtactatcgcgcgtcagcgttcgcgtttggtctggcttaaggagggtgacgccaataccaagttcttccacctgcacgccagagctcgtaggcggaagaacttcatcacacgcctttgtgatggtgaccagcttgccgtctcccatgatgcgctgcaagagcttgcctcctctcacttttgcgccatcttggggacgagcgtcgagcgtgaactcgccctagacctccactctcttggcctccgccctgcgcagcttgaggggctggactgtcccttcacagaggatgaggtctgggcggtgatcaagtccttgccctctgataaggcgcccggtcctgacgattttacgggccgtttctacaagtcttgctggccggtgatcaaggtcgaaattctggcggctcttaactccttgttcctgaccaacggccaaggtttcgcttccctcaacgacgccctaatctccctcttgccgaagaaggacgaggctgttgacgttaaggatttcaggccgattagccttattcacagctttgggaagctgttctccaagatcttggcctctcgtctctcccctcgcctggacgagcttgtggcgcctaatcagagcgctttcatcaagggccgctctctccatgacaacttccgctatgtccagcttgcggcaagggcgctccacgccaaacgcgttccccgacttcttctcaaggtggatatcgcgaaggcctttgacacggtcagctggcctttcttgcttgaggtgctagcccagcttggcttcagtcaacgttggcgtgattggatctccctcattctcagtgcctcctcttcccgggtgctggttaatggggtgccaggtccacggttcccccatcggagaggtcttcgccaaggagatcctctttcccccatgcttttcattctagtcatggatgtgctcaatgcgatgctccgcaaagccctgactcgggtggttttcttcccctcaatgatcatgct

SEQ ID NO: 1123 - DNA, 1175 bp, Oryza sativa
cggcctcgcgggtgtggaggcgaacaggcgtggcggccatgtgcggcgagagaggggaagagcgccgggaggatgcaggacatgcggaggttcccactgaggtagcaaggcacgacgatggtaagcacgagccgtcaatgcgcattgcgaggcataggatgtcgcgtggacggataggcgtgccagtggcttcgtgctatgcaggaggagcccaatgatgttgttgagcatcgcgctgtcagagaagctcccatgtctaccgtacgtcaattaacatgtatccaatttgttttgatggagagagagtcgattgatgtagataaatatgcaatagcgaaagtaatgataatgaatgagcataaataccagttgtggccgaggaagccttgtactcggcctcctaggtcgacgaagccatctttgccaccgtcgtggtcaccagtcggtcgagcggcgagagtgcaccagattgaacgacgatgtacatatgtcgttcatttgaaaaaaaagtgttaactagagtaggcgcttacatgtggatcctacggtaaaccgcttcccaaaccacctatggagttgatcgatttgaaccagttttcaaaaattgaagaggtattatacccgtttttatggttgagggatgctattcaatcaaggatgagtttagggatgtaaatacacttattccatctgaaaaataccaagcgtggcattcttgctgcggatggactaatccgaattcagcgtagaccattttgggccaatcccgttccgagcccacgttagaaaccagcgtaactagacaggccgtgatgtcgtgggcccagaacaggattgccgcctacgtgctgaatgggcctacgcatttagggcccataattgagtatgcgcaaaatggggaataagttcactctgggtctctctatttgtcgcccagtccgattttcgtcccttgatcacaaaaccggatacaacgggtcccccaacttacaaaaccgtgtaaaagagatctctcggcagtattgtgcctggttttagatgacgtagcgcctacgtggctccctttaactaggtcgtcgacccacgggcatttacgtagcgcttacttggcatttggatcccgggaaaataataaaaaacagtgggacccacatgtcagctagggctgcaggaat

SEQ ID NO: 1124 - DNA, 1415 bp, Oryza sativa
gaacgggtatttgaatttcagaaatgtgtttagccacaagctagtactccattccaaaatagacttattcagatttatcgtagtaatattatatatcacatcccatattaaatttctttattttggaacggatggagtacgtgcttaagtcttagtactagtttggatgaactttcatatgagtaaatgggtaatagctcgaagtacagaataagttaatgtgatgcagtgttctctcacgctatattcaatgaaaagtcacaattatgcgctattttcccttcaaaaaaatgtaatacaggtcccctagttcatagttcatacatatccatcaaaatcacttctgaataaaggaaatggaatacgatgtcaccattctgcttcggaacaaatcctttccttctgtttacagtaagtaagatgatgttgatgtatagtaggacaagtgtaggaaatgtggactctggtcaatgttgagatgcgttgagcagaagtaatcaagtttattgatgatgcagctgatgcaacgctgtacaattgggctaatggaattattaccaaatactaatgattcctttccagaaacaaaaaggtaatcaatctggttgaagccactggatgcagccaagagcccaacatggctgcagatccggccaccaaccaaccattgcaacagagcaagaactaaacaaagcaagaaaaagtcaaagtctaaaagctgacttggacttctgacttttccccattatttatttttgtcctacgtagtctttttctgttataaagaaatcacaactcgcaaacaattctttgcacctgactggttctgcgctttctgctgtttagtctacgattattcagagacgcagcatcaaatgataactaaacatctgaaacagaacacctgaaaagtcctgctctatcaatagaacttcgcaccgtctcgttaagaaaaagaacacctgaaaaggctgaagctgaatccagatttcagaatgcgataaggccctgaggaacacaaatgaaatcacgggttgccaagaaggcaacatacaattcacaaagctaagtacaaacaatcctaatgaaacacacgcgcggtccatcgtgatcggttgccgtgtctcgtgtgaagaagctcgcccagcaagaacctaagggacgggaaagcgaggcgctaaccgacattggcagttcggtcggtacaccgggcctcagccacgcacgggctttcaccggccggccggaagaggccgggtcttggcggggcggaagcagccgaagaaccagcccagcacgctcttcagcacgactcctctctgcggcacgtagcgcgggtgcgtcgccggtgccggtgctgcagcgccgcgagctttgccgccgaacgagctccgcattgtaagctggtgatgcct

SEQ ID NO: 1125 - DNA, 896 bp, Oryza sativa
attgctgagaattatgatacacgtgtcgaggatatcataaaagctatgagaaaggacactgatgtgaagttcacctttgttgtggatggaaagaaaatgattgtcccagtaactccagctcaaaatttaactgatgttaatggaatatacatcatagaaattacagatggtaacttgaggctctgtttagtagctgataagtatcagaattggttcagaggatttattactgataaagggaacagatttgagattgatcacgacactcttccaaacataatgaagaactctcagtcacttcataccaacgggatgtatcctagtttacttggatgcgaagtgtcagagctgaagattgggtaccatcaacttcttgcagcattccatactttggctagatatggtgagggtaggagagatctgaagaaagctaaagaagcggtcgccattttccttatcctgctctttgaaggccctcggcttctacctgtggaacaaaaaatgatgaattcgttgacccaaaatctggtggcagtggttggaactgataaggagttgataaacaattggtgtggcatgagcaggaacttctatgatgagaacggttatgagatggaggtgattatctcagaagaaacctcagagatagtgaagaatgctgtgaaaacttttgggatcatgtgccggtcaaggtgggatgaatgggtgggtgagcagactgaagctgcgcatggacgacaagctcggaaacaatcaagaggccagggcagcagcagcagcagcagcaagaagcattgaggagtctggatgctattcttgagtcaaaacaactaatcagggtgctaggaaattccagtgctcactcacatacatgctctgaaattttgaatgttact

SEQ ID NO: 1126 - DNA, 1823 bp, Oryza sativa
tcatctggactcacctagagtatggatcatctcccctgtccatgcatgcatgcatgctgcaagaaaatgcatatacaaacattcagaaaattatatttgatattgatattcatttgcctcccatctccctctccaacagtgccatctctgatcacacccacactgtgaagtgaagtcagtcatctccaagagaagcaaaagcaaatgcaaagccttcacctctcacctcacatccattgctgcatggaccatggcaccaatgcaccatgcacatctccagcatctccatctccatgagtccatgtgcattcaagcttagcagcagcagcagcagcagctgtatgtgtgggtgtggccatggtgctttctttgcattgcattgcattgcaatgcatgcactgtttgctgcagctgctgcagctgcagtgactagtctagctctctccatctctttctttctctgcttctttgtttctttctctgtctataaatacagaggcctctcctttccacccagcccttttcctctcctcctcccgtcttttccaccaccaccaccctcgcgtgccctaatttctcgtgctccttgtcccccacctcctttacttgagcttgctcaccactgcctccatatacagagagtcttctctgtatttctctctctcagtgggaggctcacaagaatctttcagctcacatctcactgtccttgcctttctctagctaggtactactactgctagtactaaccactgctcgtgttcttgggacttcttcttcttcttgttcttgttcttaaaatcatttggggttttgagctccagggaggtccaagaacagagcagcaggatggtgcagtggcgtttctgtaagtgaatcctactaccttcagtttcttgagcagtttcagtagtgtagagcttatgatgtaatgcagcaggtgccatgtgtgttgtgctctgaagaaagctgttctgtgggttgctttgttactatgttttttgtgttcatgtttcttggtctgtatggctctacatgttgggtgtttttggtcagattttgtctctcctatatctgctagtctgtttttctgcaatagatctttctgttagatttcttgtcttgtagggaagttggtagaggatgtgctctcagggtaaggattgattgtcagtttgcttagttctttcttttgattcaccagttgggatttagttagtatggatagataatctgctaggttggggttaaatgttgcctctgatatggtgagtgaaactacttttgtggattttgtatggattgtggttagtgggtgaaatttgtgttcttgattgaaacatctacctagttcttgaatcttcaatggcagcattattgtactgattgttgtatggtccaataatgtatttagggggattctacttactgctagtctgctcccagatatgaagatttgattctgttttttttcctcttcaaatgtttcttttttataattagttgaaatatgctattatccagagtacttttgggggtttatggattgtttcctcctactcaagagaggtaaacaaagtaacttcttcagtacagattttccagagatgccatttcttcttcatcattcctcctttgattacttcatgattgtttttacctgcttctcagcccatatcccttggaacattcacttccatgaaaattaccacctaaggaaaaaaaaacaaaatggtcagtaattgagaacttgctatattagttacctgaaagatagtaacacccagcaacacagatccatgtttcagtatacttgtggtata

SEQ ID NO: 1127 - DNA, 2490 bp, Oryza sativa
aggaggaggagcgggcgctggcgccgctcgccgacgcgctcgaggcggcgctcgcgctgctccggctcggccgcgaggggagcaggatctccttggtatgtgcgcgcgtgtgggtttcttgattttgttcgattcgtggtcctggctgcctttttgggaggaactattattattattatggattggtgatttgatattatgacctgttcttaggtaaaaataaagtgcagctttagttattaagtttattattgactttagtctcctaaaaaaaattaagattcttggatgcaaaaatatgattctgattcgtctactgtgtatccgtgcttaatttttgcttttataaatcgtgtggactaatattaatatatattgatgtgcagttgtttgaaacacaaaacaaattgtaggggtcgtgattgttaagtgagttttcttttgttttagcataggggctttaggatgatttagttgctgttgcttattaatcgcaaaaaagagagagagaaaggtttccataattttattctgcagctgtgttgtatttgttcagctagatttcttgttgagctgagattgcttcttgttcaatgcgaccaatatatgttcttcttttgtggtgcaattttggtagggtccataagttgtggtctttgggggcgtctgtaacttggttatttcagatcaaactccttgctatttttttttgtggatctactgcgaaacttgtcatctgtaaatgatccatgcattctcatttctcagggcatccatgagtttgtcatagatttgctgtagaataaatgcttggacggattcctccatcggtttctttacttgttgaaacattcaagaatctacttgcccttgccctacatccttcatggttgtactccacatgttattccccatggtaaaagcacggtttgttgtgtggattagttgggagaggcaacggatagacatatgatcatgtctttctccatggtaaaagcaagatttgttgtggattagttgggacaaccatatgatcatgtctttcactttcttgtgtgttgtttgtagtggatattgtctatagctttgaattgttcttttgaggagaggtatgatcttccagtcctgagcaattcaactgctccttttggatcataaatttcacctcttgaatcattatctagccagtttttctgcctaccagtatggtacatcaaatctgaccgattggagtactatgttcttttgtcaagtataactgtattattatctgtatggtatatctaatcataacagacattttcatttttctattttcactgggacaaagaacttgtactaattgtttgctttactttggtcaaatctggttgactgtatctgttgtaactatcaaggcctcaaacccttcatcgagtccgtgttatcaatgggatgctttatgagtgctatgacataatattggtaatcaatagtctttgaacattattttatatcttgatcgctcatacaacaatgatgactatcttgatcgctcatgcactatttttccggattaagaactaacttctggctgggtagttgttgaaattgttcaggagttgaataggccacgtgctttgtcagaaaattaaatagcagcaagtaaaaggttttctggaagctttcatgttaaattctttttataaactagcaaatgaaatggtctgagaagcatattttcattttggaagtgcaatattgcttagtagagagtaatcaaattgggttctatacctaccacttaatgctcgctgagtacattgacccaaaaatattatttctgagcacaataggtttcattaaacttttatactgaaatacaataagttgccgcaaccagagcagatcaacaaaatttgtcattagagaacttcagatgatcgacatcataactatattgtttgtaggctcaaacattaaggtccccaccagtggatttctgcacccgttgaaagtgtttttcttttttggcctgttggaatgcccatgtacctgatgataggactacctctatgactcaccgactatatcttttacggctgtgcatagggaagggatgaacctacaagttagaaatatggtagtcattgtctagttttctttatgtgactatcaaactcatgtattgattcaacgttttccttcttcaactccattttgatgttattgaaagtgcttgctcattttattcccaagctcagaagcaagggattttcttgattatattggtgtagtttaaatttcaggttggttttcttgctctttgcttcagtacttgaaccacaggcctctgactgtccatcctgtagcttgtaatgtttttatatggtgctcttaatgttggtgttactctatctcttttttcccctgctttacctgtattcttattgacctttgattaccattttgttcttattataaatcattttttataaacatgcttttcga

SEQ ID NO: 1128 - DNA, 2990 bp, Oryza sativa
tttcaaggcgagttatgaaattagttttttcatttgtgtccgaaaaccccttccgacatctagtcaaacatccgatgtgatacccaaaaattttctttccgcaaactaaacagggccttatagcgatattgatggatggaaaagagataaaatgggcagagaacataagaaaaatcttgatgaaacaactataaatatatatttaaggtacaatgcttttttttttttgctgaaattgtatctctctcctcccatcgactttaggtaaaaaagagtcatccacatatgactaaaaggagcgcattatagggtttattagtgttttcttttacttacatggaggatctgaagtcatcataatcataccctctctacttctctagagatggaccaatacatatattaattatcttttaagtatattgtcaaaataaaagaaaaaattacaattgaaaaagtacgactccctctgaattgataatacttttgtttcgaggaaaaaataactttgcccactattttttaataatatatatatagaaatatcaataaatatatgatttaattgaagtaccttttcaggctaatttaggttttcattatttgtaaaacaaatagtttaaatgttattcataatcaaagtttttgaagtttaaccatggttttatccaaaatgacaagtattatcaacctgaaaataatatttaccaactagatttattttagcaatatttaccacttgtgtcgtcaggttttcttcttcttcttctcgcctgcatacatttgtcggagggtgaactcctccaccagagaaccgtgagacccccttttttggttcggccgggggcagcgggtgagattcgatattcctgtgtagatgtgtgaagatggggttgaacccccaaaaaagatctcacccaaggggtttatacaggttcgggccgctcagaagtgtaataccctactcctgtgcttggttgattgagtgtagaacacaagtgcttgaggttgcgagacaagcatgagttcgctaagaagttcctctccctctaccactaggcctggacctcctttcatacctcaaggggttaccacatgggtccaaaaacataacttagtggagaaggattacaatctttgcattaaatgcctgtcttgtctcttaacttgggaagcaagcgcacgtcaccttgatgacgaggcttgtcaaatcttgccgcctgacacggggggtgctcctgtcagtcgccatttaagggacgaagacttctgggctcctgtttgaccagagcggataaaccgactccggctacgatgagagactaaaaagcctaagacttatgggctcctgtttgaccagagcggataaaccgactccggctatgatgagagactaaaaagcctctcattatgatgtgatgggacagagcacgccgcacgccgcctggcatactcacaaggcgggggtactcagccgccgttgcatcggccattcgaccggtcacggactggtcacagatcggttgagtgcactgcagatcgcattaaatgtggcgtgacgcaattgctcaggtcgccataaatgcgggtaggtgggcgcctggaggcggccacctaacccaccgcacgtggtgaccaagagagggggtcgaggggagcccgacccctagtcacaggaaggggcggccaccgtcctaccttgggcccgatccctcctcggggagggccacgtggcgcctgggggtagcctcctccctccagtcttgatcgggatgggcccgacccccaagcgaggagggggcaaccgccactccacctcgggtgctgccccctcggggaagtgtcacgtgggtctgggggcagcctcctccctccaaactcggtatcctaagctaagctgggagggggcggccactgctccacccgggcgccacccttctcggaggcgccatgtgagtttgggggtggcctcctccctccaaacatgatacctccgggcccacatcaccgacagcattaattaggactatgccgtgtccggtacaatctttgttactcatgctgtgtccggctctcttctagcgacgcttcaggtggatctgtccaatccgagacatggacacgcgagacatggacacgctatgtttgaattcacgtgcacgcacaaattctcactatttaccaactagataataccaataatgtgttttgaacacacaacaaactaaacagcctctcaaaaaaaaaccacaaaacaatcactacgcatcacctatattccatccagccctacataaaccattaatttattgtttcaaaccacacgtaattgatacacattaccatcactatcaaccactcctatagagagaaaaaaactctacaataacaattactacctccgtattttaatgtatgacgccgttgactttttatccaacgtttgatcattcgtcttatttaaaaaatttatgtaattatcatttattttattatgagttgattcgtcatcaaatgttcttcaagcatgacataaatatttttatatttacacaaaatttttaaataaaacgaatggtcaaacgttgataaaaagtcaacaacgtcatccattaaaatatggtgggagggagtatgatttaacctaattctccacaccacatgacacggtaataatcccggttggtaggtagccggtggtgcagctacaccgaagaatgtagacggaaatctgccgtggaagacaggcaaaaaaaaaaaaaaaaaaaaaaaacgaagacccattcaacccaacgtacccaagacgctgacctgatcagcgatccatcaccaaaataacactccgcccctccatttccccactatttaccattctgccactagccgaggtctcctcctcctcttcttcttcccgctgcttcgcctcgcgctcgccatggccggcgaccgagcggaggaggaggagggggaggcgccgcctccggaggcgc

SEQ ID NO: 1129 - DNA, 580 bp, Oryza sativa
acatcggaactcgtcaggaatggttataggccttgaatccccatttgaatccaataccctggaagccataggaggccccatgtcagggttctgtgtttgcacaaaatccttaatcttcttcagtagcattgacattctctcaatgtgttctcctgggtcctgaccaccgccggatgcgaccatctcatgtaaggcgagtgattcttgcgtgagatcggtgattgtcatcaagtgtagcttttctgacaatcttccaagaatagccagttctgcacttgggtcatagttcttgtcatatacagatagtagatcattgtagaattcatcgtcaggcatatcaatccgttcttttgctcttttgagctgtgcgtgcactaactcaacctggacaggatttggataattatctccaatgctggatttaagtgcttaatgataatagcaagaggaattcttttcagtgtgctgtcatcgttacctgctctctaacttcatctgatatatccaattcattgtacggaatgtcgcacagagcttgttccagctgcaaaattactccctgaaactttttcattacgct

SEQ ID NO: 1130 - DNA, 2336 bp, Oryza sativa
gagggggttggcaaggcagcagagtctggtgaggctgcccatggctgcagctgtggctccagctgcaaatgcaatccctgcaactgctaaaggagatggtgatctgcatcagcatgctgatgatatgtacaagtaaataaagaagccatttgatgcaatggctcctgtgtgtgtgtgtgtgcgacagtgtgagtcagcttgtgttcttcatcctgatgtactaatgtggcctgtgaatattgtgaggtgtctcctgctttactctcttgtcagaatgtaattagaggctatatatcatggccttgtgattggagcacctgaagtttttacagacaacattatgtttgtgtaatataatatggtttacttgtgcatgtatatggcatgttctttcagttccatttactgatgcagtcaaccatattgtctcaccgttcctgcttataacccgaaaattgactaacggtgcacttaccaaaaagtagtatacaagtttaagtaggcaaaatgaatgacaagattatgcgcagaataaaatctgattgaacatttggactgtttgaaactcataaagataaagataaaaatggagaatgtaaaatgaggtagatattagcacatgattaattaaattttaattattacaaacttgacaaatagatatatttgatattttaaagcaacatatatataaaaagttttcgcacgaaacacaccgtttagtagtttgaaaaacgtgctaatgaaaatcaaggtaaaatcttaatcttcatgagaaaagagcactagtgtatacacgtcactgctctcatgctagaatagataaatttcagaggaattcaaagatttgaatttttttttttttggaaaagagaaaagagttgaaaatttaagcgatgttccaagtaaccataaatagccaatgaaagctgctgaggtaacctgaagcggctgagccggccggagctggagaagcagaggttcatgccggcgatgctccggcacggcgaggagcgccgccgccgtgaaaaactgaaagcccaatattagctgggcccaaacgtgatcccccacgaacatatcggcccacaacttattgagccgcgaacgggatgggccggaatgtgatgggccgcaaggtattgggccggtacggtcacctgaaacgtgttgggccgtgggccgtggccgtacctcccgccggagataagctgccgccggcgacggccaccgtggttaaccacgcactgcaacgtctcaacctttagtagtacaagaatcaagatgtgcaatagatttcccctttttttttcctcaaagaaaaggatgtgatgatacgccattgccagagccttcagatttctacatttttgtcacaatctccataggagatcccgtcgttcatagggattccaaggggaaaaaaaaaaggaagaaacaattatggttggattatctgtttgaaacatcctgaagtgttctaatccacctatcagattggaacacattagcattgtagtgtactacagttgcttcaccactcctacaaatagggaggccattcttgaggagcaaatgcacctctttcatcaacctcatttttcctcttgcgtacaagttcttgagaggtgaagagtgaagagtcccaaggtagaagaagaagaagatgtcttgctgcggtggaagctgctcctgcggttcctgcggctgcgttggctgctgcgggtactaccgattactcatcgtctctgagggcctcacttatcagcttaaatttaaatttacaatcttaaattggctgattttaaggttttcctttcgaagtttatttttcagcctttgtttttaaatcactaagaacacgaatataaaagttttattcacaaattacttttcgtttataaatatgcacgaataagccaaacggatggggcaattctttggccttacatgcttgatcaaacttaatggtgaaaatttactggaagaaaagctacataaaagatgcaacaatagtactatgagttttcagttattggtctactgaaagctgaaaccttttctgctacttttgccccggacacagaatgatgtaccgtgacatgccagagaacaacaccaccagcaacccaggagcaatggtccttggtgtttcacctgacaaggggtataaatttcagattacaacaaaatatactacaaatatcaggtgcattcatgtgtaatttgaaactgatttgtgtttttcgcaggcgcgtcgaagtgtctgagaaggctgaagaatccggtgagaccgggcatggctgcggctgtggctctggctgcaagtgcaaccc

SEQ ID NO: 1131 - DNA, 15585 bp, Oryza sativa
ctaagttctccaaactgtgaaaatgctgatagaatcatgtagaaccttactaagtgtattactacttccttcattgtgctttcggtacgcaatcgccttcggcatttgcaaccgctggttcagggcaaggaagttgaacaggccttcaaggcagcctgggctctgtgtatcgaaccgcttgctctccgccatcattccagacaaacctgacgacaatgtataggtaaattaagtccttgaaccctgcagctagtctgaacctgagaatattattgggcattccagcccattacacataagaagttatgagactagagattatgtcaataaccgtaaatgctctaaaacgcgtctaatagggtgtatattaggttgcatacaaggaacaggcggctgttaccaacttacagtataattgatgactacaccgtatgctcactaccatcagggtgattagtgaatactgaataatgcttatcgatttttagaaccatgatatccattatttactgatttttagaaccatgatatccattatgtttccaagacttagatgcatgaattcaaatgtcaatctttaagtttctcaaaaataaaaatgttaacctttagttttaacatagcaaggcaatatatattccatggaaatcatgcagcacagcatgcaccaatatacattttctcctggaacaaaagcagtgaatcttggggtttcatcttagattatagatatacatttattatgagtaatttgtggggaaagaataattctgcagcttccaatatcacccaagcgttgatccatccataaaccagattctaaactttcaaggatgagacaccacaggaccaaatgcaatcgaaacatcacacaatccctaaccggttagcactaaagattcaaggccagaaatcacatggcaagaacaagaacaaagatttgggcccctattacaccaagaaaaaaaagggagggagagccacaggaacagatcgtaccaggggagagagaaagattgctctcttcttggaatgcgcaggggaacaaaaggggaaatggagctcctcctcccctcctcctccatgagctaatgcctctctctctctctctctctctctctctctcgtttctctctcctccctctcgtgaaacggactaaactgcgagtgcgaggagagacgaagagagaaatccgctcctcctctctctctcttcctctatctgtctgtgttctatctctctgggccgattgggccacatgttttgggccagaatctgaaaaatgctactctctatgtcccatataacaacctcctactggattcttaataccgggatatattttatccaatactttctccgtttcacaatgcaaatcattctagtattttccacattcatattgatgttaatgaatatacatagatatatatgtctagattcattaacatcaataaaaatatggaaaatgttagaatgacttacattataaaatggagggagtactatattcagtggcggatctagaaatttttttagcctggacaaacctaacaatggataacaaattaacaagaaaacacaaatacctataacattttatcatggatagaagtaaaattgggctgctgtctaatgactaagtatgataattaataccaatctaatgatgcatgtgcagctaggctaatggctaagcaccatatttagttctaatgcatggatgtatgcagcatagccggggcgcttgcccatactggctgggccttggctccgccgctgattatattatattttagaacagaggaagtataattgtttctaaatgtaaacaattgtatcaatgcacataaatcccttccaataaagtttgggtaaaaaagctccaatctctttgtcatgccttcacaagcattttacaaatctaagacttcaggtatgataatacatacttactctattccaaaatataagtattattagactctgacacggttttccgagatgctactttgaccaacaatatctataaaagtaaaatgttttcaataaaaagagtatatattatgatagtttgtttaatgataaatctagtaacatcaattttacatgagtgatctttttttttatttttcctactaatactcaaagttgaaaatgtttgacttgtcattatgctaaaaatatttgtattttaggacggagggagtattagagttccaacgatggattatgaatgaaactgagtttatgacaattactcgaggacacaaaaacgaacgatgtaagtattagaaagttaaaagatcgatttaagaaagttttctaaaaaaaaataccaatgacaaaagcttttttttcccttttgagaaaactgtactatttaaagcatagggataatcgtgtccgcgataatccataattcgtaagagaaaattaaggattttttctttcccaaaattatcatcaccatacatgtagaactgcctcatctttctgcatcaattctttgtgttgtatgctgtaaccaacttaaccattaatttagaacaaccaatttaaccatggagcatcctttagacctttagccttgcccataacaaaatttgacatgttacatcggatttacggacacacatttaaaatattaaacgtagactagtaacaaaacaaattacagatccacctgtaaactgcgagacgaatttattaggcctaattaatccgttattagcaaatgtttactgtagcattatattatcaaatcatagagcaattaggctcaagagattcgtatcacaatttacatgcaatctgtgtaattagtttttttatctatatttaatacttcatgcatgtgtcaaatattcgatgtgacaggatgaaaagttttggtttggaaactaaacagtgccttagcttctctctctcaaaaaaagaagaaaaatggaaaaaagagaagaaacatctttcggtttcttcagatactacttgcgtttcttcagtcatcagctcgccgccggctatgaagaagacagcagcaacaacgccgccgccgccgccgacgacgacgactccatcctcccatggcgaccgaagctgaacgggtgatcctccatctccgcatcgttcacccgcttcgccccgcggcggcgcgtcaggaacggctcggactccaccgcggccgccggctcgccgtcgccgccgctgcccttcttcgcgggccagcgccagaattcaggcctgctcacccgcagctcgtcgcaggcgaagatggattccggcgaactcgtcgtcgtcgtcttcggatcctcttcacgtgccacgaggaacagcgctgcttccgaggcaggtccaggattcgattcccagctcgtctcgtcgccgtcgggctcctccgtgctcacgagctcgtagcgtgagccgctcctcacagctccgccgccgccgccggcgacctcctccgccgtgatcctgatcaagaaacacggtgatcgaggtagtagaaaagattcagaaacgagcaaagctaagctagctatcactcacagctccgccgcgccgccggtgagcgccagccacgccgcgtgcagccaccggccgccgccgccgcgccttgcagcagcagcagagctcatccttgactgaatcagcagagcaagtagagatcgattcgattctgcttgatctgaatcgatgattaaactggaggcgatggagctagcgggattggactttgatgagatgatttgatttcatccatggcgtggcgcgcaagtggagtgcgggtgggaaagcacttcgttcgcgcgcgatttgagctgcacatttttaatatatatatttttttctagtggtcaaaagtctcgcagaattaggcagagacaaaaggaattaaactgaagttcagaacaaaattaggcaggaattaatctgatcttttcttaatttttctgtgtgcctatatgtttaattttattttcgttgaaaacataatctttgattctccatgagaattaagaaactttggtccacttgttatatccctgattatattagtagtaggttttttttttttggatattatccatgggccatagaacttggcaaagtgcaggaaaagtgaagtgaaaatagatgggttaggtcatggcacaatatgaaatgagagattgacctaactcgttagtgcattggactattggtacagtggccatagaacttgcagacattgacatttctcaaaataagaaatggccttttctttagtacttaataaatgagcttaagttcaaatcatcacaagtgataaagaaagatcatccttccatgtcagtccaggtagggcacccatataacagaaacatttacagttaagcttagggagaattaatttgcatatgcattttacaactctgccattacatgggctccacctaataggcccaggccaaggtgggcccaatttcttgtaaatctgtgtgggccacattgtgtggcccagaaatgctgcgatgtctgctcttggccagtgatgtcctcaaaattttctgcagctttccttggaaaccaccagctgcagctttcttattcagaggcctctgtgatcatgcaggccacagttatcttggcagaaatgccaggatcagtacagtggttctgattctcgaagggacatgaaacaatattatgattggtggattgcatgatagtagtgactagtgagtattagtctttcatatcctaatcacatttcacaaatttgatcagtttgtgtcaattttgcgttttctccctgttctgatatgagttatgtgttgcattttttcccttatgttatactgtacagtgtacattgaaccaggatactgcatgagtacaaagtacacactatgctcgattataactaatcgagaaaagtaaaaaaaaatagataccgtgtagcttcagcaattcagaaatggaagataaaaaaaagaagaagaggagaacatgtttgagcttcttcaggtacttttcttttcttcagacttctatcagcagctagcagggtttctcttaccgcgcggttaccgggcttaccgcgggggtacggtaatataaatatcgcggtaacctccttaaatttaaatacatttaaaaaataatttaaatttttgataaattttacacgattttgtatggtttttcagggttaccgcggttaccgcgcggtaaccgtgcttaccgccggggcacggtaacccccaccccggcggtttgggaaaccctggcagctagctaccgtcgactgacgatcaaatcgaagctcatcgatggatgatttatccgtgacctgaatattctgatatttcctccgcctccatgaattcagacgcgctgttgctgttcatcaaattcacaaggccagctacagaatccagacaaggtggtaaccgtttctgttcatgaacagttcatcacttgtgagaaaagtcttcagtcgaatccaatccaccatcgtaattttggcccctacttcccttaaaagaactctgcaaattgcaataaggaaaaagggagaaaagtgcattggatttggtcaggttgtactaatggctagtactgtactagtatacgcgtatgcattggtatggttggcaatttgagtttgccaaaagtttatagcctgagagtttgccttcttctttactgtcgccgtgtttagttccaaaataattcttcaaacttctaacattttcatcacattaaaacttttctacacacacaaatttttaacttttccgtcacatcgtttcaatttcaaccaaactttcaattttgatgtgaactaaacacagccacagggattgctgctcgtgtactaattctttctgtgtctcttttcctaatatgaaatagcagagctcctgcctgcttcctctaaacaaaattctatttctacgattttctttgttcctatatttttataatcctgagtttcgaagaaatccttggctgataatcctattaattaagcactaaactatcacaaatgaacataattttactgaactttttccatgttttatgatgtactagtacaacgtatatatatactatactagtagctagcacacgtgcatgtgagtacaaagtacgtactatactcggttgtcggtgtgattaattcagagttgagcatgcatgccccactgaacgtgaagatctctgtccagatccttcacttggaatttactattcagcaccctagaaatgttaaatgtatatcgcccagaggctgagataatcaccaagaatagtacaacactggccactcgatcggccaagcttcagaaatcagtatatttttcatgtgaggaatatctgaatcgtaccatgcatcgatccatccaaagctaaaactttcaaatttggacttgagttgtctaattaacgtgtgaaggtgtattgtccaattaactttaaaccctgttattttcggctatttaatttgccggccgattattgttgtggattagttatttgcatactcaatgtctaaaaatatatttactcagaatgtttaacttgttctaagctatttgttaagtttatttttcaaatatttaatttcttcctggataatatgctataataatcagtgtattttttttcaaattatatactcatgcatgtgtaacaaaattattttctacaacagtattttcttttttaaaaaaggcaaacatatactgtggcctctatccaaaacggtggtagtagtaattaatacggtgtgtgcaaataatatactccctccgtcctaaattataagagattttaaacggatgggacacttcctagaatagtccagattcatcgtactagaaaatatcccatctgtccaaaatcccttacattttaggacggagggagtactattttcgccgtttctccatctaaccaacatatggatatataatccatgtactcccaccgtcccattataattgcagccataagtttctgtgtccaacgttcttatttgaaaaatttatgcataaaacactattcatattttatcatctaataacagtaaaaatgctaatcataaaatatttcaaataaaacagatggttaaatttggaccctgaaaccgacagatacgcttattatgggaccatctatttaaaacccaaaacattttacagtctgaaatttcagagatgtcactgacagagactgacagtcatctgcatgcataggatgcacttatggaatttacatgcgcgcatgcatgcatattgtcggcgacgtggtacgaaaactgtgcgttgccgttacgttggagacgacgacgcgaaagatacgcgtcgatcacgccctcgctccacgacgagcgatctcgatccgtccatcgatcggacggccacgcatgcacgctagctagcccatatatgtgcagcaactacgacaagtacttaacgtacaagacaaagacaggaaggatccaatgcattattgcattgcatggcgacatgtacatatactaggcactagcttatagcttcatgcatgcatgctttttgcttttgaatttcctctcttccatggcatgcatgtgtgtgtgtgtgtgtgtgtgtgtgtgtatatatatatatatatatatatgcatgtattacaggtcacactcatgcccctgacaaagttccttttttttgtgtgtagtagtgtgttttggagatggattttattaatcatacacctccatgttaattacctcctttcgtgttttacatgccattttaatagacataaaaaaaacttaacaacatagattaatataaaatatatctcgactattataaaaattgaagatgtttttgccggtattttggtacgtcatatgtgtatgagtcggtttttaacttcgtttgcttttggaaatatatatccgtatttgagtcaatgtttaacttcgtttgcttttgaaaatataggcgaatttccacagtgtatttcaccttaacgaaattaccgtataataacaataagattaaaataacgtttacccattgcaaagcacgggcattttttctagtcacttaaaaaaatgcaaggtggaattcgacttctataaagtattaaaaaaataaactgaaaatagttaacatgcacttatatttgtatttttataacttgtggaaattaaatttgagtgatatattttatattaatatatcatattaattgtttttaaattatttaagttattttataactagtaagaatcgagaggatatcccctccagtaaagaaaacactttcccatgtgttttgtagctagcgtggcatgcaatgcatatataggatcagctcggctgggttagatctagatgacatgcatgtatatatatatatatatgccaagtgaattttactagctagctttgttcaatgaaatggtagtagcatgattgacattgagatcatcttgttactcggctgttttcttcaatgatatgagaatagagttagattccagacaagaggttcacaaattcagaatgcaattattccctcgattctcttttagtacttggcactgttgactagtgtgatttttttactatagtaaaaacttttaaattatgatgttttgatgaatgtatgcagtatatagttatatttagcatgaaaattactttgataatatgatatttttaagtatttgtatattgtcaacgggggatacccgtgcaccggataaatagggtattgggtatattggtacgaggatctacacgatacaacatcaagacaaatagagagagtacacagatattattatactggttcaagccccttataaggtaatagtactaatccagtttatatgatattgatatggataccacagagtacacagagaacagatgaatccggcgttaccggcgagatcctagtcgagatggttcgacgagattccccggcgagtaggcttcgcgtcctccggcttcgtaaactatggtgggtgtgttggcgctatgatttgatgatatgatccccttaaggggtgtgccttttataccgtgagttgccttagttttcaagtagaactcggagacaatgaaccatgcacgacatagaataaacccaaccctctccgagtaagactctgttaatcacagcccgtgaggatattttccataatatcttgtagatttccttatcgcatacggaaatatatcgtatacacgaaggtataccatatccgtatattccgttttataggatagaaggtatgtcttatccatagacatatattttattatttttttataaaaagacaagctgctagagtgtgttaaggaatagtatagtgacatgtaaataagaacagaatgtccttgtatgtgagaggggggggggcgtaaaattcaacaatcaaatgctggattctcttttgtaaatttgaatcaagtttatcaaaatttagaatttcttaaaaatatttcaatccttaaagtcctaaaggcaagtgactttgtataaagtaattttgcaacggcacatgtgcatatcttaactaatccctctcttacaaaaggagataaagatatagctagtacactccaatcttgcaaaaccaacatatagagagatatatatatatgtaatcatttaggccctaaaaggtaagtcactttgcacaaggtaatctacaagttgcaacccatatgtgcatcatatctcttaagttcctagtactcctaactaataattcctcttttttacaagagatagaaaagtaatccaaatatatccaaactctatatatccaagtcgatctccatatatttgtaaccgacttaacttcctccctctccctttataaaaccctaaccgccacgaccccttctccctcctcgccgatcgaatcttcgccgccgccgccgcggacctcgccgccggcgccaagcaaggtatggacacccgagtctgcggcgacgaccaagcggccgaagcggcgccggtgcgcggcggcggcgaggacgcagtcgtcgtcgtcgtctccggcgagggggcggcgtcggaagctggtgctgcctctactacggccgtcgccggcgatggcgtcgtcgaagcttctgcctctgtagacctcaccggcgagaggggacgacgccgcgatgatgaagcgcccaccacggcggcggcggtggcggaggaggaagcttctgccccgccggccgtcgtcgtcgccggcgccggcgacggcgacgacgacgacgaagacgggtacgtgacaccgacgtcgccgcgccaacggctgcagccgccgacggtgtgcccgccggcgccgaaggcggcgcgttcggcgccaacgcggctgcctgcgaggaggtttgagggagctctcgtgatggcggcgtcggcgtcgccgccggggcggaagagggttcaggcgaaccccgactccgagtccgacgaggtcgtcgtcgcgttcattcgcagcctgcggcagcggctgcttccaccggaggacgagaagaagaaccccatgtagactttttaaaaatattttggtttggtttgattaaaggtagattgttttttttttaaaaaaatgaatttagtttatctgaatttcaatttttttggggctaaattcagataaatttgaaactgttggcgggatgcccatcctagctgggacccagctagacctgaaatttccaaagtttgaaatttggatttgagattgtgaatctgtagctcgttgttagatccgaattgtgaatcctgacttctgagcagggtttgaaaattttcgttttgaaaatttacactgggggactcttgaaatttcggaatttttcggaaccaattcttggaaatctcagaatttttgggatcgagtttttttggatatttcaacaaatgttgaccaagtttgactatatttacaacaaaaatgaaaaacttgaaaatttcgggtgacagtgttgtgcagggaattttggaccgaaattgcaacactgatcattttgtaaattatttgaaattcaaaccaaatttgagtgaattttgagcaaattcaccaaaaatgactttttttaaaaaaaatcaggtgaaatagttttatgccaagagtcggaaatttcggaaatttcaaacactgatcctgagtaacggtgaaaaaatagctgccatagacttttcgaaaaagagcatctatgctggcacgtacattaaaaaccttacataaattttgcacgaaaagttaactaccgtatcaatgtggttaaattaagaaggattattgaactcactgatgaactcttgtatgccaaggtttttaaaatgagaatgtagtatcgtctgagacttcgtatttaattcaaattattactacgtgacttaattaagtcaattgtactagtgaaaagtgacatgagttgtacccaagatcctaagttcaaatatctatttaagtgattttcagccaaggtcctacgttcaaatatctgtaaaagcaaattttagattgtattgtttgagagaataaattcccaatttaaaaaggctgtatatacgtagagaccgagtaaaatatacccttctcaaaataattaaaaaaaagttaattgtactcaacatattggcttgatattgacatgaactacaactattacacattatgtaaacagaatgaactacaactataatccgatttggaaatcactttggagcacgcacgcttaattaacaaccgatttggaaatcacttgggattggagcacgcacgcttaattagcaatcgcggaatcactcgagacgatcaatcgatcatatcgatcgccgcgctctcgagttgatcaagctcgctctcgactcgacgtcgttcatggacaatctcgccgcgctcgcagcagcagcccgcgcgccgccggccgttccgccgccgcggcgcgacatcgacgccagcttcgcgctgagccgccgcgcagctcccggtcccgggtacgcgcgcgcgctgcgccaccatgggcatgggcacggcgccatggcgagccagatggggcgggaggtcgtggagcaggcggcggagcggctggtcgacgccgggatgatccagttcaccgcgctgccggagccacgggcgccaccgccggcggcggcggcggcgacggcgagggggcggtggcggtgccgcgtgtgccaggtggagtgcggcggggtggtggggttccgggagcactgcatgtcggacgaacactacgccggcctccagctcttcgccctccactcccacctcttcactgaccaccccaacctctagaccgacctggctgtgagcacaatttctttttaaaacttagattcatgtttgaagctcaaattcaaacaaattttacgacagtttattagacagagagctgattcagttagtgtgtcttatgaatcctatatatttatatagttcatccccactaagtgtagttaatgctatttctctcttctttcattaaaccatatcaactcaattattttagtctttagatgacagatctatggttcaaattatctcttctttcttctctcttaaaaacatgcaatctcaattatttttaggctcaaaactatatcaaattgttttagttttgataatcaaattacatattatttctacatattacgcaacttaattttctgcagcaacgcggcgaggtatttatctagttaatcatattttcccccattttccctagcttgtaataataggagtaagttatacttttactagtacaaatcaagattgactcaacccagaagtactaactaatttgagggtctgcacttctttcgcttcaagtactgtttacatccaaattcagtttattgatctagctgattaagaataatttacatccaaattcaagataaaattaaagcacttgaacacacccttatctattacctaccgccaacgacgtcaaacaatgtcgagacaacaatccgtgaaggtgactgctcactgtcatgaactgcatgactcatgcaaatttaggacgacaagttcagaccatcggattcttctccattgtcctgtcccttggagaaagaaaagaaaaaagatccataggattctgatctgcagattattgactctacacgaacaggggctttggtcgcttctgcctgatacatatacactcttttatatgctgtcctttttctgtcatgaaatcggcctaacctcgttcgcgacgtgcgattttattttaaaaaaagaactatttcaacctgtttgtttttaaatttagaaatgaaccacattaaaatttatttttagatctaaatctttttgccacaccagactatgtgcatcacggcggcatacatttttcaataggctctcaatcctctctctcttttttcttttttctttcttttttttttttgcataatctcaaattggtcctccggcccggagcgagctcctctgtccctccgactttacgttagaggagtctcgtccctctagcccttcctacctggtatcccgtttagggctggataacaagccagctcggctcgttaatgttaacgagctaaaagactagctcggctcagctcacaagctggttcattaagcttgttaggctcgttaacaaactatatctcattaatattatattaataattttaaatttaacattttattatgtattaacataataataaaaactaactaatataatactcactacatatgaatagttttgatgtaattaaaagacttagtactagtcaagaaacatgaacatatgatgatattttatactaacgagctaaatgagcagctcgcgagctagaaggttagctcgactcgactcattaagactgcgagttcgaatcgatccgagccaagcttgctacgagccgatccgagccgcgagtttcgagttttttgtccacccctaatcccgttggttctttaaatttattgtacaaaccctttctcttttaataaacatggaatgatttatcatcttagctagtcaaaagttttgttgtaaattcgatgttaaatatgtagttttatggtacaccacctaaaatctgtagttttgtaattgtttggtcaaagtatatttagttacctaaaatttactaaatttctctcgatcttagtcaaattatatgggacattggatcctgccaatacattcgtgctagctatcggttgctatccatcttttagccttttcactagcatgatcaattactcccttgctacgttatttttgtctagtttcttttttcagtttgtgtgcataaacctttttatgtggattaaagtactacaactttattttttctagagtactaataaaattacattgtaaggtttaaaatgtacatcgtaagatttggaacttataatgtaaatgtataaatctttacagtgtgaaatatgaattttaatgtaaataatttttttaaattaccatttttattaaaaaaaatggcgctacaaataaatatagtactagtactctcatttgacgcttggtgcgctccaatactaagtgagaagtcggagtacgtatcgaatcgtatggatgggccggaatttcgctaggcctatctaaacgaggcctactaacatgatggccctattattccacggcccataaaccactaattagccccctgcagggcccactttgtttttcttagtatccttatttatgtgattatcttggtaatttgtctgctccatttgaccttgacttttgactgattcatggtaatctgcagataattaagagtaagtcctcttaaaatcagatactacaattgaataattcataccgtcattaatttatctgctatagctaaagtcttcagctgatcgtcctttatcttcggtcctaatcttcttcttttttcttagggttagtcctaatcttcttgagcatgcacagtaattaacaatttgtacagaaaccactttgtggcagccccccccccccccccctttcccactaagaatttgagatcgtgctaaataaaaaaaagagtgaagtgcaccagcggtccctaaacttgtacgggtatgtcatctaggtccctgaactctcaaaattcatttttaggtccctaaacttgtcttgggtgtcatatagatccaaatgggctccgagccgctccatccgctgacgtggcatgccacggtggcatatacgtgtcgatggagccatatgtgggtcccacatgtcggtatctctctctcctccttattctttcctctcccttctcgattcctcctctcctttgctgggctttcttgttcccctctcacatgtgcgcgcgccggagagggagaaggctggcgcgcgacggcgcgggtggcggccgggcgatgtcggcgcagcacagcggcgcgggagaggcggcggtggggatggaaagggaggcgcggcgaccggggcgacgtcggcgcagcgcaacggcgcggccgaggcgatggttgcgcggcggcgcacacgcgggtcgaagcggggcgctgcgttacacggccccgtcgg

SEQ ID NO: 1132 - DNA, 1015 bp, Oryza sativa
attgaaaacagaacaatgtgatttttgtagaaaaacatgataacagaggtttttctttgagtacattttcattctcgaattttaatgatgcttcttttccaattgctggcagattctacattttctttaaaccatatagctgctgaagttctaataaccaatgaacccctttttcttaattatcagttgcattctagcagcagaagtttatttgctgtatatttcaaattatgtgattaatattgaaaagagatggttcattgtatttgtgtctgtatgagagaaccaaatgaaaccttctgtccgtagtttgttctatacttctatatttgagcacagattacatagtgaactcttcttatgacttaacactagtgtctttcactggaggcctggacacagtttgttgtttggtttactggtcaagctttagacacattgggtattttcctgtcaatgtctctccagcattataatttaaaatactatgcttatttttgttatgtactctggtagatgcaaatgaccagtatttaactggcaggtaactcattaagttatttcacaggaagagcaacagtgtatggcatggaaaagacttttggcatttgaaaagtgagtaaacatatgcatgatctaattcattaagagtcacggtatctctttgctgtagttatataagctaatctttgttttcatgttctttttctaaaaccctgtcccaaccaagtaaaattgtgtatgcttcttgaatttattcaataacttgagcctcactggtcactacctggtgcaattaagcatatgagtttttcaccagccttcaggccctaggaattcttgtttcctgcttaatttctaacttgcctatagctcagaaagaccgaaactatcccttcaaattcaaaatatgttccattgcagggggaaccctcagaggattgatgctacaactgctaataggcgtgttacctttacatttgaacaagtaagccattttcttcctgtatgctta

SEQ ID NO: 1133 - DNA, 2155 bp, Oryza sativa
cctaggtcacgcggctcacgccacagccgcaccgcacgggatgagtggatgacgggaggggaggggaatggatgtggggaggagagagactgagggatgtgctgctagggttaaggatttttttagtgggctgggctttttgggctttctttgatctatattttgaggtctatatgtactccccgggggcccgcgggtcacccgcgggtgaaatcagtcccccgtcccctccccgcccaaatgcggggccccgtccccgacgcacccgcgggtcgaaaatcggccccgcccccgcccccgtaggggcgggtccccgcaggggacccggccccgcgggggaaattgccatccctaattatgtctaattctgcccaacggtgatgtaggctaatgcatattattttaatgttaatttttgttctcaccgtacgtgattatttcaggtggctactccttgatgggttgcattaaagatattccgaccctgaaaggagataactacgcagaatggaaaagaaaactcgaccttgcttttatcttgggagaggtggactgggtgttgactaccccatgtcctatagaacctgctgaacttatcagaggtgaaaatgagtcagatgctgactggcaaaagagacagagggacaatgctcctctcgtcatgtcgtatgacattgaacaaaagaaatggtccttagccaacaagaaatgtttggctgtggtaaagaacacgattgagccaaccatattgggctcaatcccagagtgtgacgcagtctcagattaccttgaaagaataaagagtcagtttactggctcttcaaagacttatgctacacaactgatcaagcagcttgtgacagaaaggtaccatggaggtggtgttagagaccacatacttaggatgagcaacatggcttcaagttgaagccaatggatttgggcataacagatgactttatggtccatctggttatggcctcattgccaaagcagtttgacaattttattgtcaactacaatataagtccagagaaatggaaatttgaaaagctcattgctaattgtgtgcaagaggaggagagaatcaaagagtcaaatggtggttcaataaactatgttaaagataacaagaaaaagaaccacaagtctcccacctcaaaagctaaacagtctcagcatctgcttcagcaacaatagttcgctgttgagaaagatcagtgtctccacagcaagaagacaggacattacaagaaagactgtcctgacttcttgaaaatgatcatggcaaggaaaggtgagaacattattacatttgtaaatgaatctcattatgttggttactctagatccacatggtggattgattctggagcaactattcatgcttgtaattgtttaaaggcattccgttcgacaaggactacgcaaagaagagaaagctccattagagttgccaatggagttgaagaaaaagttgaagctgttggagatcttcctctagagattgcgaatggcttcacacttttacttcgagatgtcttttatgttccttctttgcaaagaaacttaataagtgtatcaaagttggattttgatggatatgattgccgctttggaagtggcaaatgtgaactatggtataataatgcatgtgttggtcttgctgtgttgcgagacaagctttatttgttatctctttctgagaatgtgaatgttgtgtcctcgttgacaaaagaaaacaagaaaaaaaagagaactcccgatgtctcatcgaaattatggcactgtcgtttgggccatattttgagggggtgaattgagagactagttaagaatgaaattcttcctccattggagttctcagacttagaacaatgcatagaatgcattaaaggaaaatttataaagagcatcaaaaatggtgcaaaacgaagcgcaggaattttagagatcattcatacaaatatttgtggtccatttcctgtgaaaagtgtggatggctatgactcgttcataacattcacagatgattactcccgctatggttatatttatacaattaaagagcgatcagaagcattggataaatttaagatattcaaagctgaagatgaaaatcagcatgatataaagattaaagtagtaagatctg

SEQ ID NO: 1134 - DNA, 676 bp, Oryza sativa
gccgtccttgcgtccaccgcccactgcccgccgcccgccgccgtcgtgcctgccaccccctatgcgccggcaacgccactgctcgcccttctacttgccatgtgtcacgcccagaaattcccgaatagaattccaagcagaatgtgcattaaaacccccgtccaggaccggccggggtacacaaacgataaagttgacgtacagatccacgtcttacaaacattataaaagtcttacataaatgcagcggaaaattaaaagataaatggagctaagccttgacttggactgcagcgggaacgccacttcacaggcatcctcgacggcacggatgaagcctactcctcggagaagccaccatctgacacgtactcaaactctggggtttgggggaaaatagagcaagactaagtacaaccaccgtactcagcaagtcataccggaatagagggtatgatgcaggatataaccaaaggatagctagagtggttcatttgcataaagcgagcatttaaaggcagtagttaaaagcagtaaaacagttataataattcatcaatattaaccatccactgttcaacgctaccccacgttgcacaggcctaaccatccacctgaactaatcgattccattagactaagctagggtgagactaatcacgggggctgcaggaat

SEQ ID NO: 1135 - DNA, 714 bp, Oryza sativa
attcctgcagccctgtgctccttgatcaacttccatagacaacagagtagcaccgaaataagaattcaattagcatcacgcaaatgtttacaaaagtttatcattgctctagcaagattgcccaagacattagggcagaccaaagtttagcatgccaagagttaaactctatattaatacatggaaatagctcacaaaagttgccacacataacatcttccagtttttactttgcatagaagctccactatcccttcggcgccggacgcttgccgacagctttccaggtgactttcacagaaattgtgctaaaatcaccaagcttcaccacttcatcttcaattccatgaaaaccagcaccaaatctgtgctcccatcttacacggggcagcttctcaccaagaccaatacctgctggagacccttcgatacaaagatcaaggtgactacgtcgcaccaccgccacaacagaactaattctatgaccagattgtgcagcaccttggaagagacggatcacatcgctgaagccactagttttggcatataacttcaaattaaggccacaaggaggtgaatgtataatctcaacatcaactgtagcttgaactgcattaaccagcagagcaaacttcaaatccaatccacacttctcaccgtacagacgaacagttttggcgaatgatgccgatcttaaaatgttggtgaattcag

SEQ ID NO: 1136 - DNA, 1175 bp, Oryza sativa
ccagctccccggctacgccgtcgtgcagtccaagtgggcgcgcggcgcggcgcggccgccgtcggggaggtcgtcgagtttcctgtccatacccttctcggggtcgccgtcgacatccagtggcgccgccgagaagggaggccggccggagcagggcgcctcgccggtgggcgtcgccaacgtcaactccggcgtgttcgccggcgggccgccggtgcccgtcggcgcgcagaagctgctcaagttcgtggacacgtcgcaggtgaccatgggaccgcaggatagccccggttactggctcgtcaccggcgcaaggctggacgtcgacaaggggaagatcatgctgcatgtcaagttctcactgctagcccaagtttcttgacgacgagtcgacgagggtgtcaagatgttcatgaccatcccgtgatccagagtttgtacagttttcagctgccaaatgcagatatgctaacaactgaaaaaacagaatattccaaaaaaatttgatttttgattttttttttttggtttggaccctgaagatgttgcaacgatctgtaaatgaaaaaagatagtaggaaccagaggtatcattctaacactgcaagaaaaaaaggattcgttgatctcagatcacacattcatatatgggactcgcatacgattcacagcaacttgtcttacattactactactgcagttcgtcttacgcaaaaggcgggaacaataccaaatttcattacaataaaccgaaggcaccaagtgaacgactgaatccaaaggtttgtggaaacacatatatacatcacaagctagatagcagttcgcccgcattcagtaagcattcaagcaccagaatagacatgttcaatgcaaaagttcagatatatgtataagagcaaacatgctggccacactcaaattctcaagttgtggagagagaacaactcgggctgcatcttcctgacgaacttcctcctttgcttaatgcgcaaaagcttctcatagatacaccatggaaagctgataaagtgtggtcgctcatatccttcattgtagcaaccccagaattcagggtggtaagtgacatggtaccaggcggatgccttggcttcggaggcatcatggccatgcccacttatcatctaagctcatctcactgaaccttgaccttg

SEQ ID NO: 1137 - DNA, 1533 bp, Oryza sativa
tatttattaaaacccaacgggaataatacttttttatttttaatgatcgaagatgtcacgacttgactgcgtgtatttgaggataatattttctttttgataacggaggtttgaccatatcttatattatggaatagagggaggactagctaattatatgagtttgctcatcgtgtgcagggtgtgacggtgatatactccaagaggggagggaacacgacggtgagcagccactcggagtggctcctgaccgtgccggcgatgcccgacgtgatcaacgtcaagctcgtccccatcacctccctcatcaggggcgtgcctggcactggcttcctctctcacgccatcaacctctacctcagatgtaacaacagaacagagcttaatgatttttcttttttagacgagtttatttactgttgattagtttaaaataacaaattaagcatgtgattggattgttacagataagcctcctgtcgctgacctgaggtacttcctggatttccagcatcactgcgtgtgggccccggtgctcggcgagctgcctctgggcccttgctcacaccggcaaggctccagcccggcgctgcatttcagcctgctgggctccaagctctatgtcagctcaactgaggtcagactctgaaacagcctctcactctgtcactgaaccagataaattccattctgtggttcactttccatggcgtgtgtgatccttcaaaataaaaaaattgcaggtggttgttccgaagctgccggttactggcatgaggctgcatctagagggcaagaaaaacaaccggtaagatttcacaggtttatttaaatataattaaatacacatgaaaacttgaaaataggtttttcttttttatagatgcacacccacgcactgagacacacatactactacacatgcacacctcacaaaatgtggctccccacgcgctcaatgaaattagtttgggggagcttatgtcagctctgcagctgcaagaaactcctcgaaacaaactagatgatcttcattcagataccaagaagttttagttgtagaatccagaaaataaactaaaagctagaagctagatttcccagattctttagattctcactagctaacttttcaccagctgcttctcagaattttaagtttccaaaatagaacataaaaccagcgacaactcagttatcagtccatcatgacataggcacctctgcattatctacaaacattttattattgtccaaggcatcaaacatcttccaggaaaaaacattttattatttgtcacccttatctcaatgacacgtgggtccatatgtgtcataacatttgggcccactaataaatggttaattgccacatttaatagtggcgaatagttaaatttctaaaaaaaaacaaagactacgatgaaaaagaaaaccttaaaactaacttttaagtaagttttaaactttgattggggccgatcagaaagagcatagaatgaaattgcatgttaacaagtttaggtatgcaca

SEQ ID NO: 1138 - DNA, 989 bp, Oryza sativa
tcaatctccatccacatgtcgcagccatgccaaatggcatactctatatttgtacctttcgatatgaaatggtcagatgtgtggcttcgaacagccacccttgtgaattgtccatccttactgatcagcttaaacttttgggttgaactgaataaagctggtgcatgcatgcgacgctttgatttttcagctgcccattgtttttgtctacttgtctctggttgggacctgacatttctagcgagtgttgcgttgttgttgcctatcaagatcatgatcctaacacgagcgcgcatttgcagcactcaaatcgcagcagggccaatcgaccactcttgggtcagtcaaggccactcagaattcagaaaagggacagtcaagaccactcagaattcagaaaagggagcaatttgcaggtagctttcagatgcatgcatgcgcttgtaaagttgcaatgcaattatttgtgtacgtgcaacaagctagctacaccattcgtcacataaaaagcttaattctaactataaatcatgcgtgttcaaactaatagctagaattagacttttttttaaagaaaggagtactcacaagctagccactaaccttgcgatggcagaggggtcccaggcgggtggcacgtcggcgaggacacctgcatcgagggcgaggtggcggtggtcgagacggaggtcaaagagggagatgaagtacccgtccatagcgaggcacctggtgtgcggcgcgtcgtgggcccacgacccgctgtccaggtcgaatgacgcgttgaactgccccgacgggatcttcccttccaccgaactcctctggttgaacagctccgacatctgcgtgcatgcgtgaatgcgtcaaatttggttaaacttttttaaaaagaaacaatgctatttgattttattattgttgaactgatcacattcaggaaggctgaaattttggcaagattctgttcagtgatggggcgcaggaat

SEQ ID NO: 1139 - DNA, 651 bp, Oryza sativa
ttttttaaagtatacggacacacatttgaagtattaaacgtagactaatccaaaataaattacagattcgcatgtaaactgcaaaacaaatttattaagcctaattaattcttcattagcaaatgtttactgtagcaccacattatcaaatcatggcgtaattaggcttaaaagattcgtctcgtaatttacatgcaaactgtgtaattgatttttttcgttcatatttaatactccatgcatgtgtctaaacatttgatgtgacggaatttttagaaatttaaagggaactatacactaaacacagccacggtgttggaaaaaaaaaagtaaagatgagatatatgtattgaagactgtgccattgactcgttgtccaaaccaacgaagaaaaagaaacagatatagtagaaatttatgtcacaagcaatgcaaagtttatctcataattgatcgaaagattcaagagttgagaatgccacaacccttagccatttttgttctagaaaatagagtacagtgattcagttaattacctccttgcttgatacaagagtggtgatcccgtgaagcctctgctgagctacttgtgcatcgaacacgttgaaggcctccggtatctatcacaattcaccacacagacactgaatt

SEQ ID NO: 1140 - DNA, 673 bp, Oryza sativa
atcccatcagagaacacatgctgtgtaccattttttatatctgagatttcttccacctcatacttctgaacctttaatgtttcggttgaggaactaaaagactgaccaagtcttgcagcatattttgctacatttctgatgttacggaaatcccccatccatgtcctaatgtcgctagcagctaatccctggcgagaagcaaacatccatgcagagttatctcggagctggcttgaagaaaaagcaagaaactcaaagttcttgccaccaatagtgatgccatctgaaaggactgacagaactctcttatacagagcagttctgtttgcatcatgtcctgaagcagaacggggggataaatcagttgcacggagcttctcgcagtcctcgtcaacaaatgaaatgcgaaggaaattctctatgtcagaagaaaaattccgcaccacacgattggagacattaatctcaggtccataaaaatacactgtagacataaaccaatccatcatccagagatatgttaggtgatggttggacgtagcgtgatctccggaattttgagtattgttcagatagccaacttgttggattcaagcaggtctttttcaaatatgacatcatttcaagtgcacgctttatatggtcaataggtacaaaagcgggctgcaggaat

SEQ ID NO: 1141 - DNA, 611 bp, Oryza sativa
tacgtgtttacacaagataaccagggaaacaaaaaaaacaactagcttaagacaaattctctcagttgacagtagtatcctcattatgaggcaccaattacaaacgtatctctagaagttaaatattctaacaagaaagaggcagcatatcttccttctaatattcaagatttattacagaaaatagggaaatagatgtgtaatattattaaatgaaggattttgaataaaaaccatatatgctgtgcactaggattagtttgtttcctcctgcaaataaatatacccaaatcttgcagtgccagaaaataggagtaaatgataatcttaaaaaatacaagagctggactcgtgagtccaaagaacagcataacactagccagccaacaattgaataaaattgctagcatgagtggcaagaaagagtggacaattctggttgaaaactgagcttacctcaattgtaacatcatggtctaatgtttctgttggtgctggagtatagtccataggtgtcaccatacgaggcggaatgagagatgggtcccaagaaacaaaatatatgtccccgtcaagatcactccctgaacactcattaggatgcggcctgc

SEQ ID NO: 1142 - DNA, 638 bp, Oryza sativa
tatgggcccttttagaacgttgaaatcaaatccctactgtgcgttacttatttgggtgacaggcattagcggtttaattatgaactaggcaattataagtgtatgcttagggatgcaagtgggcaatccctctactcatataaaaacccgcttaatagttcattttcttgcttctagtacaaaatttggaagaaaaaattaactagaattgtgataagggcacacttgcatccctatgtatgctggagcatccataatccagttagtttttgtatatagaaagaaataaaatttgctgacactaaagtaattttgactcgcactcttttttgtgttgattaactaacatgtactggtgttgattaactaacatgtactgaattttgttatcatgcttgtatttttgtggtgattggttgctgttgtactctctatttctacttggagatttactgattgctttattaactttcttgacaacttagatatgtccctgcctattcaacgcggctgaagtttgaggacaatgtatggcatgttcttccagaaactcttcagacccttttagtgctgcagatcctgtgtggaccgaaagcttctggaatacaattggcctcagggtgtatgggctgcaggaa

SEQ ID NO: 1143 - DNA, 1121 bp, Oryza sativa
aaattctaccgaatcgagatggtctcatgcttcgttgggtatcttctgttatgtgatgcgtttctagggtgaaattgtgtagggggtaggtctcagcgtagccttgaggtgaattaggtagtggactgctaaacctagttagttctgaagcttgggcgaacacctccgttgttgtgctgataggcctctagttgtgctcatggagctttgacatgcgactataattttttttctagtatctcattctaggaagttttgtgattgctaaagtattgtgatgtcttaggtgtaggtttgtttaggttcatttgaattataaaatcgtgatactgcttactgtcttaatatatttatatatgggacacaggtttgcaaagcaacgtaagatatcccaacttatgactgctgtaacattgatgtaccataacttaaggatcctcttacctttctttttaggagatgctgcaacgttggagtcagttccggatcttgtgaaggcaatgtacataaacgttgaaagcttcccttgtgtgaggctgttgaatcactctggtcaagtcggttgttctagtgagtattcggtttactcttattctgtatgcttaaattaagatggctgtcattttctatcatcattgtcaaaggctagccaactctgccttgttaagagtacatggttattggggtctccattatgtaatcagatcctgggcatgacaaggttattgcaccgattgtaagatttggaaacagaaatgatcagttggttcagccgtcggcggttcttcttcccttaaatcagatgacagatttctttctgaggtataattgcttagatagtctaaatctcacaaatgatgttacatatgatcgtctttcaaagttatgtttccttgaggtgctaagagatgagaatatttgctacattgtttgctcttgtgcagggtatccaatgatccagaactttatcgtaagatagctggcgtactagttgaggcaaatggcgttgataacatgctaggtttgtggatttgttttttttatgtattttattgcctttaattccaaaaataatgtactgttctgactttgtagagttttcaccggatagaaaatttcca

SEQ ID NO: 1144 - DNA, 1725 bp, Oryza sativa
tcaccggtaactgcgcggttgtcgggcttaccacgggatacggtaatataaataccacggtagcctccttaaattcataaatttaaaaaataatttgaatttttgataaattttgtacgattttttacgattacggcgcgtggtaaccgtaattaccgccagggcacggtaaccccggccctggaggtttgggaaatcctaatctggtggttacgggtactaatttgtatattcctctggtccactagccattaatatctctaaaatgtatgcacagtttttccactttattcttttttaacttgcgagcacaaggatattttacttctactatcataaagttagttgctcgactgccctttcaataataaataaaaaaaatgtgtctacaggatacgttgatggcatatgcatgcgcatgcaacatatgcaatgtcgacctactgtccttatatatatactaatcgttgttgtttggttgtaccttttgttttctaaccttgagtgacagactcttaggaattttctagagcatgacggaaaacatattaatagcaattagcataggcaaatgttgatgaaataaaataacattatttactgtggtgggccagttaattagtaggatggctcctcctggtcacatgatcgagccttgggtccactagcgtactatggtttgatcatttgatatatactctctctgtcaaaaaaaaaaaaaagaagacaaaccttggtttccgtgtctaacattcgaccgtctatcttataaaaaatgaaaaagacaagtcacgcataaaatattaatcatgttttatcatctaacaacaatgaaaatacgaaatataaaaaagtttcatataagacggacagtcaaaattggacacgaaaacctagagtttgcctttttttttttggacggatggagtactttgatgtaaactctagctgctgcggccacctcaattcaacatcttttgagattgagatagtacacatctcatcgggttagactctatttagatgggactaaaacttttaagtccctatcacatcgaatgtttggacactaatgatttatattaaacgtagactattaataaaacccatccataatcttggactaatttgcgagacgaatctaatgagcctaattaatccatgattagcctatgtgatgctacagtaaacattctctaattatagattaattaggcttaaaaaatttgtctcgtgaattagcttttatttatgtaattagttttgtaagtagtctatatttaatactctaaattagtgtctaaagacagagactaaagttaagtcgctgatgtaaacaccaccttcaacttgcacactcttctctcgctcgcagctagctagtttgtcctctcctgtacgcgtctcttgcagctcactgtctcaggcaagtcacaagcgagttcagttaactcgttagctagctagctaccgctgcgagctctctgcacaagacgatgtcgagtgtggttgatttgcatgcatatatatagcctactgcttcgtgggaaccccgtgttggctccgctattacgtgcgtgactcgtttgctgagtaaaactgaaaaaactgggcacgcccggactccgattctacggtctctacaagggaaaaattcacgcggccttagccgtgcatgagccgtgtgtaacatatacaccaacacacatcgatcacggccactag

SEQ ID NO: 1145 - DNA, 635 bp, Oryza sativa
tcagtgaactattttttatcatgacttttatataaagatattttattctggagagatttatcaaaatatttgttctcaaattcttgagtaaagcacactgggtgtccaaaaaatagctgtacattggaatttaaaacaccataggcattgttccatattgttcatatttatcttctgctttgacagaattcgtcaatttcgatgaaaatggtagatgcactccaaagtgccagtgaatcacttggttctgataatgttaaagtaaaaccagcagcttcatcaaatcctggtgttccaccatcttcattaatgtcgttcctaggaaaggtaaaacctcaaatatccataaacataaccatttgcttgatagtattgcactcaatatgcaacacattaatttagtgatgttccatctttttttttcttttttcattagaaacattgatttttccaaacaaatatttctctttgaaatctgagtgccatgacctgttcactgttaacccatcaataatgcagaattcatcaactcctggacttgtcttggaggattttgattcccaattttctaatagattttaccacagcactttggatggccctggtaagttcaccatgcagagggctgcaggaat

SEQ ID NO: 1146 - DNA, 2233 bp, Oryza sativa
agatgcagcagccaatatgttcagttgtggaacttgtttgcaaatcctcctagactagcgacttctgagtttatgataaaattgactttgatgggctttatctggcatcaaacagttggtttattttcatatttaattgtcaactttaagttagaaatttcatctggctgttgcatgatttgttttgcttattaatttttttctgtgaaagaatgttattgaatatgttcagcttactgtcagcaccgaaatgtgaccatgtcttgagatatctgttttagttctctttttcatgtgatattaatgacaaatcagtaccttagcgtaacaaaattgcaatgttgtgttcagtcttgaaatgatgagcacatcaattttggtacactaattttgtgttttgctttcagggaggttgaataagtgcctgtcctgcccttctctacttgatttggatgcagtacattctactgtaccaagaataatgccttgggacttcccatgtaaattatcagaaacaatatacatggaaatagacaaaacaatcgtgacagctgaacaaaagaaaaaacagatggaagtatcagaatttgaaggcctcgaattacaaataatgacacctttgaccaagggaagaagtgctggtaaaacaagaaaacctaagaaatccaagttaaagcatggccgctctgctgattgtaatgatgcttcaccttgtaagaatgaccttgacgatttccatgatagtccagatatccctcttccatccaatcatcaaagaatgagaaataggcgtggagtagttttgtttgctgagtctgatgatgatctagctgatgcacatgctgccaaagatgccacatttactgttcaagaaggtagattgctcccacaatcttcagagctgccctgtttatatggccatgggatttccaacattgttccagaaagtgttttcttccaacaatcatctgtgcctcatttacatagggaagtgatttcaaatcaattatgctttcctagcgaatcaagggcctttgaacctgccagttctttccaaaaccagcttgaaagcaacatgcccgggtccatttcacaaatatgtgatacctttatgtctcagggcatttcatgtgtgcctgagtcatcgttcatggttggggggacatctgcatcaatcagcagtgatgatcttttatcaagtctagtgtccaatggtttgtctgcccttcgtaatgagagtacttacactgcatctgtagtggcactagaagacactaacaaggtggagaatcaaatgactgataaacctcaaaaatgcatggaagatgaagttggtgagacttgtgaggcttatgtggaattggctgacaggaatgatcatgcaagctgttcaattacaggatatcaattgatggatgaatgcagtcgtgctgaaagtgtttggttgctttcagggaaaaaaaacaatgactcctgcaaggtcgaacatgtacaagatacttggaacaggctacggcagtgccatcctgtacttccatgtgacatgaatcacaacagatcagtttctggagctttgaagcgtgtttcaagagtgtctgatttaatatcagaatcagatcttatgctcattagctgccacccttttagtaatgtcagtgtatttttgtctcttttgagattcatgtttctgtaatatggtattgaagtatttataattttgtgcaggatatttcagatccatctttgactccttacactgagtctgatggcttctcgtacagcaagcagcttgagatgggatctatctatgctcagcatggtctttgcatttttctacaggattcccaagctacagatgatggttttgttgattttttacaagagttgttatttagcggtacaactaccacatctttgggtaaatttgttagctctggaatcagctgtggtgatggatctgggaacatttcccatgtaaaatacccaacaagttgtatttctaagagaaggtaagcattacagtgtgtttgcggtgcattttattgcttatgactgatatcatatgacgagctcaaaaaatatatatacacatgatggactatcttccttatagttggagctccatgttgatcccttagctatgcttgatttatcgcatcaaccaggagtatgagtagagtggattattttattggtcacagtaatttctgcagcttgcttcaatatagggtca

SEQ ID NO: 1147 - DNA, 1455 bp, Oryza sativa
ccatgaaaagagcatgggctttgctcacatgattagcaaagccaagaatgaaaaatggtaggttaaaacaagaatcacctgaggatgtgaagataataataaattacagacacagctatagacaaccatggattcttcatgatcttcttttagcggcaaagctttgataaacaccggaagtacctaagaatcaagcacagaatgcgtattagaccagcactctgaagtttgaaatctgaaattatgcaaaatattatgtactgcagagtgccaacctggttgagtggaattgactgaggctgcaccattatcatcctagcaatggcaccggcagcattatctctaactgcgtcatcaggttcagaatcagcaaacaaacgatgcagaccatggagtatatccccgtagtatctgcacaaagatgaataagaaccagcaaacagtacacgttaacaaaaacaatgaactgaatttacagcatgggaagtcactctaagctccatagaaagagcaatgcaatgttaaaaccaattcattatcaactagacagcagactattcagtacgcttcagaattcttagtcacatacattagcaattcagttgacgaggtgggttcagtttaaggataatgctcttggcatattatcactggaagaaacaatagcttgatttcttggtctttcgagcagaattttgaaaatacagttgtccaagttggactatgaaagaaaaaatggatccagagtaccctagtcactgacaggggactgataaatacaccgtaataattaactccatctgattgtgtcatcaagtattacacacatcacaaggaaatgcatataaaccatgggggcaaaatgggataagcagcatttggacttgtgaagtgccaaaatcttgggctcgaacccgtgaacccaccgaatcaaactaacacaacccacttttgcttgtgtacatggtttggttcggtttactccaccccgttcaacccatgagtcgcctccttctccagcagggccatctcaggtggcggccaagcccccggacggctgtgccccttacccgtgaggccgcgatgagtcccccaccagttatcgccccccatgcggcgaggtcaccggcgactgtgcgcccgcccacgacgagcaccctggcggctgcatccccatgcacttgacaaacaccaacggcggccatgaccccaacccttcgatgggcctatgctgcggctgcgtccccgcgtcggccatggccatgcccatggcaacataccctggcaaacggcaattcatctagtgctcgacacgccacgtctctgcggccagctgcgtcactgcgtggtcgacgactcagtcatcaacgtgatttatgcaacttagctctgcctccccgtgcttcttgggcagttccgccatgaaatctggtgctgccgacctcacaaggaacg

SEQ ID NO: 1148 - DNA, 687 bp, Oryza sativa
aacgaattcagaaatattttctcggaaacggaatcggaaatgataagcgcagtttccgtcggaactcggaatcggtcgaaaacttttcggaaattttctcggaatttccggaaattgtctcggaatatcagaaattttgtgattgaaataccctagattctttttttaagcactaaatagtgaataccatggtgtttggcagttattttttaaaaaaatatttgttatacaaatctaaaattacataagaatattttttgtcctacattgggatttattaacaacattactcttttaaacatagataatttattcaattggatttatcagtttgaggggttttttattccgataaattttcgttaccgtattcgcgccggttcgttttcgctccgttttcggtttcgataatattcgattccgttttcgtttccggtgtttccgattccgattccgattccgattccgaaaaaaatatgaaaacgaaaacgataaagatggattccgtccgtttccgtaccgttttcacccctaactccctccatcctaaaataagtgcagttttgcactatttacgttcaacgtttgaccgttcgtcttatttaaatttttttattattagtattttaattgctattagatgataaaacataaatagtactttatgtgtgactaaatattttcaaa

SEQ ID NO: 1149 - DNA, 609 bp, Oryza sativa
  unsure (1)..(609): unsure at all n locations
agctccgtaaatggttaatggaattcgtgtgtacaatgtattcttgcaggttgaccctggtaagtacagggacatttcatctggatttggtgtcctgctccaagagcaaggtcttggtggattcttcaagggctggatggccacgctggttgggtacagcagccagggggcttgcaaatttgggttctacgagttctttaagaagtgctactnnnnnnnnnnnnnnnnnnnnnnnnnnnngaagtggaagaccttcatctaccttgcagcgtcggcatcggctgagatgattgcagatgtagctctctgccccatggaggctgtgaaggttcgagtccaaactcagccaggatttgctcggtgcctgacggatgggtttccgaagattgtccaatctgaaggtgcctttgggtatagatactgcatttcttgtatacaattgtgacttctgttcaaagtttatttggggacatcctatatacaatgtgcgaatttcaggctttataaaggactacttcctctctggggtcgccaagttccttgtaagtcaaatgtctcgttagcagttatctttcactagagtattatatttgcatgtcacgtttttgg

SEQ ID NO: 1150 - DNA, 2134 bp, Oryza sativa
ctctgagacaacacctaatgatgttacagcagcctcacgatacttgggattaatatgacgaaagctcacagaagcaaactcaagaactggtgggaaacatgtctcggtaaattgatagccattgtatcaatgacttctgcagcagaacgatctgctgctagatcagaatctccatcttcatcagctgtttctgtaagcaaggggcacataacttgtagaataggtattaccagcttatgttttttcaagaaagatgctttaaattttacaagccatgagattatctgtatagcctgaaaaaatgagtgcacatttgaaatattagcagtttgtaaaatcagacggatgtataaaggatgtggctgactgatcaaacctgttgcctaatatttatttccagttcttggtttgagcaaacttcaagcgaaaattgtacaattgatctcacagagtccccaagaagtggggcaggggattcaattagttcatcaaatatttcaaaagcgatggaagcaacatcttcctctccattagcaaggcactgccttgatacattcaagatactaggaacaaaatcccgaaatatttttacctacaattacccagtactaattagttaaacagtatactctgcaacaaacacaaaatcaaaatttatggaaagggctagaggcaagattaaagagcacaatgtgaaaacagctgacacttatgatagtggcctagtgggcagtgactcttgaaaatagttagctgcacatgatgactaagctatactctggcatcttgctgcatgtccagttctacattttcttttctggggcacacagctattgttttattttcttttacacaggagaataagaaatagctcagtgaaaccacaaggatcaaaatgagattaggtggattatcttcaacgaatccctccctgtaccttgagctgaatgtatggtagaagtttgatttgcttttgtagatctattccccatgtgggtatgtctagagatagcagggtattatatctcagactaagatgatgctaaggaaaacaactgctctaaaaacttacaaagttaacaaattcaagagataaaccactacagtaatgagcaaacaaaacaagcaacccaagatgagctgaagcctgaagtgtcactttccaaaagaaaagggcttttactggaaatacataacaaccaggaggttaaaaattcatgcagaacaatagcacatttttcccatagaaagaaaacataaacacagaaatatctgtggcggcaggaaactagaaaaacttacaacatcacccccatcattaacatactctatgaaagatccaacagccctgttccacagaagacaaaactcttactcacagctaagaatatcaaaccagaatggtcagaatagcatgattaaacttagcatactttagggcagcaattctgacacgagagctagcctcgtcttgcaggcatttcagtaaaataggttgcaaatcattcagatgagattgaaaagtagttccgatagtttcagtaagggaactgaacagtatcaaagctacctgttaagaaaaaagtgagcgagtaagcattgacattatccaccaaaaaatgctgcaggttatagaactaggaaattggtccggatcatcagacttgtcaatatcaaatattgtactattagtatgttgctaaccaaaaaaaaatacaacttttatattcttatagcataaatcaagttcataaatttataaaaacagacaatgaaaatgtaaagcacaaaaggctcttcttatgtttaacaacaatatgattcaaattgccaattctcaggttgattctatggtcctagacaattacgtagtataagcatgcataactaaacataatatcggaagtaacacaagtttgataagaacactgaaactcgggatagacttacttctctatgatcttcctgtggactttggctgcattggaaaataaaaggtaacaactcaggccattctcctgcagggacagcgtacttagctataatactcacaacatttgcgctagctcgtcttacaagatggctgcataaaagtaagattcagtctctaacagaagtacatgtcaaaatacga

SEQ ID NO: 1151 - DNA, 8856 bp, Oryza sativa
ttttttatctggctgaaccaggtattggaatgggctgggctggaattgaactctagtttggaccaattttatccaaatagactccgaagtctaattctattgttcttactactggactacggctcccatcggatggcctaatcaaccaaagaaaaagctcaaatttaaattttcaaatttaattttgagattgattttgagatattttcaacgtagtttctttttcagcattggtttttaagtcacaaagaacacatatataaaagttttacctataaatttatttttaggggaaaagccaaacgatggtgcctgtacggttggttatgtagcaacaaacagctgataaaaataaggaaacgttagtttttttataaacttctttcttctaattcattttctaaatcatataactacatattctcaaaatttagctgagaatctaggcgagctgaagattttgaactagacctacagcacatgctctagctaaggcgtcacatcaaaggaagaatttacacgaagattatattattttttttagaatatcatataaaattcgtgcgtaacaatgaattcttcaaactggacttcagacttttttatcgataaactgtaaaaagaaaaaactcaaactagtgttagtctgttagatatgggtccttctcaggtttcccttaccgtcggtaaccgcggggtacgataatggttactagcggtagagtttggggaatttttttaccaaattcaaagtttttttaaaaaaacatgaatgtagttcttgatttttagtggcaggtggtgaagaatttttatttttgaaaaagagtaatataaaatcaaatttgagggaaaaactaataataaattaggaaatggaaataacaaaaactattggtacttaagttgcactgtgcaactagtccgttaagacccgttagagaaaaatatctccataatataggaaatgtcatgccgaatttttatattttacatttaaacgttaggtttgcagttatcctatatattattctaactatccctaatctatacatttaagtagttttccaaaaaaaaaagcattgttctgtgttcagctacacaattaatgttaccacacaagtatcgcagttaccgcatcaaaccatgcagtaatcgtgaccaaaccaccgttttttaattcaaatgtttaccggcaaaaatcacacggttttcaacggttagcgcggtaaccgtcttactgcagaaggcgtgcgccaactccctccaaacagtaaggggaaccgaaaccctggtccttctaaccaactctatacaattgtactatcaaaatattttactcacttgacccacggataccagtttccactgtaaaactggcaagcattttagataatcttttgagtgatccataaattgaaacaaaagaatatatcagtttaactgatttcacatcggacaccttgacgattgggtgttgtttgaatttgacaaaagacgtgaagaattctcatcaataaaaggtagttcatgaccactcgctctccaggaacaggagtccaggtcgaactaaaaaggagactgcacggtgttctttcctaaacgttaacaatgacattgcaaacataaacataatctcaccaatatagtaattgcaagttgaacagtacacacagctcaccttgttacagcttccggtacccagcagcacagctcgcgctgtcacctaacatcaggcaaggggctcgtcacgtatagggtgtgtttacttcatgaaaaaagttataagtttaaagaaagttaggagtttgtaaaaaaagttaaaattttatatgtgtagaaaagtttttatgtaatatgatgtgatacaaagttaggaatagggggcaaactaaacacggccatattactccaatttagttgcagctttcagtaccagcagcacaggttgcacagctcacttctgtcaccctaccatcatgcaaatcgcaaaggttctgatttctcaaggtttaccaacctgccatctcccatgagctgttttccgacgagtacggaagtacgggctgccgcgggctgcgacgtgcacccgttagatgggctcgacgtgcccatgtatcccccggctcgcgacgccgccgcggcccacccacgattcgcaggggcggaaatccacacggaaaaccccgtcaaaataggcccatccgccgagacgatcatgcaggcgaggcgacgaccaccccccacccccacgccgctgccgcgtgccgccgcgctttttatacgagttccagctccgccgcgagtccgcgactgctgctgctactgctactaccctagcctagtagtagtactactactgctacttcttccccggtcgcggccgcctgcctgcctgacatcgcttcgcgtgccaaagccgacgcgcgcaaaagcaaccaaaagcgaaagcaagaccaccgcctgcttgctgctcggtctctcactctcacggtctcacctcctcctcctcctcaaagccagccattcgtctcctcgtctcgtttcgtttcgcttcatctcgtcatcgatgcgctcccctagaatgagagaaacctaggactagtactgcgtcaccatagaaggcgaatcactactctgccccggatcgaccacccacgccgccgtgattgggagaggagacggacgcgcatgccgccgcagcagggggagtgctgccgccacggctggctcggcgtgggggaggccgcggtgggcggcggcggggaggaccgttctacgtgccgtgccaagcggctgtcggtggacggcaaggcatccacggcgccgcggatatgcatctgggagtgcgacggcgaggccggggacatcacctgcgacatcgtcgccgcgccgctccgccgcagctgcagcgccaaggcaatgccgccgccggccccgctcttccggatgatgacgccgccgccgccgaggccgcagagaggggacggggaggaggccaggaggcccggggaggccatccgcaaggggcaccggagctacagcctcatgctcaacctgcagcttggcataaggtgataccaattgctccatccctttctgctcctcctcctaattcctcaaacactctgtcccaatgtttggtttggttttgttctccgtgctgagctgcagctattcggtggggaagtcgtcggcgctgccgttccagaagctcgccgcgtcggacttcgacccgcgggagaaggtatggacacggttcccgccggaggggtccaagttcacgccgccgcatcactcggtggatttccggtggaaggactactgccctgccgtcttcaggtgccacattgcgtcctaatccatgaactcggagaggaattcgttgatttcttggcttctagagtgatgtgattgttgggcatactgctgctgagtgatgccaggcacctgaggaagctgttcggggtggaccctgcggagtacatgctcgccatctgcggcaacgacacgctccgggagctggcgtccccgggcaagagcgggagctgcttcttcatcacgcaggacgatcggttcatgattaaaaccgtgaaaaagtccgaagtgaaggtcagttcatgttcatctttgagataactaggcagttgtgggcatcctccaccttgtattgtcgtggacttttaaccggctttgcctttagcttccttactggactagtcacgttttaattgcattcttcagttaactttctactagttatgtacctggaagcatcacatcatggtcatttcaaactgcttaaacgatccttttctatttcattttgcaacagatgtctatttcctataccaagatggttagaattattgcatattttattatccacctaaaggagttattccataatataaattataaatccaggttaatacattatctaaaaaaatatgggtcaataatgtaaaggggcacatactagtatcacatggtgagtagtgttgtcttactcgtaaacatattggtccacaggttcttatccggatgttgcggagttactacgaacatgttcgtcagtataagtccactttactaacaaggttttatggcacacattgcattaagcaagctggctgccccaaggtaagcgacaattacatgtggatacataactcattttaactctgttaactgttgttatgtttgaatgtacattatttcctccctaaacttatgtcagcgtatacaactaggtccggttcattataatgggcaatttttgctgttcggaatataagatccataggcgttttgatctgaaaggttcctcacatggtcggactatcgacaaaacagagcgcaagattgatgaaaccactactctcaaggacctcgaccttcagtatgcatttcggttgcagagattttggtacgaggagcttatgaagtgagtttcctgctatgttaacacaaatatattgtctgcaatttcatttgaattgagatactaattgtaggtctgatccttcatgtcacataggcaaattcagatggactgcacattcttggagacacagggcattatggactatagcctattgttaggagttcactttcgtaatgattactcagtgtctaaaataggcatatctcagcacatagctttcccaagtaagttatagcacgggttgctgttggtgtttacaaaatctggcttatgaacccagctgataattcaccagctttgatctaatcttagctgcatccctgatcagaatctactggcaaaagaaaatcatttgaaggtggaagcagtttttgtgagctctgctttgtggaatcaggttgcaaagacagagatttgatagactctcggtaactcctcacttcttacttttcttgtgaccgtttgcggtctaatgtgtgcattccaggaatagttgaaataccttttaagctgttctgtaataatcaatccaaatcagttacagcttggtagatcaccttaaacagaacaatgtgacatctattgcccttttcaggttctagtaatccttcacatattgtcaaatatattttcaatatatttttaattattaaaagctactctgttcttctggtaacttctgactgtagctcattagttgtttgtatgcatcttgacaattttgtagcataagtggagttatttaatctgtcgttgacaagtagttcatgctcctactttagtttgggacataatgctaatctccaccagtgtaaggtactttttttctgttgcatttttctaaggtaattttgtgttttctcatcatgatacctactttgttgctcccttcgtagacaacaacgaagaagcatcatggggccttgcttgtttgtttaagtgaaatgtttatataaagagagtgaataatatatggaactttagttattgcatctcatgatctgaatatcaaatatagaaactttttatccgttgggctaatgcaacctctgccttctcatatcaggaagccattcatccagttgggaattaacatgcctgcccaggcagagcgcagctcaaaaaaaatattagataattttctcctaaatgaaagacacttgttcataaccccaccaagtggaggatcatgtgatgtctacctcttctttgggataatcgacattcttcaggactatgatataacgaagaaattggaacatgcctacaagtccttccaggtcaaccctgactacatttctgctgtagacccaaagctatactcgagaaggtttcaggatttcatccgcagggtgttcataaaagagcagtaagaaaaagtcattgggttcaatggtaactatcccactgacttcttacatcatgagatccattggtgaagtttaggctatgatcgtattgccaatcccgagcatgcctgaaacagtgaaaaccgcaaatgatggttggttttaccatacgcacagtattctgaataattggggtcaacgagctccgccgacacgcatgctaatatcggatggatgggagctaaaactatgtatagctcggccttttggaagacctgtaaaccgtaagtgtcgaactccatgattgcaaagctagttagttcttccataccactttttttcatttcctttttgtgttctttctttggcatctccccaagaatctgaagtttttatttgcttcttggggtgctgtgctgaatagcatgatcttccaatggagtgacccgatggaaatcagctatttgtacatgtacatatttgtcgtgtatcagacaaattattactatttacaaactggtgcatcctgtcaaaatctaaaaaagaacgaggatgtccatcttgccttcgataatatttgcatcctaccttttgcttgcagatgacaatttccttggcagagctgtatggctgggttttcaagtaatgtcatgttcatagttcagaaaaggaaaagaagttgtttgctgtagacattgttgccttctttgcaagcatttgcagcttatctttcgctcgtgcctgcctggtgtgaccacagtcgagagaaggcagtgtcaatgtgtcacttgtacagttgtagtactcctccaccattggccttgtgaactgaaggtagaaataaagcggaagggaggcgacaggcatcaaaaggagagaaagcaggtgcagggaagatgctgggacagatctggtctgctcctgtgacttgtgtctaaacatttttctctcctgtccttctctctgcattacctggccttttctcggctctactttgtttcccatgccaaggcctctagtccatttctccttctccatcctgtgctctttttttgcatgctttgctttgctttgctttggcctggagtcatgcatgactggtaggagcagaccaggtgagaagaaattcagaaattacggggctgaagtgtgatgcatgctgctttcacgcatgactcatcagatgcagcaatgcatgactgatctgactctattgtggctgtaaaataggatgggtactaattgggtaaatactaaggctctgtttagatctaaagtttggatccaaacttcactccttttccatcacattaatctgttatacacacacaacttttcagtcacatcatctccaatttcaactaaaatctaaactttgcgctgaactaaacacagcctaagtgattgtttctttttacaattgccattacctgttgatgtggagtatatttggtgcattcacgcctgtgtttctttgtatggtatttcctgtctcagtgtttgttctgtggggctaacggttgatggaccagtgttgatcggctctgagagtctctgagatgagactgtcgccatggtcaaaaagaatttaactcgtatatcaaggttggatctctcttgctcagaaaaaaagcataatctatctttaacctttatgactgcgcatctgctgttactctggagttgaaaacaattcacggtttgggcaagtgctgttaatattttttttcttcaaaaccatagagcgtaattcctccttttcacaatgtaagactttctagcattgcccatattcatatagatattaatggatctagactttctagtattgtccacattcatatagatattatgaaacggagggagtagctttataaactagttaccaaatctctttctacaatggatacatgaagatgacggataagtatgtgcagaaaactactatcagaatttcattgctttatcatatactccatccgtttcatattataagactttctagcattgctcatatttatttagaagttaatgaatctaaatatatatatatatgcctagattcattaacatctatatgaataaaaagtcttacattgtgaaacggaggaagtaggagtatcttagaaactatctagtgtccaagaatatcctttaagataacatgctgatgttttttttaagataatggataatccagccttttcaccacgttaatgtgtctagataggtgtttttttttacaatttattgaatatttttaaattctcaaatatagaaagccctccgaaaacttattttcaaatttaaaccttttactcacagcatcctgcttggcatgacgggataacactgtcatgctataagcaatgggcatgtcactgttctcctgtcattctagtctatctgtcgtgacaaaaccctcgctacgttgttctaattggcttggcaaaaccgtggtcaaattagtttgagttagattgagatagctcactcaaccgtacagttttacaaataaagtttggggcaattgcaaatttaccactactttaaatcgttattgcaaaactgccactagaaaattgcaaaaataccattagaactgtcattcgagtggcatccttgcaatattgaaaaaaccggtggcaaatttgcaaatgccccataaagtttttggaggggttcactggtggagaaaccatctttggtcggtcgaccaaattccacaatagtcccggatgcaataaaaaccgggactaaagatcatttttagtcccggttaaaaaaaattttatctaccaaccgggactaaagatcatttttagtcccggttcaaagaagttggtgggtcgagtcaggctccaattacaaccgggactaaagatctatttttagttctggttgtttatacaaaccgggacaaaaatgaactgccgagccgcgcgcatgccgctaccctctcctcggtacccggtacccctccctttttttctctccttcattaagactccctctcctcttccattgtttcctcggtatcccagcctcctctcgcttcat

SEQ ID NO: 1152 - DNA, 3483 bp, Oryza sativa
acgggggacggcggccgtccgggacccggtcgggcggcgacgcccgtgcggcggtgtcggagcgaggcggccgcgcggcaggcggccgtgcggcggccggtggggccgcgcccctcgacagcgggcaggcggccggcggggccgcaggtggcgaccggtggggctgcgcccagcaacggcgggcagggggccgacggcagcggcagcccgtattgttttttttaattatttgtgatttcactgatgtacttttggatggataattttgtgattcgttgcacatttgtatggatctgtgatgtatttgatttgtttgtaatttttataggatttgtgatgtatttgatttatgtgtataagtaactttgatttgtgatgtagatttgagatgttactttgatttctggattgggggtttgatttgggatatgtatcccatttgatttgggagaaaataaaaaagaaaaaaaaaaaaaaggggaccatctcactgccgcaaccctctctttagtcccggttgataacaccaaccgggactaaagatcccctctctttagtcccggttggtgttactaaccgggactaaagatcgatttttagtcccgggtatttgaaccgggactaaagatagcgatctttagtcccggattggtagtcccggtttgaaaaccaggactatagggggttgcgaaccgggactaaaaagcacttctccaccagtggttatttttaaaaattatttttaaaaaagaggtttagatttattttaaaaaaactgtagggttaagggcttcctcacccttttttatcttagtgcttgtcttagattatgggccttagtccaacctatatttttaaaaataatgtttgttaatttcttggaatttggttgtctcaggtttactagacctaacatgatccaagtttgatgaaacgaattgtacaacaagcaatatcgtctgaactactacgggtgacaagcgatcgtggaaaaataaatgaagcaacaaaaaattatttataggtaagaattttatatttgttttcttaatacagaggggaacatcagtaaagggaaagaaaaccatagcctgaactcaaatagtcttaggccctatttggcacatctccagttctagctccacctattctgtagctggagcccaaccaaatagttttaacttcaccttaaacgggagtaaagctgggtgagacgctctcacaaaaatgatctataggagcggagctaggggttaggctgctccacaaccacaactacattttagactcaactctttaagctaaatttaggagtaagctaaatttaggagttggagttataccaaacaagtccttacaattacacctcgtaacgaccccaccttacttagtaaggaccggtgacctagcgagcaaatcacggagcgtagaagcttagccaaacaccaaagtgcaattcacggagcaaatcactttttatatttttgttattggaggttttggaggtttagaaaccaatattggaaaaatataatgtgatgaagaagtccaaaattaacactaaaaattaagtttgtaccgtctgagcttgatgcatcacggcatgctttccatgtggatgacatccgaaagttttttaacagtcataggtctttgatgcgtggagaatcgtaatgtgtgggacgcgctgtcaatgataccaaggcatgctaaactaatattttggtatagatagaacattttggaaatcttctgcaaccagtcatgtataagggttccgttatacttactccctctttctcacaaaccaatctcgtacaaaatgtcacacaaaccaatctcgtacaaaatataatatattttagtataacaaatctactccagagaagacataaggatgtccggtgtccaaattcatcgtacgagaatgtatcccatcttatacgagattgatttattttgtaacggagggagcagaaattatcagtagcatataagtattgaagaatggactattgttttgtactttcgtatcaccacacttactccgcaggtttagaaattctcccgttaataaataaaacaaaacataaactgcaaagatgattttgttcaaaatacgattggaaacaaaagttaaagttgtatatggaatccaattatattttaaaactattgtatagaaatagtacaatatatctatgaaaatactccctttgtactaataaaggaagtcgtttaggataatatttaagtcaaaccttggaaatataaatcatgaataactcttaagttgttgagtttaaaaatataaaaattatatgtatagatttgtcttggaaaatactttcataaaagtatacatatagcacttttcaataaatatttttatagaaataaaaagtcaaagttgtgttttggaaatcgtgtcgttgttctaaacgacttcctttacaagtatagagggagtatatggtaagagctgtggaccattttaacttttaaatctacaatatataagttttaagtatatttatagaatcaaaacataataataaaatttgtatatcaaattcaattatgcttttacttggacaatccgctagttactttaaacacagatgacgtgtttgagtcggtttttaagtttattcgcttttggaaatacaaatccgtgtttgagtcatgttttaaattaatttgcttttataaatacataagaagtcatatacaaaatttttaattaaaaaatttttgcatactaacttgttatgatcgaacttctaattgtagttcatgattttattaaaaaatatatattcaagcaaattctaatattaaattttatcttaactaaactatataacaataataatattaaaataaccttcatctattacaacacgtaaaggaaagaaataaaaggaagaaaaatttgaccccagcgcccaaatctcacccgacccgacccaactctggtcttaactccgacgcccgaactcctaaacccaccccgtgcccccgccgtcgtcgccgccgccgccgcagcagcagccttcctccaaatccgcgcgcctcctccggccatggccacagccagcgacggcagcggcagcggcggcgagcagcggcgcctcctctccatccccaaggagggcgagcgcatcatcgcgccgacgcgccgccccgacggcacgctccgcaaggccatccgcatccgcgccggctacgtcccccaggaggaggtcgccatctaccagtccaagggcgcccaggtgagtccacgccccgccccgccccaatcatccccacactttgctctccaactgaagaccgcctctcatggtgcctgctttgttgcagatgaggaagtcggggcccgacgtgccgccgggctacgacccggcgctcgatgctaagcccaagacgaaggcggccaagcggaacgagcggcgtaaggagaaacggcagcagatacggccg

SEQ ID NO: 1153 - DNA, 3194 bp, Oryza sativa
ggtgaaagattaccttaaattagaccttggctgtaaaaataaggaggagcaatatctcaggccagagggataatacagaagaagtgctaccatcaattttatcattctgaactgtctaaccagcaatcacaatacttttattggggtacttctgttgatactcacagttggggtaaatgtagcgcatttctgctctccacaattacattgactaagtagggtcttaattggtctactgacacatcttaatgccaacagcccaacgatacctgtagcatgttccaagttattgctgaatttacgcaattaaccaatttctgaaatgtatacaagtcactggtacagtcagatttctggccagtcaggtgcataaaaacttgctatgagatgagaagagacatcttatgagaaaaatttttgtatgcttcagaatttccatagaatacaaaaccagcagaacagagtcagaaaaggattttttttagccatctcatatttgaactaaaatgcggtcatgcctgtcatctcaatcaataatcatgataatctggcaccgacacctaaacttggaagaattgtcaatagttgcattattgtacctgtgtattcactttttttttatactcaagctcatgttggttcacaacttcagacattagaagccctgggggcagctctagtagtatgttcagtgatccttgactgttgttactacagtaccaatttgtttcctcactgtttctcaccatcatcatgattgcatttctttcttggttagtaatgatctggaggaaaacatggggatctaccaaatgaataatatgttccactcctttcgtccatggaatgtaactgtgttcaacttcaattcctgatcgcatgttatgttctaactttgttgtctgcacaatgggttatcttggtaggttttatttggccaagtcgtctcatgaacccattcaaccacaatgacacaattagaaaacgggtcgatataggaagcctctacttgactattaagcatgaatgaacataaatgccatggtaaaggccagtttttttgtgttatagcattagctcttaggtgcgttgatatgaatttgtacataagttttaaagagtcagcacaatcagctattcatggcaggcataattatggacaataagagaacaaggttcttcataaatcctctatctgataattgggtcaacagaacagtgtttgtttattgtttgcctcatgggtgatgattttatctcttgtagattgagctactggtttattagagttgctttatgatgttgtgctgggcattctcttatttcttagcaggccagtacaacaaatgataaaggaaagggcttgcatatagaggatgatgcaggagaaactgacaatccgaaggatgcagtggacagtgtaacaaagcagataagtggcattgctatttctgaatctctggttgtcgcaacctcctccactgatgctaccgacaactcaaaatcggagtcatctgctccagacatagataagaaaattcgagcactgaagaagaaggttgtcttcctctctccctccctccctcactctctctccagttcatagtttttctgggggacctgagcctggtaggttatcccgaagttcccaagtaatttttgtctggtttctggcataaggcttccaaaatttcaagccatttttcattttctgcatagtactcaataattaagttgtatgcctggaaactaagttacacaatcaatcttaattagttattacttggtctaacttaagataagcacttgtactcaattttatcctacattgtaattttataagcacttgtaatcagtttttcttcttgtaagtttaacttattcatggtaactgccaagaatctaatgtagtagtaaccaatcattgattttatgttcttaggacatctcaggtattcagtccatgctttcaacctctaggagcaggcgagcagccatagtatatgttaacagtgctattttgatctgccaccatgggactaaattagatctgacctggataaatttgtcttgatttatcacagatacgcttagcagaagcgcaagtgcaaggagatccagaaaatttgaagcctgaacaactcgagaaaatgaagaagatagaaggttggaaagaggagctgaagcttttggagaataagagctctcctgctgcttcctagacaatgtcgacctcagcactgatgttgagtagagccatcatatatcgaatgcctgcctgctgtgatgttttgctgatccaaagtccaatcagtcattgtcttgcttgtcttattcccctcggcctctggaaaaagcaatccaattgatgtggggtttcacacagagtggtagctttttgccacaaattgttgtctcgtgtacgtcctccagttcgaagattcgtattgcaaaatctgtttgtcgtagacatcgtgcaatgagacaaccgattggagttggggtatgtgacggtgccattgtagctttgtatattatgccaacattggcaattcctcttgacactggatttacttctctgctgatccagtaataaccgtacaaatttaaaggccacaggcctcattgcatcgacaaagatgacaggcgagtccaatatcctgatccatctttgaacattcagcttatatggtcatcgtggttttcttctggtcatcgtggtttgcaaagcaataggaaactggcttgttttgggttatatagctagtatggcaagtctgcctgtttggttctttgtacttctgatgaaaagcttaagttggaaatgcattttatgctgtgattgatttcgtattctggactaaatattcacctatgggcattgtgcaacgaaacaaaattttattccatgccttttttagcgaaaaaatatcactccattgatgttccttttctccttttattcgttgtttttttcttggaaatatctgctcatgtgatagttaagaggcaacacttcacgacagatgttcaagaaacatgaactaccgttttaagggttgaatagtaaaagccgttccgctttatactaagagcacccgcaatggtaaagtaaggtgctatctataaaatatatacatctcaacaataggctagattaatagtaaacaacttcaatggtatgtctacatggg

SEQ ID NO: 1154 - DNA, 3751 bp, Oryza sativa
atagacagagacatgtaaatatttttttcccactattttttttgtgaattattttctgtccctcttcttttgtgaattacacgcaagtcaaacaacgcgtaaaaactgagaagtgatcgtcaagacgccaaatgccaatcgcgacgtggctgtaaacgccaaactgccaactggagaacaacaaccaaccaatcgtagcttttcctttggaatacccgtaccactgcataggaatcgttgatgagctgccgtacaccctttgttctaacaagaagacatgcacggcaattccaacctaagctactgtcatcggaagttccaaagtttggcaaagcacggcatatgatggcaaagacaaataaatcaccaccacgaacatgcatatttacatcgtcagttcctacttacactcatgcgcttgaatgcacatttaacctattctccgggctgaatattagccgctgactaaaccacgacatatcccctcgcagcaaactatgagaaagaatcaacaaatgaaacgcaatggttggggttgacgactgtgctgttgacaatattgcttcccggtaacgaatcgtcctccccggccagctccacatgattagcagaactaatatctgcaagagagaatatgcacgccagtcaaaagtcagattaaccacgcgctcaatgtcaacctagtgcgccacaaccgggcagctgacggtaacaactttgtattatatttgatatggacgaatctgtgttccggcgatgatgtgtgaaaatcgtttgcccaacttttcttacgaagcaaaacaattgtgtaggaacagtttaaatatttactatttttgcatgagtggaaagcaagttaaagaagactaacttaccattccaccgatattctgaagccgtcctcaattctatccatttatgccgcgtaccgatgaatttgagcgcgaagatgtcctcatagaccttatcgaccgcattgacctattaacgaaaggatgctccagcagctttgctgcagagggtctgtcttgcggattgggttttacgcactggcttataaaatcacgagcatccctagaaaggcaatttggaattgctggtggttcccccttcccaatcctgtataaagcttgtgtctgcagaacaagttgagaaaatggggtaaatgcaaaaaggaaacaaagtaatatgcatactggataattatcaaacttggaaccaacaccataactgaatttggaggagctaaattagattcctgatgaacaataactcacccattccagaccaggatagggaagttgacgtgtcaacatctctaggactgtgcagcccagactccatatatcagcttcaggtccatatgttgtcttgggattgacaacctgaaatttcatcattatcttaggaggcaactacaacattatctaacatcaatgcattataaacacatttttggctttttacctcctacctattagtttgttattctagataaaccatcaaaataaaagaaggtaaacaaatactacctctgtttcaagttataagattttctagtattgcctacattcatatatatgttaatgaatctagatatatatgtgtgcctagattcattaacatctatatgaatgtgggcaatgctagaaaatcttataatatgaaacggaggaagtaaaacccaagcatgtccaaatctaatctaatagaaatattgtgccatacctcaggtgccatccaataaacagttcctttgcacgatttaagcacgttgaatttggtaatctgagagatttgacagaaatcaatcatataaatgagataaattttaaaataataactgaaacattcaaagattaaaaaggaacataaagatttcgcgagagtaagcagacctccttagcaagaccaaagtcagcaagtttcacggatccattggcatgcaccaatatattggcacatttgatatccctgcaagacgagatttgaactgttattcacttattcagaataaatgtacagtaccagttccttaagaatcttcaagctaacgataaaaatcagtgagcaggcattaattagaataactgtcagctgaagtgaaaaaaaaaaacaataagcctccttagaaggctaaacagcagatatgctgattcaactaatgttattacctatgaacaatgtttcgctcatgcaggtaagtcaacccattaagaatctgtcttgtatatgctgaaacatgagtatctcgcagtctgtacttctgatacaaagatgcaagagatccttgggtgactaattcaaggaagatgtacagttttgagtcctcctgcagtagtcacaagaatggttcaatatgagccttaaaagaaaaaaagtacaagaaaactagaaatttacatacagcccaatagcaaatggtgcttcaacaaaatgatgaatggtcgatcaataacttactttgtcggtaccatagtactgcacaatattttcatgttcaaactgactcaaaagtgcgatttcctaaaatatgaaaagaagttaggacagatcacatttacaatacaacagaaccagtaagatattatagccctgggccctggcattattgacaaacaaaaaggaaacaccaacctgctcaagctgaaaaatgcactgctgtgcattgctcccttgatcacacaagcagacctctttgacagcaaagaagacaccttcgctgtaaaacatcaaatcataagatgtcgatatcaactattccggcatgtaagagacatgtgttatgcaaacattacagcagcctatactaagaataactgttgcaattgaacaccacataaaaggaacaacaggtattacaatgattcatttaggacagccagttcatgtgcatcttctagaagctaagtttcacatgtttcagaacccttagtgattaaacatatgtttacatcatgtcatattgaacacaacaaatcaaataaataaagtactattacattcaacattctgactctagcggaattctgattgtctacagcgtagggttatgctattcaagtaactgaaaatgaaatcatgttgatgattcaattaccacttactagtaccctacacgccatctagcaactgtacttaaagagatataattggagacatacagtgtacaatcaatcagagaatcaattttcctaaattcgggttaacaatggcttccaagatatgccttatgctatcttagggcaggttaaattgttgggtctcacaaattctcgaccacaaagtgaacaatcagcatatagaaatcataagcacaaagtgaacaatcaacatatagaaatcataagcacaaagtgagcgatcagcatatagaaatcataaaatttactctttagagcacttactcgctgatcccctcgaagactgtcccaaacgagccacttcccaggagcatcccccggttccacgaccggatcttcctcctaaacctcccattcggcgagatgtagaacatggactcggtggttgtgctcgacgtctcgtcatcgttcgtcgtcgacagcgaagacgtgcccgtgaattcctcggacgtctcccctagcctgagctcctccagcgtcaacaccgcggccgcatcatcctcctcctcacccgcgtcctggcatgcggaatcaccaccagatctgctcgccggggcgtgagcatggctatcctcctccggcgcgaacgaccgcaagatatcccacgt

SEQ ID NO: 1155 - DNA, 1803 bp, Oryza sativa
taataggggcgctggagcttcaattgccacggacttgggcgtttccttcgccgggagcacgggagcagcggcgggggcgggcagggagggcggctcctcttcggcggcaacctcgcggcggacaggagagtccctcgcggggggttcctcgcgcggcttgggggtggaggcggaggaggagaaggaggagcggccggccttgtgcgcctcccagtcagcgacggggacggcgaagtcgtcgacgccggagaggccgaggctggagcagagcagctgcacgtccctgcacccgtcgccgctcccgccgatccggaagctcgtgaggtcgagggagcacgccggggagcaggcgagcgacggcgacccggacgcaggcgcggacgcggcgggcggggactgcgggtaggcgcagaagttcgaggcgtcgtatccgatgtgcttcgcggcgttccggcgttcgagccggcggcgccgcctcgacgagcccccagacgacgacgacggcgacggcggcgcggcgggcggccccatcgtcggcctcagctcatggacgagagagagaggggaaggatggttcgtgataagtgccaagcgagcgagactcctcttggcttggctttgggtttgggggagaagaggagagaagagaagggaagacggcaagctgcagatttttattttttttctccgtttcgcccactagctttggcgctgaggttttgcgagtattttttgggtgggtggggggcggagagggggagatcggatggcgctgtcgcattgacccgcatcttttctggtgcgcgcgcgcgctcgcaaccgcggacagatcggccccacgcgcgagcttggcgcggcaccgcagccgcggctttttgcgcttttcgtgcgttttttcttgggtccgggcggcccggaatggctgcggtgttggcgtgcgctcttcttctactctatccctggatcctataaaaaaaattaacttaagcgtcagatgtgacatcttctaagagcatgtataatagcagattattagtcagctataaacatattttaataagataaaagatgagagagaagagcagcgggttatatatctgtagccagctgcaacacggactccaagacgcaatgtatgtatgacaggtgggaccatatattaatagtgggctatactattaaacttgctctaataacgaatctgaacatatatttatctagattcactctcctaggatacgtgacatctaatcctagattattatttttttggacggagggagtactctctactatagtgagtttgagctggaacagtccggtcgtcggggactcggggtgtttgggcacgtgcctgcgtgttcttgccaaagtgaaacaacccaatggtatttcattacgtgttagcgtatgagcgtagttagtcgtatacatgcggggcagatatgcacatagcggacgatttttcaccttgaaattgcagacgctttatgctttaacaccgagtttcggttctgccaaatttactggatccggatcctctgcattttgaaatgctaaagcaaggttccacggtgttttatagtagtacttgggcagtaagatgaaaaatcaaatcaatataggtcgtgtttagttccaaaataattcttcaaactttcaacttttccatcagatcacaattttcctacacacataaacttccaaatttttcgtcacattgttccaatttcaactaaaatttcaattttggtgtgaactaaacacaaccatagtattgtagcatcaatattttaccttacg

SEQ ID NO: 1156 - DNA, 617 bp, Oryza sativa
acttgtttgttttggatatattttctggtggaatttaggaaactataccattagttgttccctccttagagttcaaaagcatacctaacatgtttaattatgcctccgatattaatatttctaggtgttccacgaaagggaagcttccctctagggagattgttggacataattatttcttcactctcatatctaactattatttgcgtatctctttgttatttgatgattttaggatggtgggaaaatatatcttgtattagagtactgtcgaggtggtgacttacactcataccttcagcagcataaaagggtttctgaaacagttgctaagcatttcatccagcagctaggcaagcactttctcagaccctcagtgtcttgcactatttattgctttatctctccccagagccaaaatcacattctcttctttatgcagcatctggtctgcagatgctgcgtgaaaacaacgtggttcatcgagatctaaaaccacaggttaaattatttaatttactgttattgagcggatatttccattatatcttcatatttaatgaccaagaattgatgaaagaaaccggattttcctgacattttggtttggtttctat

SEQ ID NO: 1157 - DNA, 662 bp, Oryza sativa
aaggtgagaggtttaaaaaaaggtgaaaagttcatgtgtgtagaaaattttttgatgtgatataataggatggaaggtgggaaaagggagaagctaaacacatactcctacgactgcctactcctgccaaaagaaataaaggtggtgtttggatcagagacttaatttgagtctctgtatttatatattaatttagagcattaaatatagactactgacgaagctaattacataaatgaaagctaatttgtgagataaattttttaagcctaattacttcataattagataatgtttactgtagcatcacataggctaatcatagattaattaggctcaatagatttgtctcgcgaattagtccaaggttatggatgtgttttattaatagtctacgtttaatatttataattagtatccaaacatccgatgcgatagggatttaaaagttttagggcccctttgatttggaggaaaaacataggaatttcagaggatttcaatcctataggaaaattttctatgaagccctttgaaacaaaggattgaatcctaatcctttgaaattcctatggaatagacaaccctatagagattttggaggaaatttaacaagagcttcaacctcttgctaactttcctttgagtctatatctctcatc

SEQ ID NO: 1158 - DNA, 586 bp, Oryza sativa
gggtcccttacaaaaaacaatcgccattaagcccacaagattagcactgaactacgaactgttccaggggaagagagggatggaccaaccgtaagggtcgacaagggacgccgcggcggccgggttgtgctgctgctgcatcctctcggcggctctcttctgccggatctcctccagctgccagacaaacgcgcacacaaaccccaacacaaatttgagcctcaaatcccagatacaaacgagacgcggatctgaaacgcctcgcgtcacagagaagcaggagggagaggagaggagaggcatacggtgcggcgcccccgcgaggcgtgattggcttccatctccggcgaccggccgacgaaccggtcggctttctggaagctcgggatccggaggcgcgacgcgaaggaggatggccgatggcgggggctcctccggtatcgcctcgatcctgtgatgcccggagaagagaaggggaagaaacccaaactcgtgggcctagccaacgtgttggccttctagagttcacaagccggcccgtacgagcccgatcgggcaggttattcagtacccccatgcgttccaa

SEQ ID NO: 1159 - DNA, 574 bp, Oryza sativa
agattaaacatttcctctggttagctctcaaagatagaattcaggctgctgagcaactgaaaaagagaggttgggatggatcagagttctgccagctctgtgatgttttggaaacaactaatcacattctttttaactgtgatatggctagatttgtttagtgtttttgccgagatgtcctcaattggaataccattcctagaaactttgatgatttcttttctctttgcaatggggtttcagaccatactcaacttagaatcatttttagtctgttagctgctatttgttggaatctctggattacaagaaataacatggtgtttagagagaaactggtctattctccactaactattccttttcaaattatttctaatcttttgcagtggagaaaactctttcgttctgaggaagaatgcaagctggacgcgctggtggaaaggatccgccagcgcgtctgggccaacgacggcgagatccgccagcgcgtcgaccaggacgcggacatcgccgccgaggccggcgccaacgcgcgctggaccatcctatcgctcgtacgtcccctaccaca

SEQ ID NO: 1160 - DNA, 6353 bp, Oryza sativa
aatcgctccatgttttgataatatgttgctacagtaaacatttgctaatgacggattaattaggcttaataaattcgtcttgcggtttactgacggattctgtaattagttttttattagtgccaaacaccccatgcgacatcctatataatattcgatgtgacacgctaaaactttacacctctggatctaaacatcccaacatgtactgtcatatagacagtcccaaacattaggggcccttggaggcctctataataagcttagtcgcgcgtccgtgcaatggatgatgtttgcctataatatttgttcatgtgcatagtccatatatggaatgggggtaggcaatgcccctgggttcaaggatacaacgcctgtagtattccacgtcgatgatagagtggttttgtaagccgcccaggacaccaacttgcattatatgtcagccgaatcaattcaacgtgctcttcctactcaaactacgggtgtgttttgtttcttaaaaaagttaaaatttgaagaaagttagaagtttaaaaaaaaagttaaaagttcatgtgtgtagaaaattttttgatgtgatataatatgatggaaagttggaaaagggagaaactaaacacatactcctacgactgcctactcctgccaaaaggaattaaggtggtgtttggatcagagacttaattttagtctctgtatttatatattaatttagagcattaaatatagactacttacaaaactaattacataaatgaaagctaatttgtgagataaattttttaagcctaattacttcataattagataatgtttactgtagcatcacataggctaatcatagattaattaggctcaatagatttgtctcgcgaattagtccaaggttatggatgtgttttattaatagtctacgtttaatatttataattagtatccaaacatccgatgcgatagggatttaaaagttttagggcccctttgatttggaggaaaaacataggaatttcagaggatttcaatcctataggaaaattttctatgaagccctttgaaacaaaggattgaatcctaatcctttgaaattcctatggaatagacaaccctatagagattttggaggaaatttaacaagagcttcaacctcttgctaactttcctttgagtctatatctctcatccaattgctgtgtttttcttgtgattcaatcaaacggtaattcctgtgtttttcttgcgttttgcaatcctctgttttacacttacattcatattaaaatcttacttttttttctatccctatattttctcaatcctatgattcaaaatgcccttagtcatctcttatcgcgtcagctggccgtgcggccaatcacacatgtggaaaatatcacgatggagaggagagatggaccagatggctggctaacggacctgccgctcctgctcatattttaaagcacggcccgatgcacgaggcaccgaaccattgaacctgacgacgccaacgtgcttacgtgccaccccgctgcgtccaaacaagtagtagtacgtgccggccggggaccatatatatgccacacggcgagaaggctaccagaagccggcgtgccagggacttgtgtcctggcgcggcccgtctccggcacatacgcacttggctatacttgccatccccccttgttttttttcctcttccaatacaatgtaggaggagtacgtatgggcgtatggcatatgtatcgcgtatcggggtgatccggtgaactgtaccgcgagattgtgcggcgccctgtgttcatcggaaaatcgcgcgcctttccaaagaaagcagaacaattcgataccgtgtgcttgtttgtcgcatgcttttatagttatagtactatttagttcccggcccgcacaagttccgtgcatcgtactagcagtagcaggcaggtgtaaccttgtaaggtgtgtcgattttgtagtacaatttacagcatgcatggacggcgttgacgccagaaaggacagatatatcacgatagcagtgtggtccgagttggttattttcacatttttagcgtgcgggttaagtaattcctccagattcaaatactggattacttgttaacaaaatgtatataaacacctaatatattttatttagaccaatagtatgtttgtatgtaaaaacggatattgattcatgtgctaggccgctagggtggttaactcccggaaggggaccgaggcatacgatagttaggggtctctctgatatgatattatttcggccgaaattttttgtttttaaattttttcgtgaattttggtaatatttgttcaaattcaactaaattctcattaaaatttcggaccaaaatttctaaaatttcggaaatttcggtatttcgatgaggtccgatcaaatcggctaaaccgaaaggtttaaccctgactatagtacgacacatatgcttttcgtttttggggtgagaaggagggtggatgaacgactctacatttaagtattagagaaaagtgtatggctattaatatttaaactttgaacactcgtattattttgaaaattataaattcctaaactttaagtaattgtataagtactcaaacgtatgctatatcaacaaaatatgttgcatccttaatatagtcgtaaaactttattatctaatcattcaaaatttaattactttatcaattgtcaaagttaacaaccgtactagtcacagtaacaaatattttaaaccagtcgagtatattttactatagctagtggacatttccttataattttgtaatacacatatacaatcactctaatgtaagatgaataattgcatagaagtatagaacgtcataaggtaacaaatgaacaccctcgtcaatcatcaatttgtcgcctcacataaaaatagaccgtcaacaaagaaaatccaatatacttacgaaagttaagtatactgttagttttcaaacttatagtgttgtgccatctcagtacttaaagtctaaaaatacaaaactttcctcctaaatttgttaatgtgaaatgcaagatctaagggcatgtacaatatagaccacagacaccagtggtttcaagaaccaaacaaaggtcatactacctacaatggaaactagtacaaaatatattttgcatttcagcccctatatttatatgacaatccttatagtgtatgttagtatcaaacctattaaaaactttatccctataacaaccaaaagaaatacatatgcacccctaaatactatggatccgttgtctgcctcttccccctctcttttttattctctctctctccctagacatctcgtcgccttcttctccacgagaccatcggcgctttcctcccagtccaccctgctggcgagacccctcccctcccagtgacctcgccagcgagaccccttccctcccagtccctcacgccaccgcgagctccccatctcccatctccttctctctagacgagatgagggcgacgagatcggtggtgcttgagctctccggcgatgagagagagttgggcggcggatttgccaatgagcggcgacgcgaccacaacggcggcgacggttcctctccccctcccttctttgcaagcgtcggcgacggtgcttctccggccatgagcttaccggatccggcggtggggagcagcaatggcggcggatctggcaagtggcaacgcgaccacaatggcggcagtgagcggcgacgacgaccatgacgagatggggatttggggtaggtgcacgaggggaccgatcgaatgagacgacgcgcggggctccgactcctctaacgtgagtcttcgagctgtggcttcgcggctctcgagcccaggtgcgacgcttcaagcgttccctctgcaagcgcatttccagcctgcggaaccacgcattcggctgccagctcggcttggctccgacatggagccgtgaaaccacaggacagagtgaagtgttgtacatggcctaatgtggcttaccacctactccctccgtccaaaaaaaaactcaattcctagagtttgaattttatcccacaaaaaacctacttctaccctcctaccttctctcatcacgtaaaacgagaagttttattcctttaataccctttacctacctatcactcttactacttttttcaatgattaagggcattttagtcattctcactctccactaattccatctactaggagtgctaggaattgactctttgtaggatggatggagtagaccatttctcatctcgatctctcctcgctcccatggagcaatagcatcggctaaccaaagtagagtagagcacttcaggaaggcaaaatggttgtcggtagacactgaccatggccctgttttgaagattagcctcaggctaattttgagaactaatgtttagtcttgaattggtaggctaaacattagcctagggtgatatgtttgaatccataggctaattgagggctaaaaggtggagagagagtaaagagagaggagagagagagggagatatggctgctttttgatggtccccacaaaaaattagccccattagcaccccttggaggggctaatgttttgagggggactaattcactttagccccaaattagcctacatgtttgtatccttaagggctaatttagagctaaaaggtgggggctaatttagagctaaaaggtgggggctaataattagccgatgtaaccaaacagggcccatatcgtgcatgacagtaagataagattaccaatggtaaaatgagtcaaagtgggacctagccaaggaaaagtgttttcataaggagatatcttctcgttttgtacgtgtcacctaaatagttatttttaaaaaaaaatcacaagatagattaatataaaatatattacttcacagacatgcaaggccaaatttaattttcaaaaactgtaacaaaaataacaaatataactgcaaacatactataacaattttcagtttaattggttctttttgttgcaacttgtagaaatcgattttggccttacatgtttgtgaagtgatatatttcatattaatttatattattattttttaaaaaaaaattaataactatttagataacatgcaagcaaagagggggcatcctcacgagggatgaaaatccacatctaactagccacagcagtaatcaaaaggtgaatctcttttaaaatattttacaatattttctttttaaaaatattttaaaatattagaggggcttgatatgcatgttaagtttaaagttgggggtgacaccaggtacaagtttaaagacaaacaccgtgctttaatttgattataaagtttcaatgcaagtctatctcctattcacattttaggaggagtgttgaggagaaattctgaaataataaaacccacatcgtagaaacacgatcagacgctggcaaacacgactcgaacaaaatatctagctgtagaaacacgaaatatcccatgaaaaacacaagccagtgtcaaatttaaacgcacaggtccactcacgtccacatgggcgaagccgcaggtacgagctggacagagcctgacccggacggcgacgcaacgagacgacgtagaaccgtacaccccaccgctaaccccttccctccacgtgtcccctcctctcccctaccgacctctacccactcttagtgcacccacaatagttatctataaactctctacaagaaatccatgtcagtatattttcctatttggaaggtattaaatgaagagagagagcaaaactatctactaacttagagatagtctatagagaaaaacaaggcaatgcataagagagctatagatactgacggagcgtggggctcctcaccgggagaccgcgcagacccccctttgccggttcggccggggaccctgggtgagactctaagctcccaatctgtggaaggttcgcgagacaggaagcacacaagacgccggcgatgtatacaggttcgggccgctgagaagcgtaataccctactcctgtgttttgggagatctgtgtatgaaggagctacaaagtatgagccagcctctccctcgttctaggttcccaatctggaaaagtcccccccaaaaaatcatgccttctaagtgggcaaggtcctcttttatatcttaaggggataccacatgcaccatttttccctctctgtggggacttaccctaccttttcataaatggacggagatttgcatggttgccgttcgagtcaccttctgatgggacggcccgcacctacctccactttcgccgggagcaggcgcgacgcgga

SEQ ID NO: 1161 - DNA, 566 bp, Oryza sativa
tgtcattctgagaccccgcggtaccaaagaaagcatgccatatacgaagattttttgatgccactgcttcaaggatcatagtaggaacaccttgtttaccacttgtaaactgacccgcccaacctttcggacaattcttccatggccaatgcatgtaatcgatgcttcccatgcacccaggaaaaccacgagcctcattttcttgtaagatttattcaagttcatcgcttcttggaggccgtagatattcgtcaccaaatgtttcaatcacaccttcagcgaattttcccaaaatctccaaacaagtgcttgcagctattttcaagacctcatcaagttgatcagccgaggttccataagctaacatcttgatggccgctgtacacttttgaagtggtgaatgactatttctaccaatagcatcgactctttgggtgaaataaggggaccaatcgctaagtgcatgcacgatacgcaggaacaatggcttattcatcctaaatctcctacggaacatgtcatcggtgtagataggatttgcggaaaaataattagcagatttgcgg

SEQ ID NO: 1162 - DNA, 682 bp, Oryza sativa
tgctgctgcaatcaagactgcgagtgaaaggggtatgtccagaattgagctagaaccagactcaatgatgctccggtatgcgattcagaataattcctttaacctttcatccttagaaggagtgattcttgagattaaacatataattttgagctgttttcattccttctctgttagctactcgccccggagttgtaataaggtggcacatgagcttgccgcgtatggttgtaatctccagaccgtgtcttcctgggcaggctgcccgcctggtctggaacggctggtatccagcgattctgctggtttggtaatataaatctctcggtttccctcaaaaaaaaacgcctgcatatttcattcctcacttttcagagaagccacaaccacaaaccagcagcgtgaataatgtttattacggagtaatcactatttccatcagctgacaactttcgatactgaattactgatactcgttcagtctcctgcatacacattacagataagtactgtagtatttttgcatctatgtcatttctcaattactcctagtgccctccattgctgagcggtggaaccttttttttttttttagagaactctgagcggccaatctatccatcgttgtcctctgcgccagatttgggtgccactcgacttttgggtggtggatctatcacga

SEQ ID NO: 1163 - DNA, 1119 bp, Oryza sativa
cccgcagcttggagcgcgccctggggcgtgctgccgtcgccgtagacgaggaggcgacggtccccatctcgccgttctcctccatcgcccgcgatcggtgaagccgcggatctttcgaccctttcgagcgcctccccctgcttaggactttggcgtggagggggcggtggagtacgagctcgacggcgtgggttcggctccccgtcgtcgccactcacactgggagagaggtcggacgcctttgcttgctcagccatgaggctgatcaagaaaaacttgacgcacacggaaaagtgcgagagctcagaaaacacacgctgagccccctacctggcgcgccagatgacggagcgcggcgctcctcaccgggagaccgcacaggccccccctttgccggttcggccgggggctcagggtgagatctcaagctctccgtgtatgcgggaagatcgcgacctcccaaaagagcatgaaacacaagcgatgtatacaggttcaggccgttgagaagcgtaataccctactcctgtgttttggtggatctgtgtatgaaggagctacaaagtgtgagccaacctctccctcgttctaggttctgaatctggaaaagatcatcccctttctctatgggccaggtcctccttttatacttcaaggggataccacatgcacccctctctttccaaactggacttttcttctcttcataaatggacggagatttgcacggtcgtcctccgaacatcctcctgacgggacgacacacacctacctccacttctgcctgaggcgggcacgtcgtgggaaggcggctgtgtgctgacgacatgagcagtgtcagaccggtcacaaatcggtcattcttgtccaccacgcgtcggcttagcaacgtgcatgcttgcccttcttcaaacaacatcttgcttgtaatggttaggatgaagcctggcatatatcgatcggggctaacgtgtcatctctgggatgtaacacgctagctccagccggggacgagtgcctagaagctctcgtcttgacgggatggggcgaagcgtgcgtcagaccgcctgtcaccacctaacccgcgatttgaccggtctgtgactggtcacagaccgg

SEQ ID NO: 1164 - DNA, 567 bp, Oryza sativa
atgtaaaggcaaccatcttaattgcaaggaaatctttttgtaattgtgctgttggctataagaaactatttgaagctaatggataaactttaggcaatgcaagagggggaaaaaatgcagaaacagagcaacattatagacaaaaccgaagttgatttgcagaagcagacaagtgtagtagtaacaaaattacatttgcttcagctgaaggggtggcattcccagctgcaaagaaagctccacccagcacaactatcctcttaaccttgcttgcaaaggaggagtctttcttcatggcctgagaaagaaataaagcaaaagtgttactgccagaaataaggttttggtcctagtaagtagagtattaattaagaggcgttagagaaagcacatattacataccaatgcgatattagtgagagggcccaaggcgagtacagagatctctcctggagattctgataccttatcaaccagaaactctgcagctgactgctcaactttgttggtggtggtaggatcaggaaaggacgtgttaccaagttcatccgatccatgaacaaaatc

SEQ ID NO: 1165 - DNA, 682 bp, Oryza sativa
attcctgcagccctatttcttgctgtgccaaaatggctttacaagaattgtttcttttggccctcagaagcaacttccataatacaaagtttttctttttagcaaagcattgttgtaggcaaaattccagcaatagattgaaggttggttaattgcgacatgcttaaacaagtggcttacaacaagaacaggtatggttccagtaagtaaaagtacctaggcaacagaagatttagtacaaacatgtggattcagtaattagcaaacaaataatagttgaggcctgccactaacatactgatgtatgcaactattgcataagcacaactcatttgccattgttatgctttgtggataacaaaaaactggcatactagacatcttaactcgattgaaggtgtactacagttatggatatggagcacctgaacaacctattgaaagagagagagcagaagagagcattttgtgtgtcaacccgcgcgcgcgcgtatgtgtgtgagagagaaagagagcatacggcctccttggagatgatggcgagctcccctggcttaacaccctgcttggcgaactcccgtgccgcatatccctgcaaaatattcagagagaaattaggaacaggaaaaaccgtactttcgacgagatccggaacagaccaagatcaaataaaaggatccaa

SEQ ID NO: 1166 - DNA, 612 bp, Oryza sativa
cctgcagcccggagactaaaccggggtcggccagagtaatggactgtttgtaaaccaaatttgaaaaatcaagtttccttcttatgtctggctggaagatcaaagaacagcaaatcatcaattgattcatttgccagctagtactccagttgaaccatcagttatcctaattcattcccttttttctaatgttcagagtacaaaaattcatttctggtaatgagatgggatcgctgtctcccctctccgctatggcatctcatctactccgatcctcaccgagcataactttgactaattaatcagagtatcatccgcaaccgaaagtaaacatgaggaagagagtcttcctcccctttctctaatttgacagaaaaaaaaagaagagaaagaagcaattagtcactaacagaatttgagcatcagtcttgtcgatcgatcagcattatctgctggtgtcgccgccgggcgccggtgatggtgacgatgaggaggaatactcccatggcgtcatgtccatggggtagctgccgagcacccggaggaaggaggtgaactcctgtatctccgacagcgcgttctgcgccctgacctccctcatggacgcctgga

SEQ ID NO: 1167 - DNA, 1122 bp, Oryza sativa
tccctcatcccccacggtatcctccccctctgcagcgatccagatcgcgcctccatcttgaccattatgacggcggtcggggcctcagaggagcaggctcctaagggccatgacgacgcaggcgggagccgccgaggggatcaatctacccccggagggggtcgtgcttctgggccccgcgtcgggggctcggggagcagccgccctaccgactcccgggggaagaggaagctgggaggaacacctcccccatctcctccccgagggggcggggcggtgcgcgccagcagcaggcgcccggagggggccgcgccagcatcgcagcccgagggggagcgcaagaagaagcggctgcgcaagatgggggagacagaaccatcccggggaaacctaatttcccctccaaggtggtcatttaccgaccccctcgcaggttcgtcccacgctcattgcgaccgtcttttcttctatcccaaaagcaagttttctcttacccatcttgtttgccttctggtttttctttctgcttcagtgatatctcatcgcgttcctcccaccatcccaagtccggccagtccgaggccgaagatccggcggccgcagaggcacggaggcgggaatctgaccggcgagaggccgcagaccgcctacgggaagctgaagaggccgcccgggaggccgcccgggctcgccaggctgaggataccgctcgggaggaggccgcccgggctcgccaagccgaagaagccgctcgggaggaggccgcccgggttcgccaggctgaggcgatggcggcttccgaggcagttcgcgacgaggccgcgggcgcctcgcttgggtccaccccttcgggcgacgcccaggaccaaacaggtccgggggcggctcgcgacgaggccgcgggtgcgtcgcttgggcccactccttcgggcgacgcccaggaccaaacaggtccgggggtggcccgcgataaggccggcgcgtctattggcgggccgagccgcgcggcatcttctccaaggcagcccttccccacgccttccgtcgccccgctgagcgcagagccccttctgcaggccttagccgccgcaaataccgcggtgttggatgggttaaatgccc

SEQ ID NO: 1168 - DNA, 10518 bp, Oryza sativa
  unsure (1)..(10518): unsure at all n locations
ctcgctaacaaataaagaagtaaataaagtatgtgctagttattcaataacaaaaaaaataatcaaggcatacaatattttgtacaaatgccaaaaaatgtataacattaaatttcaaatcctcgacttactgcaatatgtttgctctgcttatccatccaatacatgagcgcgcctcttattcgagcaacagcatcataccaaagtgacaatgcaggttctacacccagaggaggccaatgatgtttgcctccctcagcaagcggggccagtatacttgagagcatgttgcacaaagcatgttgcagttcactctttcttttgttgggaggacgatttagaggatttgcttttgcaatgaaagaaaccgaggcattcagtccaccctctgtcttcacctgaaaaagtaaattcttaagtatgtaataactacaattcaaactgaatggcattgttatgtacattggttcaaagatgatggagtgaatagagtatcagttaagttacttcttgtgtatgtagatatgtttttcttaacaaaattaaaattctgcaaatcaaaaggtacttttgggattctatgtacagtggtacacaagtaaaaactttggatgattcagattcatcaaagtgctaatatcagagcatgttttggccagtgaaagtggacttgtaactgaagcatggtagtggtaccatactacctgatagaacatttggaattttgtaagacagcatgccaagataaatcagattgtcattgccatgcactttaaatacttgtcaactcactatgaactggcacagaaaattaaaataataaagcgatctttgtatcgtacccccaatttaaggtagcgcatcccattaataatgctgagtgaatcacttctagaaagaggcgcatcattacgccgactattaagctccatgaaaaacctttccgtcacagaactaaacctgtatgaatcatcagaattttaagtaacatagacaaagaggtcatataacagtgcagcagcttttacatggcctccttccctccctaatttgaagtaacatggacaaagaggtcacatatgtcttttatttaaacctttccttcaatatattatatataattaaactgcaggggcctcccctgcagtttccttgtcaagaaaaaaaaaggccacataatattgcgacagtttttacatggcctccctccttcgcacacaccccttatccatgttccatgtaaatatagagcatacctgatacgagataaagctcccaaaagttgggcaacaagatctaagaggagacctcgcaaatcaaccaacgagggatactctacttggctaacaaccctgcagaaagtaaagaagttggtaagaaactcaacttctaaagaatataaagtctttttttcctggcaatcaagaaacaaaatctaacataatgacaaggttcgcaaaatttggcacaagctgaaagaaacaagaaagcaaatatttattgcacatgatgtgctgttttgatgatatgcaaagccaaagataaacaaatttaagatgcaccacaggcgtggatgtgttttatttatcatgtgagaaaacctaagtaaaaaaaaggcagtaatgcctcacctgtctgcattaattagccaatcaaatacaaaattttccaggccaatccaaagtttctctagataaaataaaacagctagttagccaacccatcagaaagtagccgtgcaaataagtcaaaatataatattataacaacctgttattccctcttgtgggcaatactcagcaaaacgaatgcaggctgaacagaatatgcactcgacagcaagctggataaggggtcagaaaacagacatgaggatttttagacgagagtacgcaaatgaaaatactatgggagtaaaagttttgagagatcagggatcaaataccctgctggcaactatttgcaactatgaaataatagagaaattatatgtgcaagaatgcctgtctgatgctgcttaatagttagttacaatcgaaaatgaagtggttcttgaaaaggagagggcaagggcaatcaacgacaaaccttcttttggaacgttgatgcgtcatgtgcgccttttggtgattcactgtgcgacagtgaagaacagtagttcagtaataaataagggagtgcagagaactcattgcatatttgcattgttcaataatgatttcggggaagcattaagggatagggctagagctttcaaagtcaaggtgaataagcatacctttccctccaccgaagaagagcttccaaaagaggcaaaggtgtgtgcctagcaaccatggcaagtgaatccaatacttgctcatagcttggatcagatggacggaggtattgcccatcctatgcattttcaaaaataaagaaatttagtgtcagatgtattttctgtaatagtaataacatttgccctgatgatataagctagtaatcaattttgaagttgttcatctggcaggtaaaataataatgcctcaagaaaacaagagaatgtctaggtagaaaggttcctccatgcagttgagctaagtagtattgagagaaacatcatcgtgctcttggaaacatgacccagtattataggtggagcacacatgtgaaagtaacgagaccatcaaaggtggagtacgattttgagcatttttcaacaatgtgggcatgtcgcagcacaagcaaatcaaattcaaatggacacgcatgaggaggcagtttcatagagaaggaagtagcagtaataacaatggtgggatggcaatgatttggagcactgatagaagcggcagcatagagcaattgtactttgaacatagggtatgggggaaatccctaggcctaagcggttggaagaggtggtgcacctgcaatcgatccaattcgaggagtgaattggggctccagtgagatgaagagggtgaaggaaagaaataaaacaaatcagagtgtggagccggaaccggaagggcgatctggaaggggggtgaaccctaggaaggaaggaggtgagtccgtcccgatcccgttgtttatccgtgagggagggaagaggcaggccccaatctggtgatggaattccgggcgaggcgaggcgagaggagagaggagaggagttacctgtgcctgcgcggtctcgatgcggcggcgggcgagcgggaggaagcgggcgaggagcgagtcgacgatctgcttggcggcgccgccggcgcccatgtcgggcgccgtgggcgccgcactgggcggagtggggggcaggggcggtgggtaggagacggagacccccgcggctgcaagcgccgcggaggtgctgaggtggtgggaggagcgtggggtatccagcttgtgctcgcgccggagccagcctcccgccgatgctgctgccgcctcttcctccttctgcctccttctgcctcgcctctcctgtcctctcctcgagtgctacctgtggtgtggtgtccccttcctcttctttcttcttcttcttcctcctctttaccaggcaccaagcaccaactgtttaggcgtcatcaacaggttacctgcttattatttactgcattttccttcccttctcattctcctactttaatacatgcaatgttttttctcaaatgtccctaactatgtttcttttattttaattttaacttgcaggtggcattattaatgcattccataaaaacaactacttttacataaaattgccattttagactttagccattttcaactgaatggtggattatctgattttttatatatatatcaacaaatgtattaactattgtactaagttgaagagttatttttaaaaaaagtactctagaaaatttacacataaagatttttttttaaaaaaaacatgatctataatcgggataaaaggagtgctccttctaatttcgacttgaggccatttgttcaaatagatcctccaagctcattctttcaatcaaaatagtcatcgagatcgtgttatatgggggcaaacacgcccaatacccatcgttgccatcaaaattattttggttttctcaaaaagaaaaggtattactatgcccaccctctttcaaacataaaaaaagaaaggaaaggaaaaatattctctttttatttttgaaaaatctactatgatactatgaatttggtttagcttatgtagcagctgtctgggtacaactttcgctagccttttagtccttccatgacatatttgagggtataatntcattnttatatataatctccatatttgatgttgagcatttatttttttgcctttgaaacaaatgacaaatacggtgaaaatgctaatgcgcgtcgtgcctttctatttttgcctaatttgttttcgaatcgggtcaacattccattttacacctcacatcgtgtggtttttttactaaatccaaatagttgcatgcgtgcttgcggcccaaaatatgctccttttgccttctgacctttttcatttaaatatttctatgtaaaaatatttacactttaatattatttatgtataaagtttatatatatttcatgtatatgtatatgtatatagtttccctacaggtataaagtttttatataaaagttttatgcatacaaaaattctatatgtggtgtttaaaactgatgaaaacgaatatgaagtttgcgcacgtaaaacgagaagccactagcacatgattaattaagttttaattattataaacttgacaaatgtatatatttgatattttaaagtaacttctgtttataaagttatcacacgaaacgtaccgtttagtagtttgaaaagtgtgctaatcggaactgagataaaatctgaatcttaataagaaaatagtaaggtgttaggttgatgagttgcatgtagctcataaaccaaaaacttgggttgaaaggagaaatgcgcacgtgcgtacgtgtctacacgggctatgcgcgcacacacttgcattagagcggtactagatacgaagggtgtgtttgatataacatgaactaaagcggtgaattttttatacttatgaatcacgtgatatcataggcatgttttttaagctcttacaataattttgtaaaaactttcttcattagcatttcttaacccatcaactttatcgtctatgttctcgaataattgccataagctcgatttcatcaatcacgcatcatcaagaatgcactctttactggaacccaagtgaccaaaatagatattctctcgaataattatattaacttgaataattatatcaagagacgtactccgtatcaagtagtaatactcaatttgatttataaaaatagttatcactacatttcaaagctaaggccgtgtttagttgcaaaatttttctttaaacttccaacttttccatcccatcaaaactttcctacacacacaagcttccaacttttccgtcacatcattttaatttcaaccaaactacttttgtgaactaaacacgacctaaatagacatagcacagtgtacaaggcatagcaccataaatggagccagtgctcagtgtagaatactactccactaataattgtgtgctgtggagtactactaaattgttgccacttattcggcatcaatgctcccttttaatactaggaagatggttgagggtaaaatagagagaaatttgaataagagatgattgatggggtaattagtactctagaattgctattattttgggacaaaatttgaatcctagaaatacaattattttgggacggaggtagtatgtttttttgaataaaaggtttacccgcagctttaatagaatagtttgtctggctgcttttaataatcttacttccaactgtatatatatagataacacgtgcctaacaatttagaattattagattttctaattataggattctaatgaaactatctaatctaaacttataaagtaagagaagtattggtccagatccagtgttttgtcagcaagagccgaggacaaggaaggcagagagaagtgaaaaataatagtaaacgggcctgaagggcctattcttcgtgcatcgatgacgggccgacatgtgcctagtgggccgattttcacacagtggactgcctgctgcttactgtgcagtcgagttttggctgacggtgacgggcaccgttaccatacatactactactactagctgtgtggttgtagtagagtgctccctccgtcccaaaatataccagccttgtactggatgagacatatcctagtacaacgaatctggatatactcctattcaaatttattgtactacgatgtgtcccattcaataaaaaatgttatattttatgatagagagagtagtaaatttaaatctaacatagattattttatttgatactttgctcatagtatatctttaccaattgatttattttagcagccacaatgataaatcttacttcctccgtttcacgatgtaagactttctagcattgtccacatacatgtgtctagattcatgtatatgggcaatgctggaaagtcttacattgtgaaacagaggaagtattaagctttcagagttaaaccacccccaaacacacacatctaggagcaccctttcctacatatccatacaagacaatccatcccatcaaaagcctagcttgtacattaatcagcaatcatttgttacttgggatccgttggtagaactcctaaatttaactccaaaaattatgtctaaaataaagttgtgaagctacctaaacctaactttacatatttagttcattttatgagagagcttcacttccatttataggtgaagctaaaactgtctagctgggctctagctctagaagaagtggagctggagctcgaggtgtgtcaaacagtcacttactatacctatgcacgactttcatctatccggcagccaatgaattttgtatcttccccttttatgtactctttgtgatagtttctaatgcagtgaatatggataaaaattacaaggtagcattacgtggacgtagagccaactatagtctgttgattgttgtacttccgctaatacttctgcaggtaaataaccaaacgatactattaggatgaaatcttttgaaagctggtgggctgagagcaggtacaatagcaaattattagccagctacgaaaatattttaatgagataaaagatgagagagaataacaacgggctacatatttgtagccagctgcagcacagactccaagacgcaatgtgtatataacaggtgggaccatatactaatagtgtagtaaacaattattatatgattggttattagattaactataaataaattggagctaataatcggctatactattaggcaacatatcctatgcacacgctacctatgatgcactcatgcactcagcctccatagaccctccgatttctatccaacggatacaaatcttaggtgagcatttttgcagaaaaccgcccgcatcctacacctaaatttacaggtaaccccctcgcttgcttttctcctctcttgttcattcttctccccagatcgatccccaatcctcttcgtgctgggcgacggtggcatctccaatcgccctcgcctacatgcgcgtcctcctatcgaggctggtgagcaagcggtggccgtccggcgccctgtccaagcgctgtatctcgcagccacatggttgttctctgctcgtggcctggttttgccagctatataggcgtggtggtggtggtcgtcacaacggcggggctcgcgctgacggcatgcagcgcatttagggtgtttctcttcaggtcattagcacacgatgtttgattgggtcaaggatgatcaattaggatgaatcgatggcttatggttctctttttcttctttgctgttaactgaatgcaaaagattttgttttgatttctccattcaagtcttatacataatttgaggtgcggcgttttgtgttaactggctgcgaacagtcgttttgtgctattgtcatggattcagatgtcaatatagcatctggtgtaaaatatattgatattgttagactgttccctctcttacagaaattgcaaaacactggtgacagtgaaatattgctgaaaattgaattgtgatctggatcaatttctcttcttgtttttgtcatcgattggacactggtctcctcctccatcggcaaggtcactgcttggaggtcagccgggccgtgaccctgcttgagctaggccatctcaacattcagctgtgtgtggatggatacgcaaccgtcggtggccatgatgcaggcacctcaacaagaaggcagcgcgtgcatcaacggggcgattggggatgctgccgtcgcccagtcctacctcgagagaattggggatcgatctggggagaaggttgaactagagaagaggaaagcaagcgaggggtttacctgtaaatttgggtgaataatgcgggcggttttctgcaaaaatgccgcacctagatttgtatctgttggattggaatcgaagggtctacggtggctgagtgcatgagtgcatcatagattcataggtagtgtgtgcataggatacgttgtcatactattggctaaccttgctcggaggtgaaaataaactcacgagaagaatctcctactccagcaccgagtgcaggggaggggatggggtggtggtggtggtggtcggtcaatactccactgggagtactggagacctggagtggagcacaggaggacagaagcacagaaattaatgccaggctttggagaaccccgaggaaacgagtatgcaggcatatctttgactatggagtagtagtatattccactgtagtcactccgtattatactattatactagcactccctctcttccataatatagtaatataaataaataatattatataaataaataatattatagaacggatggagtaaatatggtacttaatataaataaaattgttactaaattgtactagtaagtaaaaaacttaaatataacttttacctatacaaatgctattcaaacgcacaagtacccactctagaaacgttggctggtatgtccatcatcacttaaaaaatagctgtaaacctgagcataaatgcgaagtctaacgcttaaaccccgttgtcgaaacagttgagctacattcctttggcatacttaggggctgttcactttgttgtcattttcaaacttatcaaatttggtaaaattgttaaaaaaaagtgactacatttagtttgctgtcaaattttagtaactatataagaagttaccaaaattttggtaatgctaaaatttggtaaagttgaaaatggcataaagtgaacatgcccttaagtagaagctgattcatttattcttgttgcacttgctctaagagtaaggataatggtagagctcacttcctattattagcccatcttaaagccaatatatataatagattagctataaggttggctacaatattttcttctcctctctctatctcttaattatgcatttaatgtatttgtcttggatcttgtgataagctagctcttgcataagagccaacacccttgatttttcactacctctctcctccctaagtttatagtaggcttatagctcactattatacttgctctaaggccattcctaacccaatgattaggatggtgtccataacattaaataagttgccacctagaatgaaaattgatatggcaagtgaataaatgagaaaatagaaggaaaccatattttgcatgagacatggtttgtacacaacatccaagacatcatatgagataagtagcattaaatttaagtatgtaatagtgatgtttgtattggaagagtagtgtctagtactagtttcttaatgatgtggagcttatggaaactatgtctaatgtcttggattggaaatggcctaaattgttaaatcatacaagtcatcgtgttagtaagtttgtcgtaaaaagatacttctgcaatttcaaaatgtagctaactagtataggatgggatattacctagtgatataaatctggacatcccatcatgtactaggtatctatattttgggacggaggaagtactattttataagtaatatagttatagtgttaattttttttagaaaatataattaaaaaggagatagtacagtagtaaagacacataataaacataacagtgtgtgttggttagtaaatcgatgtcctgtgttctgttgtgggacttttagtaaacagagcagccaggggaagggcccaggcccaactaacaattaaaggcccagttacctgcatcttttcccttcttccctagtcttctcctctcctcggtgctcagttccttcacgtgctccagagcagcgtggccatggcgaccgcaacgcgagctccagcatttaaacccgcacccgtcccccgcttccctttgttagtt

SEQ ID NO: 1169 - DNA, 1245 bp, Oryza sativa
cttgctcttcaccacgctgacgatgacggtcatggcgttcatcctcaggatagacattatgtctatcagagacctgccctgatctgggattattgagccttctttgcttcaatagcctttgccgcaaatctgaactgtctgcagtcaaaggcataggttctctctgagaaaacctactctctgacaacaatttctcagctgaacctctgtgtgacctttcaaatccataactatcatgagtttgcctaagcatcccaatgtgctgctccccgttagtacgacggtaagcaccacggtcttccctgagtgactgttcagtattgtcatcagcaccaccagtaagaacatcagaaccaggagaaggttccctcacaaattcacccatctccacaccattttcagctaaatcgtctccagttgagggtggaggtcggtaattctttgttacacccgatggcatataagaaccttttttatcatgaataattcctgacgagtgaccagccctgtttgtcaaattttgcttctgagcagttttgccattatgagcactgtccttaggcttgtcaaatatggcaggaggtgcattctgctgagcagaagagtttggttttgtccacgagttcttcaactgaggatgaggcacagaagcaggagcaaaaacctttgttgtgtgctgaggggcaggacttccagtagcctgtggcaaatgcaagaaggcgcacctatccccttttacgcacatgcccttttgaaagtaataacatggaactccttgcttggctgtgccactggcaggattaggcacaggagcttgagcaggcacagaaacctgtggtgcagattgttgagatgttcgtggtgttgtgggtgctccgaccaggccatccaacggctgaaaagtgagcaagattattagttatcaaccccaggttgctcgtagtatttgattgagtaagtattatcatgtgcagttgtgtacaagaattgttgccacaagaataagctaattggagaaacttatatagtagcttacagtgtcggcatgtttcgcagtggcactaaacatataataattgcagtagttttggttgaagaaaaaaaaaacggagagcaagggagtaccgggtgcctgaatgagcatttaggattagcgcagttgccattgaaccaataccagcaatccctaggattcatcctggcagcatcactatgacggtactcacattcacttccctgagtgag

SEQ ID NO: 1170 - DNA, 4817 bp, Oryza sativa
  unsure (1)..(4817): unsure at all n locations
ttttgcaattactaataattccatttaatttccggttacaggtgacacagcgtcggggaactggagggagagggtcgaggagtaccttggtctggagcctccagtggcacctgatggtcagaggcagacgaagacatcaggggttcctttgagttggttgcgagccaacttcggtcagtgtcccgctgaggcagacgaggctacagtacagcgatactgcagggcgtacgtgctgtacatcttcggcagtattctgttccctgactctggtggagacatggcttcttggatgtggctgccgttgctcgcggactgggacgaggcgggtaccttcagctgggggtcggctgccctagcctggttgtaccggcaactctgtgatgcttgccgaaggtaaggcggggacgcgaacctagcaggctgtgtttggttgctacaggtaagttcacgcatgttatgtttcataacatttcaatttcttgctaacatgttggaagctaacgtatgtgacgcaggtttggatgtggatgaggcttccagttggtcggcccatgtggaggacccatcaggcttggccgcaccaggatgcagaccgacgtcccactgtagctcacctgtgggaatcggccccatctccagtagtaggccgcaggaatttggcgtactaccactacacaaacgagatggactacctacagccagaacatgtaagctattcggggttctatcacacatgaagatggtttcttactatatagtactaaatgtgcttcaatgtgttttatttttgttgctgcaggtggtgtggatgccatatcaggcacaggaagtgctcgagctagaactgaatcccatgtgccatatagaggatgcgttgaagaccctacggtgcccactgatctgcttctatgcagtggagttccagatgtgccaccgcgtgatgcggcaattcgggaggcttcaaacaatcccgcaccgtttctccacgagtatcgacctacacaagttagtaatttcacttaacaatttattttgcttgcccaatcagtcacttcaacatttactacatatttgagttggacattttgcatacgtgcagggtggaccgtcggaagaacaagaaggtgactgattgggcttactaccatcaggatcatatcacgcaatgggagaagttcgaggagaatggagtaccagaccagggtcagcacaacgggacggagttcgacttgtacttggcgtggctccacaggacctaccgtcttgtcctacgtccggcttggacactagccgacatagcggatgaccccgaggatgttgaggagcagaacgagtacgatactcgtacccgtctaggtaccacggtcgagacgggacctgttcgcgacagagtggttagtttctagcattaatgttgtatattatttcatttcaatgccatatatgttgtgacttacttcatttcaatcctacaggctcgagagctcttgcggaccgtcaacgacgcgggagtggcgctaggcacggctcctggctccgaaggagaaggcggcaccctccgcaacgccctacaggtaatcgttggaaagagatgaaactacggtgttttcttccaaaagcgataacttaacatggattattttttatgcagagactacggtagcgatgtcgggagttggcagcaaggctcggctgcaggtcgactgatgtggtcgaacatgctcatgcccaccaagagggggatgaagaaggggaggtgggtgacgaggagggcgagcaaacaaagaggcggaggaaggagatgaggaggaagaaggggatgaggacagagaagaggaggcggatgagctcggtccctcgcagctagaggacgcaccagagtcgtcacagccggatatctcgcagcccggcccgtctcgaccacgacgccggcgggctccttcgcaggactagaggtacacccccgacgtgcctcgtcctcgcactagaggtaggaggaggtgagtgcatggttcaatggatggatggatagatggatggacttgatgcatggttcgatggatgtatggactggatgtatggactcgactggatgtatagacgaggatcgatgggatgcttttatttcttatatatatggacttcatatatggatgtattgatggattctatggatgtatggaatgatgttgggattgatggatggatgtatgttttgtatggttctctggatatattactgcctgtaaatntctgtgatttgatgtttgcctctgttgtgtgcaaagttttgctaaagtttagcagggctgggacgtcagcgccatgctaaatggcgctgacatgtccaaactcagcgccagtgcacctggcgctgaggtcccagcccagccatccagaaggcttgctgggctgggccacggccgaaacggccaagtcccacctcagcgccaggtgggctggcgctgagtttccaacagtcagcgccattatggctggcgctgaggtcccagcccgcaagccatccagcaggcttgctggtctgggccttgggggttgcggccaagtcccacctcagcgccaggtgggctggcgctgagtgtcccactgtcagcgccattatggctggcgctgaggtgccagcccgcaagccatccagcaggcttgctggtctgggccttgggggttgcggccaagtcccacctcagcgccaggtgggctggcgctgagtgtcccactgtcagcgccattatggctggcgctgaggtcccagcccgcaagccatccagcaggcttgctggtctgggccttgggggttgcggccaagtcccacctcagcgccaggtgggctggcgctgagtatcccacggtcagcgccattatggctggcgctgaggtcccagcccgcaagccatccagcaggcttgctggtctgggccttgggggttgcggccaagtcccacctcagcgccagtccggttggcgctgaggtagctgccacgtcagctggagatcggcccggccgccacggtagcacaatgtcagcgccagtcccgttggcgctgacacggccaacgtcagcgccaatgtgtttggcgctgaggcgacggcctatttttggttgaagtttttggcagaggttagtttcgaaataagttttccaaaagggtcaatttgtcaaaaaaagggatgaatatgcctatacaggctttacaaactccagtaccagaagtaaccacttaacggtaccggtccgtatttatagagctagaggtgtcaaattttggcgtatcgtttagacaataataaaaaaactaatcacagaatctgtcagtaaaccataagacgaatttattaagcctaattaattcgtcattagcaaatgtttactagtaccacattattaagtcatggagcaattagatttaaaagattcgtctcacaaattagtatcgagatatgtgcaattagttattttttagcctatatttaatacttcatacagatgtccaaatatttgatgtgataggtataaaatttctgaacagggcatcataaacagctgacaaaatttctggaataacagcttctcacgatgaatggtgaattagattgttcgagagatgtttcgactctacggtagcgacatcaaacagattacatcgtctccgtgcataaatgaacacaacaggtaacaataataatgaatcaaacactacactggagtcccttccccttcgggatgtcaccaagcaattccaatatacacactagccaagaaaaaaagaaaagaaaagagcttgtgccactcgctcatgctgtatgtatgtgtatgtgcatccaatgaattgcagtctacagctacaaccatacttcaaacctgcgacctctgtgaggttgcaggataaataaacacattccgatattacaacagtcaaaattgagtttggttagggtagtctttcggtggcgggaagtgctgcttcttctatcttgtcaacctgtgcacagcgatttctggatcacgctcctagctgtacaaaattggctgcattcattcattcagttagcacatatagccaccaaacattttacataggtcactcaactgcattttctacccgatgttcgccacaaacggcacaaggcgcttatgatccctcttacgcccaagagcgcatgtatcaaggacacgcccaagcagcaaccgggtattctgcagcgccacatctcgggtggccactccagtatctgcagcgctgccaccgccttgccccattagagtcccaaaccctgaaccggcagcagcatattgaagaggtccactcctagccttgaatgatgattgaggaagaagcatgctttggtgaaccttctcccccatcccgtgaccattctcgccaaatccaatatcatcaccttgaccaccagttacaccgctgcagctccgtaggagcgcctccaacacattcaatgcctctgcacatagtgcgctctccacgagctgtgacacaacattgtacacttgaggtatctgagatggatccactggggtttgctgcaacagtgatttaagcatcagaagcaccactctctgataatccagaggacctctctcaaggagcctaagcaggtgcccaaatgccagagatgagtgcttagggaaccactcggaacatattggcggcgaagcgcgtgcaaaaagatcttctagggagatgatttctccaaaggagtatgctctgaagacttccgctaaatcatctaaagatttgacacggcaccacaccgaaatgttggatgccacatagtaagct

SEQ ID NO: 1171 - DNA, 26440 bp, Oryza sativa
gaattagacgtatatagtactgtaaaataggaggagtcaaagaaagaggagaggaaccggtcggctttgtcggcagcgttctgaagagcctggatgtacttcttgtagtagtgctggtagaagctctgcatctcgcgggcgtcgctctgcttgaccctccccttgagcgtggggtcgttctccctctccagcctctgcaggagcgcggtcttgaactgccggacgccacggccgctggacgtcgggtccagccggtgcgccttctcgaacgcgtagaacctgcacaggtacgccacccgcgggttgctcccctccacctcgttcgccacacgcaggatcggcgctatctccaccagcgacgacggcaccacctcgctgtcgaatatcgactcccccaggttccccgccgtctgcgtccgtaggatccgtcgaccccccgacgccgccgcccccgcccccgccgccggactaggactactctccccgccgcccctaggccccccaacccgacgccccgacgacgacgacgccatccaccctaccctacctaccttcctagtgctgctgcttcaagcccggaaatccccgacccgaggaggtgcagccggtggccggttgccccgcgcagcagcagcagcagcagtgggggactctctccactcatcacatcaggagtgtgagggagagctcctgcagctttctcctactactgtaaagcagaaaagatgaaaacgtttcttttcttttttgtttattttatgctactactactatcatgtgtggtgttgtatccctaacgtaaatgggatagaatggaatcatttgttggcctccgttttcctctcccctttgacgaaccgtttagaattccacgactccccctactttagttgcgaacaacacggtacacagcatcccagaaaaacattcggtggcaaatactactagatttttatcacaggttacaaaattcgtatggttttgacgcttgcttttatcatttcgaatcgataacagtagcgtccatagcaattggataaacttgcttcaagtcggacgttgcagtctgaaatgaatgctagtactagtcctgcagctgcagcaccagcacacacaccgcagcagcaacagagaggcagcgtgtgtgtcttttgataaaggcgaccaaacaatttcggtacaggggcggtgccggtgcgcgtcaaacttgtgtgtgtttgatactactactactacaacaaaatagattacttgttcctttctgaaagtaaaccaaaaagaagataaagtagtacgtgtaatttgaagcaggaaagacgatcgaaattttattcaaaagaaaatagtagaagcttaggccccgtttagttcctaaaaatttttcccaaaaacatcgcatcaaatctttggacacatacatggagcattaaatatagattaaaagaaaaactaattgcacagttaggggagaaatcgcgagacgaatcttttgagcctaattaattcatgattagccataaagtgttacagtaacccacatgtgctaatgacggattaattaggctcaaaagattcgtctcgtggtttccagacgagttatgaaattagttttttcattcgtgtccgaaaaccccttccgacatccggtcaaacatccgatgtgacacacaaaaattttcatttcgcgaactaaagatgccctaacaaggtcctaaattaaggttaggttaggttggaattccgtctttccttcatgaaaagttggcgtagatttgcagcaacgccattccatccatctgttatctcccgttctgtcttttagtagttttgtttctttttcttgttgagaatatagaaaaatgaaactgctactagtccatatatatttcaggcaaataattaaattgagtcatgtaagggcatgttcaatgaagaccacaagcactagtggtctcaaaacaccacgtaggatacaaccacacaaagatcacattaaccacaatggaaacaactccaaaacgtattttgcatttcagccactatctatttatatgtcagccttgtggtgtatcttattatcaaacctattaaaactttatattttagtccctataataactaaaagaagtatatatgcacccttaaacatcatgtggacccactgtcacctctccccctctctctcccgagtcttctcgtcttctccatagatttttattctctctctcccgactcccgagccgtatcatcttcttcttctgacactgtcggcgctctccttcttctcccaatccaccccgccaacgagacccttccccttccccgccaaccgttcccctcccagccccctcacgccgccgcgagcttctcatatcccctctcattttccctaggcgagcagagggcgatgagagatagttgggcggagcggatccaacctcatgctcgccggatctggcgacgcaggccacaacgacggcggatttgctggcgagcggtggcggggagcagcggtggtggtggatctagcgagcggcgacgcgaccacaacgatggcgatgagtggcgccgacgaccacaacgatatggggatttggggtatgtgcacggggggactgaccggacgaggcgacacgcggggctctgactcctcgaacgcgagtcttcgagccgtggcttcgcgtctcccgagcccaggcgcggcgcttcaagcattccctcttcaagcgcgctttctggcctgcggaaccacgcattcggctaccagctcggctcggctctaacgtggagccgtgtgatcacaggccgagtggagcgttatacatggccgatgtgtatgatgtgtttgtttatgtgtggactttataataattagttgtaattcgttgagcgaatgccaaaatgttattccattatcttaataaataaataaattgaggtctctgctctttcttcttgtgaatttgtatagcccagcccgcctgagatatggaccattcaggcccatcgaaatgagaaaggcctatatttatggttagttttggcccatctagtctgatctgatctgatccgatccgagtgagtaacgacggtcacttcccccctcatccactggccggccgtccgtcgtcttggctcgcggcggcatcctaaaccctagctgcggcatggagacttctctgcggctgcgcggcggcgggtcacgtccgcagtcaaagtcacaggagggcctccgcatccacgccaaggagaagctccccatcgcctccaacgcgctcctccaggtactatactatatcccgcctactcactccctattcattctcttcaccatcgattaataattcattcatattcccttgtgctacggcggcggcggaaggaaaggctcacggcgagatccacgccgccaccggcgccccgacctatctcgccctcctcttcaggaacttctatccccgtctctccgccaatctaggcctaggcctcgccatccacttccgcaacaaccaaccactaccactagcatgggacaacttctcctacaccctccgtgccagcaaggctatcatccccttcccctccaacgccttgctcgggatcaacctcaagggacgcctcctcgccgacaaatacttcaacccgggctgtctctacttgcttttattctacttgtacagtatactaccttacttaccttaacttgccaatgctgcctaccctcatgagcagaccgcccggactgctgccgtcgagttagcatggaccatacttgatctcaaaaggggtcaagatgtcaggctcaaacttggatatcaactcttgcacaaggtacttttctttttctttctttattcttctttatatatatatgcacgcccaccatcaccatctaaacgttacagccacaatgttctagctctacccacacaacttctgtgcttatctagcattttgtctccctttattctttatgcaaatgtctctttcctttcaatcaaaacaacttccaccacgagttctagaaaactaaaagggcatccatgtcttgtaaaggagcttcattcattacagattacagacacttacaatctcaccaaacactctcagtgaaaggaaacatcactagcaacgttgcaccaaaaccttctgcttaccaccgacctcccgagaccttttgtctctcacccatctacatccacttatctacgtcttgcagtcaagaccttggcaagctggctgagcaccgtgctgtcttcctcctttctcttgaaatacggaccaaagctatcagcagccaatggcatatactactgtttagtaccttccaaggatcatgtggaaccacacccctgaattgtgcattaatcctggtttcccacagggtcaatactgtaagtcaatattgacttagaataactaggtttctaccttttcctgtaaatctgaaaatatggacccaatggtgaaacaggtgtctttcatttcttggtgacatgccaaacaaaaaaggtcaatggaaatcaaatgatcaattatctccttggctctgatcccctcaaaattttgcctatacttattgggcctcccagtcattctcacacagtgcattagcctaaattatctgtcttctggtaatggattttctaaaagaaaatttatttgtttgcagatgccttatttccaactcagggaaaacaattggacttttaatgcttatatggatggaaaatgggatgttaggtttgatctgtgatcaaaaggcaatgaatggaggtagggggattctgtggtgatcaactaggccctttcctgtattccttttttttgcatcaatccatcaactcttttaaactgtactgcttcactcatcagtaagcaatgttttacagaaacctgtagatactctattgctttcatatgtagaactacaaacttaataattgtagctcttcttattcatggggacggaatattctgattctgtgtatagtaaccaatcggttggggccactagacacagccagtaaccaacactaaggtatccgcatcacagatgataccaccaaatcatgttggtgtgcattcagccataggctgtatcgtgcaccacatggctgatggtatggaccaagattgatactaccaggatcctatgggctgaaaaccagcaaaatagattgaaactgaactttcttggtcctgtgctcaatagtcatccttctctacttttttggtataaagtaccgtgataagctgcacttgtccccaccttttggcttggggctttaagtgcttggttgctccgttatactggtcctgtcttgcattcacggcgtggctgttactccagagaccaatgcagtgctgttattctaacgtggtgatacttggttgatagttcatacgaaaagaagtgctaatctgtggcatgcattgtttcgttttacccagagatgcacaggttttgcatttaggcatttgattggctttgttggcatcgcataggagctcttgggaaatattcaaagatagagatcattcgtaattggtttggtctaacatgagtggaaaaggattgggggtttggaatgctttggttgatatgattgtacgcaggaagaaaagttgatgtgtttgggcgtgcagccttgttgtttggctttctgggattttagataggaaggagtttcctccttttgcttcttcctttggtgcaatgataactgaagtggctggtcctatatagaagtagtacgtacgagttgggtgttgatcattccgggattgaaacaggatggatgttgcatcgtgagaagaaccggaggaccggatagcatgctgttgggcacattggaatgcacggccgatttctcatccttaaacaagtaagtggtactacttttaattggatgagttcataattgaaaaccatttgtgcagttgtatttgggtcacctgttgtagctcgttaatgccttctgtgtgttgtggaccctgtcagttggactgagaatatatagattcaggtgtgagcagagtgcagtgttggcagcagtaagcatgcatgttgagaaaatatctcatctggttttggagactggcatgctgagaaatatcttcctttagttgatgataagagggtgaggatgggattaggattggaattgttgacaattggcaacatggcaagctaggtagggagctgagaaaggcaacaaaattaaagaagaagtcggaggaagaggagaggtttgatgctttctttgcaatggtagtgtaggcagctgggtgcttttgggggacagggtgaggtggccgtccatgtccttttttttttgtgtgcgcgctttgatttgcaagttgcaatcggctccctcctcccgtcccggtatagcatgctcgtcgtctcttggtctttgttggtacgcgactgggaagaatcacttaatggagtgataatcaggaattcagaaatcataagtcataaccctacctcccgtaatcctttctttctgtagtgaataatctgtgtgtacattgaacatactacatacacggcccttgctgctgctttgcttacagtaagtttcaaagtgagagggggacagcaggagaagagagagagagagagagagaggtcgggtgagctggccgcgctgccacgtgtgacggtgtccacgtaggcgctgcctttgtctggcttatatatactcctactactctcctccacgtactactacgcagcagagcaaactcattcactccgatagattgattgatttgtcagtccgaggccgaggcggctccatccaagtcgagcagaaaagaatgcgagttctcgtccactccgccgagtccccggcaacaccggcggcggccatctccatcgactcggacatggtggtcatcctggcctccctcctctgcgccctcatctgcgtcgccggcctggccctcgtggcccgctgtgcctgccgccgccgaggcgccgctaccaccaccaccaccactactactacaccggctgctacatcccctgcacccaaaggcctgaagaagaaagccatcgacgcgctccccaccgtgtccttcgcactcaagcagcagcagcagcaggcggagtgcgccatctgcctggctgagttcgccgggggggaggagctacgcttgctgccgcactgcggccacgccttccacgtctcctgcatcgatacgtggctggggacccacgccacctgcccctcctgccgcgccaccgtcgggactagtacattattcctccctctccccggccgctgccggaggtgcggggaggtcgacctgcccacgctgcacgatttctccaccgccaccgccaccgcccaccacaacacacctccctagctacgtactccgatttggttgtatatgcatgatccatctttctcatcggatcgctgtttttaccacccatcaacagtgtatatatacgcagcacatctatctattaattatttcctgcgtctattataatcatcgatcacattagatgattgcatctcaatatgtatgtctatatcaatgcgcatgcatatattgcttcttcttcatttctttattttcttctcgatcgatcgccacccctcaaccatcattattctatatatactcctacagcccatctatatattcgatcgatagagtaccttaatttcaatcaacattactccttgatttagctgataatcagttactatctatcggtgctttggtttagttgaagctctctccccccccccccccaaaaaatttcccagtttttagtgcaagatctacactatatatgattatttcatatcgtgtacatatattatatgcatggtggcaaataatgaacttcttgcgtgttcgaagaaggtgtgacaagaacactgcttacttcttaattttgtcgtagtgttttagtccactgaaataatataatacttcctccattttataatgtaagtcattctaacatttcctacattcgtattgatgttaataaatctagatagatatatatgtctagattcattaacaatgtgagaaatgctagaatggcttacattgtgaaacggagggagtactatatgtcttacttaatttggagtgccatatatatgcataaattaaatttcatgtgtagtgtagatagtggcaaggcctgcaggaggcgatcaggtagctagtagagggcggggttaatttggtctccggccggtgttcctctctttatctcctggccgatgcttttccatcgcgattgatatgatgcacctcccctaaacctaaaagagcactccattcattggcctttactacatctaaacctaagccattgttggaggaattgaataaagtagagtagtagtagatgatacgtttgacctctcactagctagcagcccagcagcatagaattagaatatataatcaccgatttagtttcagccgttgcaagtgccagctccattactggactggactctctacgtcctttctctatcaaaccggtcccaacgaaacgatcgatcgaggacaaaagagaccaaaagaatggaacacaacttaaagcaacccgagaatccgtgatattatagtatttacttttttgaattgaaacaacacaataaactcttatcatatcaatacatatattctccactgatcggccctctgttcataattgtagtctcagataccttttccggctaaagattctgaatacctagatgaaaccttgtgtattactatgaaaatttcgtatgataataacataaataatatgtaagataattggacaatataattttgtatgtactttatataatttctcatatgattgactatatactgaaaaaagctacaaacaattaatatgatgtggtttataataatttaaatactgaaaaaagctacaaacaaataatatgatgtggtttataataatttaaatgttatgtagcattaatctttcaaaagcaaaattaaaatggtgtggttcaatgtgagaaggaaaataatatagattaatcgtccaaggtaaaactaaggtgatattacttcatgagaaggaatataatttttaaccatagatcaatcactctcccaatcatcttaaaatttagtgtgaaattgtacatatcttgtatcaatgccaaggaaatttaaaaccacttgttagttacatgtatctattttcttggacaatgtgggttacatcacaatcatccttccaatgctgctgcacaagccacaatcgtttgaggcaaaattgagagacacatattgaatgaatgaattaatggtacaagaattatagtgacaaaaaaggaattatagtgggcatatatagtagtaacaacaattttttttatctttaagaaagaaagaaagaaagaaagaaagaaaaatgtgcaaaacaaaaagaaatgacaaatgttattaatggataaatggtgtgttaattaatagtggtcgtcatcgtcgtggaggtttggtagggtccctttggctccgacgttgaagaagtcgatgatgacctcgagcgggaggcccttggtctcgggcacccgcagcgcaacgaagacgagcgcgacgcagcagacggcggcgtagatggcgaagaggccggcgaggccgagggaggcgagcatgacggggagggtgtaggtgacggcgatgtcggcgagccagaaggcgagcgagcagatggcgatgcagaggccacgcacgcgcgtggggaatatctcggcgcacaggatgttggggatggggccgaaccccatgacgaagcagcacaggtacaccaccacgctccccgtgcacaccgccgcgtgcgccgccgccgccatcggcgccacgctcgccgccaccagcaccgccagcgacgccaccagcagcgggatcgtccacaggagcaggctccgccgcccggacacgtccatgagccgcatggccacgccgatgctgggcagcatcagcagcgtggtgacgccgctgatgaggatggaggcggagtcgtcgcgcaggcccagcctggagagcagcacgcccacgccggcctgctccagtatctgcggcgtgtacaagagcacgccgctgatgcccgagaactgctgcaggatctggatcgccacgccgcacaccagcgcgtgccggacgccgccgggctccagcacctcccgccacccaccctccacctccgcctccgcctccttcttggtgcacaacgccgactggctcaccagcgccgccgcgtgcaccccctccgcctgctcctcgtgcaggtacatcctcttcaccgtgctctgcctcgtcccgtccgccgcgacgccctccgtccacttccacgccagctgccacccgccgccgatgcccaccgtgctcgtcgcggcctcgccctccatggttagcagcggcgcggcgatgtcaccgtcgtcgtccccggagttctcctcgtcccagtcgatgggcggcctgtcgtggacgccgatcatgctgccgaggttggggacgtcagtagtgccaccggcgggggggttcatgtcgtggaggctgtcgaggagggcgacgacggggtccttgaggtggtcgagcatgctgccctgtcgcgatgccagcgtgacggcgctgccgaacatgctgcctggcgccaatcccgaggacatcccgccgtagagcgtgaccttggcctcgtccgttgggccgacgacgtactcctcgatggccgtgtcgcgtccggtggtgagcccctcgacgaggagcgccatctcggcggacacgtcctggcgtcccctgagcatctggagcacggtcctggcctccttcatccttcccttgctgacgagccagcgcggcgactccggcaggaagaagatggtgaggaggaggtagaggagagcaggcaggaggaggacaccgagcatgaggcgccagttggggatgggcgcgagcgtgatgaggaagaccatgcagtaggagaggaacatgccggtggagccggtgagctgcggcagcgtgttgagcaggccgcgggtgtcgggcggcgccgtctcggagatgtagacggggacgagcgtgacggcgaggccgatggcgaagccgtcgacaaggcgcgcgagtaggaggatggggacgttgggagaccatagcatgaggaggccggcgagggagtagagcagcgcggaggcgatgagcatggggcgtcggcctcgggagtcggagagcgggccggagaaggtggtgacgatggtggcgccgatgagggaggtggcgacgaccagaccctggagtgcggggtgggcttggagcgccggcaagtccctcctcatgtagaggagagcgccggcgatggtggcgttgtcccatccctgaagcatgttgccgaccgccgccgccgccgccgccaccaccgcgcctctcatcttccttaattctgatcgtcctctcctctacctagctagccgcttcaactcaattcaactcgatcgggtaggcacgatgatcgacgcatgcaaattaatatgcaatagttaaccagccagccagcggcgaaatcgaattgatttcttgatcgatcgatcgatctatcacgttgttcgtatatatatatatagtacatgtgcatgcagatcgatgcagatgcatgtgcagattggaattggattaagccttgccacacggaaatgactcggcgctagctagctagctaccgagctcaagttaagacgtgcctgtccatgactaagtggttactattagtgcttacctactacgccagcttcaccagcccacccatggcatgccgacgcctatccagctcctccttgcataactcgacttgagcaattaacgagttgagttgagtttgaacttttattcgcatatcaacgttgttgttccgtgattttttttcgatcaataattaatagtcacccctccttaattttcttctcattgaactattatccattaatctaaatacatgtcttttagacaccatgatcagtcatttgttccttcctttctaactccagaaattttaccaaaacataacctttcattgcacgttataatcatgcatgatcagcaagcacgacttggtcagaaaatttagaatattttctataatattttttttgttaaactattattcaccgatgtgtaattgccacgtcctcaatatcttgggaacaattatatatcctaaaaaaggttctagggaacaattcatatttaagcaacgggacagataaagctgaactagctagttattaacacttaacacatggcacatactatataaatagtacagttttaaatcattaattcagtgtattatcgtgttaattaaatttcacgagacggctctttagcatcccaaaatataagtatgtactagttcagtagccagtgatggaattttatttttgtgaggaaccagtcctatacgtaagaccaataagagtaagattggaaaacatgatatcgaatactccctccagcctaaaaaatatcgttttagaccttttgaaagtcaataagacataaccttgatcacttaattcttttattatattctaaataaaaaatatttagttgcgtaggtataatattatgaaagcttatatgctaattaaaaatttgcagtaaaaaataaacttctgttgattgcactgattctaaaacaacattcttttgtgtttgaagggactattatttagggtgtctctaaaaaagaagtattatttagggttttcctaaaaatgggagcattatttatgtaactgttggcgccttttccaatcaacagggactcacctaaagatttatggtgttaacaaagttgccaaccaccccaatctaaaaactctaaaccaacatggatttaagagattaattggctagtggagttgatttagattgatttgaagataacactcatctcgcggacgaatcggaaggtttacgggacaaacctacaataggtattacactgtcgcagcgaaggcggacgatttatgacgcaaatcaacaaagatagacgaaactaaggtaaagtaaaaaacatggctaaaaaagtaaaggtaaaagaacaattcgatagattgtagggattatggttgggggttagaattgaatcggacatagctcgtataaaggggctggtcttgccttctcaacaccatctccacgttcaagaaaccttgggcccaagcaaggaaacatgataatcttaattgaacttggattcgggactgtcggtctgacttgccacgtatctgcggtcagactgtagttcaccctccataagccggtcacacaacggcggtcagaccggcctcctcaggaaagcttcggtttgttccatatctagcccaaacttgttataaatttctcatggtgccaaaatttgttgttaaccgtaaccattcaaaattaatgttgcatagccttagactcatctttcagcagcaatactctaatactcacccgttttgccccccatgtcctgcattacaaagtttgtcacaagtcttaattgatgattaaaaaaaatgacatatacacaggaaaaattgctttatatgcactctcttggatcaggtacccacatatacaaattgcttccgttggcatgcatgtatccgcaacaaaaccatatacatgcatagattgatcgatctctggaggtatatgcccttaattttattctatcccaagaaataatcagctgtatgcatggtataaaaagaatgatgaatcttgagagtatagagtatatgctactagctagcatgccatgcgagcgatccgtgagtcggagttgtgaattgaagtaattgggaaccatatttgcattgtttgtttgtttggcgttgatgcatcatctagaggaagaagagattgttggagaaggatcgtcggaagtagccgtagttggccttccaatggtgagccttccgttgccgatgatatcgatagcgcccttcttcatcattgcgacgaactcgccgtagtcgatgcggccgtcctgcatattgtgacgaattgaatgaatgaataatggaggtagctaggtaagtgccgttgaatggaagtaggggaaagtacgttgtcttggtcgacttcgcggatgatgtcgtcgatgccaacgtcggccatgttgtggtccctgcaggcgtgctcgagctcgtcgcggtgatgtagccgctgccgtcgcggtcgaagtaggcgaaggcggcgagcagggctcctcgcgctccagcttgttgaggtggacggtggcggcgatgaactcgtcgtagtcgatggtgccgcttttgtcaacgtcggcctgcaatatatatgcgcgaattgatcaagaagaggatatagatgcaaagaagattgagagattgagagaagtgaggacggtcttacggcgtccatgagatccctgatctcagcctccctgaggttggagccgtatctgcggagtccttccttgagctcgtcgaaggtgatggcgccgctggcgtcggtgtccatggccttgaacatctccttgaggccagcgagctcctcctcggagaggttccgggcgatgacacgcagcgccatcttcttgagcctgttcatggcggagaactgcttgaggcgggagaggacggcgggggcgagggggcggtcgggggcgacgccgtcgtcgcagacccaggggtggcaaagcacctggtgggcggtgaggcgttccctgggcggggagcggagcatgcggcggatgaggtccttggcgctgtcggagatggtgggccatgggtcggagtcgaagtcgagggatccccggaggacggcgtcgaagatgccctgctgcgtctccgcccagaaggggggcaccccgctgaggaggatgtagacgatgacgcccgccgtccacacgtccgcctcggggccgtagtgcttgcacagcacctccggcgccacgtagtaggggctccccaccacgtcgctgaacacctgcccgggcttgaagaagacggagaggccgaagtcgatggccttgagcgaggaggaggaggaggattccttgaggaggaagttctcgggcttgaggtcgcggtgcatgacgcccagggagtggcacgcctccaccaccccgacgatgacgcgcgtgatctccgcggccttgcgctccgagaagtagccgcgctccacgatgcggtcgaacagctccccgccctcgcacagctccatcacgatgtgcacgtacaggttgtcctcgtacgcgccctggatggtcaccacgctcccgtgccccgccaggtggtgcattatctgtatctcccgccgcacgtcctccacgtcctccgggctcagcagcttcctcttcgcgatcgacttgcacgcgtactccgcccccgtcgacacctgcgtgcacaggtacgtcgtcccgaactgcccctgccccagcttccgccccaccgtgtacacctcccgcagcgccggcgtctcgtgccccagcaccgccgtcggggacgacagcctctgctggtggctgcggatcggcatcctccccccgctacttgttgctgtgcttgtactactgcaactgcttggataccgatgatagcagtagtagtagtcgaccaaggacggtgaggtcgggctggacgtggacgaggcgccgcacgagtagtagttgcccatgcaacgaaacgacgatcctcaagagatgctgtttctctttcagcccagccgccgccgcatcatcgtcgacgacgatcctctctcttcccctctgtttccttccgtcaagcggaggcgtcgatcggagtcgatctgcagatgaacgcatgcagatggcagggaattaaggagaaagaggtgccgggaaacagggccgcacgctccttccaaccttggcgagcgagtggtgtgcgccgcgctacccttccttggaccgacgtgcgcgcatgcctcctcccttccttccctcactggcgatcaatgattgattacacaagctttacctacctgcaaactgtaatgcaatataattcaaaggccttccacaacatactgtactcgtacaatacaaacctcaattcagcttcattcattttattcgttgcatgtcaacacccacacatgtcaaaatgctgtttctgcatctcctagctacgcctcgccaggtgatgctgcaaccactagcttattgcaattcaattgccggcacgaatcagtttgctactacatcacacaattcacaacccaactgactgacaatcgttctggtcagcccaggaattacaaaacacaccaatccccccttcttctcctcccactagtgtccatgtgagccattccaaatttgacctaccggagcagtcctcccagatctgcaacacataatacatggcataagcatgactgccctctctgttttttttttaatctcattaacacaaaatccatttaaaagtcagcatgcctataatattcaccataatgcaagcaacgtcttaagacaatacagataaaccttttctatccccagttactaccaacacctggatctaagcaaagaaatttacaaagggaaagtttcaactaaaccacacacgtagtaagaggtttcacccacagcaaatctgcgcctggaaggagtttttcacaagtaagaaagcatatctctttttgtgattggaatgagtttttcattaacataaacaaaggaaagcagcagttattgccagcacattttggaaaacagagatcgatagcaaaaggtcatatatcaaatatcgagagcataaccgccaaagtctcggtgcaaaattaattagccatgcatttcccacattcatattattgttaatgaatctagatatctagattcatttacatcaatatgaatgtggaaaatgctagaatgacttatattgttaaacggagggagtaattaatttatgatgcctacttctccttatgattcatgccatccaaaaaccgaaaaaatgttgcctgtggactaaacagatcttgcaacaactcaacataacctcaaacatggctaacatgtatgtatcgaaatgccttctaagatactgaaaagtccagatatttaggcctattaaagtttgaatcttttcattcagagtaacacaattactagaaatcatcctgagctacaaatgttactctgaaactgctgtccaaaaacatactgtactacctatagcagttgccttaaaaaaagccaacttatttatgccaatgtatcagcggagaaattggatgtggtattaacagtaaatcgatgtccaaaacccctcactctcccagcattttccattgtccaagaatattagtgacccagtagaaattagtgaaatttgtgcttgggattgaagcgatttgaggaaatgcatacatgttgtgatcaatactaggagaatatctgaggcaccgtaaggaacacataaaaaaaaaagtaccttcctactccaaagtggaggtagagataaccctggcaccaactctatcgagctgagcaacagtagctgttgctttgagattgccggcattggcgaatgcctccaccatcctccggccaacctcctcgcccttctcctccccgtcaatgacagccacagcagttggccctgctccactgatggtgcagcccaatgccccagcttccaacgccgcggccttgaccgcagccatgccaggaatcagcggcgccctggttggctccacgatgccgtcggaggacattgcggagccgatgagggtggcgtccccttgcagcacagcggcgacaagcgcggccgcttggctggagttgcggacgtgctggtggacggccacctgtttgggcagcgcggcacgcatcttgctggtgggcgcctcgaagtcgggcgtgacgaggacgaagtggaggcggagggcaggtggggaggagagcgggatgaggtggaaggggtcgtagctgcggacgaggacgaagccgccgaggatggccggggcgatgttgtcggcgtggaagccactgacggctttctcggactcgaggcccgcgaggacgaggtcatcttggtgtaggagggagccgaagagggcgtcaacggccttggcagcggcggcggcggaggcggcggaggagccgaggccggagccgagggggaggcccttggtgaggtggatggagacggcgtgggacttgacatcgagggcgcgaagggcagcgatggcggcgactccggcgcagttgcggagggggtcgcgggagaggcggtcggcgagggtggggcgggagggggaggtgacggatgcgatggcgacggtgccggggggcagggaggggtcgagggtagcggtgacggtgtcgccgagggagagggaggcgtcggcgacggcgcagccgaggaagtcgaatcccgggccgaggttggcgacggtggcgggcgcgaaggccgtgacggagttgaaggccggagcggggtcggcgatggcgacggcgactttgactctccgagagacgcggacagatacgagcccaggcagcgtgtggcgggtggaagggaagcagggagccggagagggcgccgccgccgccgccgccgccgccgccatttggtactcggtagtggtggggggtttgggtggttgacgagtgggagtcgagtcgacccgtgtggtggagtgggtttaggtaactgagactgacaagtatggcccaccaaccaatcgcaaattcaccatcccatccaatcttgacgacgatgccgccgagatcgccgcttctcgccctcgtcttcctcgccgccggcgtcctatcctcggccacctctccgcctccgccgccgtgcagccgctcgtgcgccgccctcaactgcgactgtgcgtcgtgagcgcttacctccaactgattggcgtcccccaccatctaatcctccaactctttgtctctgcagccgtagggatccggtatggcaagtactgcggcgttggctggagcggctgcgatggagaggagccctgcgatgacctcgacgcctgctgccgcgaccacgaccactgcgtcgacaagaaaggttaggagtttctttcttcctctctggatctctctaccaattacttcactcctacaataataagcatactacacatttactctaactcaattcactgtcttagacttgaatgattgcacacgaaacaatttcagattgctgcacatcaactcacatgaattcaaatcactggacaatcaaactttatctactagcagagatactatgtaggagttttttttctttaaaaagaaacactagcagagataccccacttacgcgaaaacaatcatcttcaccctcttattcacaaccattataatgcttgcttggattgcctgatcatttttcactgggctatgcatgaaacatactatccaggggtgagagacaagcactgcagttgtttctttatgaaattttcctggtcatctcatctcttactgaaccaactcatgttagttcttctttttcttggttgcaggtctgatgagtgtgaaatgccatgagaaattcaaaaactgcatgaggaaggtaaaaaaggctggcaagattggcttctctaggaaatgcccgtacgagatggctatggcaacaatgacctcagggatggacatggccatcatgctcagtcagttgggcacccagaagttggaactgtagctttaatttggcttctccttacggaggtactccatttcttagatgatggttaaccgtatttgattgcaccaaagtttgattttttttttacaggaatgtattgatttgggcagcctaaaaagatttcttttccccttgctgcacaatttgcagcatatagtattttttttgtacaagagatttggcatgtaaactgaaccaaatgttccggctcactgggtatgggtaaaaagggttttcctttcctttatgctgtaacattatccatttactttgctttgatacgttggatcagtaggggtctggatctctttaacataataatgtaacactcctgagtctctgagcatgttatggacaaactctggtgcttgtgtaatcagtggcgtctgttgattgattgatttggtgcttgaggatgaaacagtaggcagtgggcacacacaactggaaagtgtgttggaaaacaaaagacattacacataagaaatgatagtattaccgttaatttgtagtatctgagagttattgaacactcttcctacagctagtagtacatactaatgtctttttctatatctggggccagtgaacaaataattatactgaaggtgaagtttactgcagaccattgatgagtattattagtaggatgttgtctgttcatattattagtaggatgtttcctaatcaaagatgaatgttcataagaatgaacaggtgatggtatggaattttttttgaacttttgtattttttattttaaaaatagatcttccaaaacttatttccagaatccaaaccttttgattgccccgttctaggtggcaaaatatcttgccatgcgagggaaggtggtgtggccaaataatgcagccgcgctaaccagaccgatgtgaccaaataacaagcatgcttgatagcccaaattttacagctgtctagctgtgttgtacagccaatccattcagctgcacacaaactactgctctcaacacttgctagattcaacacctataggttgtagctactagtggctagttacaactgttggttggctgcgttgtggcaaacaagtcttccgaacaaggccaatggccctgtttggatccaagggttagagttagtttgagctagttagggctcaaatagccctaaaggatccaaacatgaggggttagattggggctagttgcatctaacccaccaaaaaaactagcccctccaagaggtgcttattggagctagtttgagtggggcccaccgtagaagccacttctctctctctctctctgcccgcactagatccccatctcttcccgatcccgcacgggatcctctcgctggacgctgccgcctccccgatccacgccgccgccaccacggatccgcaccgccgtccccgatccacgcctccgccgccgatccgcgcggcgcgacctcccccactacccacgccgcgccctccctccaaccgcgccgccagccaacctcagcgccgccgccagccccaagccgcgtcgcctccatccaaccgcgccgccggccaacctcagcgccgccaccgtccccgagccgcgccgcctccgaccatccacgtcgccgcctctaccgatctgcgccgccggccacgcatggacggagacggcttcgacgacctcagtgcgtgggcttcgcagccgtcggcgagcggccctgccactgcttcctctgccggcaccggcttcgacctcaactcgcaagcgccggcggcggaggggttgaaatatgatttgtttgtgtcatttgtgagagggaggaggccacacatgagtctgccacaccaaatctggttggaaaggagccaaatgattggaaaagtatatttattgtcaatctaacccttccatccaaacatctctagggctagagttagttcagggttagttgagagctggaaactaactctaacctctaactctaacccttagatccaaacagggccaatattaccatgccagtcaaattggtgtgacatcgttgttttgtcacatcagttgtgctggtgtggctaaaatgttcaattcttcaaaataagatttgaaaggtttatttttaatattaaaatttttaaaaagttaaaaaaaatcgatggcataggagtatatgtaaaagcagctactcaagtctgatctgatgagagtttttaatactgtagtggatatgttgagtactccagatgagattaaggccgagtttagttctaaactttttcttcaaatttttaactttttcatcacattaaaactttcctacacatcagggtatcccaaaccgttggggccggggttaccgcgccccggtggtaaagcacggttaccgcgcggtaaccgtgaaaaaccgtacaaaatttatcaaaaattcaaattattttttaaatttatttgaatttaaggatgttaccacgatatttatattaccgtacccctcacggtaagcccggtaaccgcgcggttaccggcggtaagagaaaccctgcacgcataaactttcaattttcccgtcacatcgttccaatttcaaccaaacttttaactttagcgtgaactaaacacaccgtaatacaggtgagagaggggggggggggggagggtgaatgacgtggcatgtcgacgatagacaagggaaggaggggtgtgggaccaggttagcatagggtgctctgcctggaacgcctctctgtgctgtgctccactcccctcgtcttcttccttcctcggcccggcctcgctcgctgcctgccagctgcagctgcaactctccatccatcgatcgatctcctcctactcccccgccgccgccccgtccaagacaagccaaggtatgccaatccattcctacctactactacctcctcctcagcttcactcactagtctatctaatctcccctagtgagactgagactcgcttgccatttctgttcctgtgctaaattgctaagctacgggtagtgtcttgtgcagccagccaccactccctgcatgccatggcctcacggaggccaacgcaccgccaccataccgaggctccagatcctggtggaagagggagagggagaggccgtgccgcccgatatgctcagcctcagcctcagcctcagcagcagcagcagcagcaaggacgaggatgccgtgctagaggtgcctcgccgccgccgccgccgcagcagcagcagcagcaacagccaaggtctactcctactcgtgctaccactgtcaccgtggcttcctcttcatctaccacggccaccgcatcatcaagccctctagctcccgagctgcgccaagcaataatggaagctccccgtcccagtgagctcgctcaaccctcacccactccgcctcaggaacaacctgtggatgccgctaccacgacgccgcaccatattccatcctcaagcaagtcaattaggtttcctttgcgcccggggaagggtaccattggcaccaggtgcatggtcaaggccaatcatttcttcgctcacctgcccaacaaggatcttcatcactacgatgtgtgttctcttccccggcccccccctcaaacccactcatttttagctggagttttgctctactaatctgtctgattttcgacaggtctccatcactcaggaagttacatcacgcattgttaaccgagctgtgatcaaggagctggtaaatctgtacaaggcatcttatctgggtgggaggctgcctgcatatgatggtagaaagagcttatacacggctggcccattgccgtttacttcacaggagtttcagatcactttacttgacgacgatgatggttctggttctgagaggtcgcctgctcactttgcctcacctcccgcacttgtacaaaagcaacagtattatgtggccaatcttgctgacttagttgttttcttttcatttaggcgacagaggactttccgagtagtaatcaagttcgccgcacgggccgaccttcaccggcttgagttgtttttagctgggaggcacgcagaagctccacaggaggcactgcaagttcttgatattgtgctgcgagagctaccatcagcaaggtacctacgaggttcttatgccacttattatatctaacacaagacatttaagaaacagaggtttgacattttctcattttggtggttcacagatatgcgccatttggacgttccttcttttcgccttacttgggtaggaggcaaccccttggtgagggattggaaagctggcgtggattttaccagagcattcggcctactcagatgggcttatcactgaatattggtaaatctctctctctctctctctctctgatgtgtgcatgcatagctgaaatgtaagtcatattctttgttctattgcatgaacaagtgagcaagaagaaagagatagtgcataggtctcagtactttttagatttgagtgctattttttgtttcacgattgcaattacattcctattttcaactggaattgttatgtgattcacttacatcaaatttatatgtttcatttgggataaatgcatttaatgtccttgatgattcttgtgccatattgagcatttgtaccttttccagatatgtcagctacagctttcattgagccgttacctgttattgattttgttgcacaactattgaattctgacatccattcaaggccgctttctgatgccgaacgtgttaaggtgctcttactaaacttacttttcgtgtgactgtctcatctgttagcaagggccaattctcaaatgaaatttacacattcttttttttttaaaagaaagacatgtagatctcttgagctatgttctatttttccctcaaaacttgtatgtcttgtcccactttcctgtctatcttagtgggaggtttgtttctccttatagatgcaactcattaatctttatgctatttaatgagctggctaatgctcccgcattgagatatttcataaaaaaatgacgagattatatattcctaaaaaaatagcattcttattgtatttattgtgatgatcggggcattgtgatttttagttctctcatatcatccgtacttgacaataagattatatctatttctgacaatgtacatgaggattgtacaacataaaatcaccttgccttccaaaaggaaagatagagatacttgtgataccagtataccacacagtaattgtattgggcctacaatcattaattggttagcagtgtaagagtgttgcttgtctgtcccatgtaatagtactctactctatatattgcacctttgggcttttgctggaacgcatgaagtccctttttttcctggcagctcaaggaatttttttaagttcttttaaaacaagaaatgcagtagaggttacaagaagtcgggaacttcagtttgggattttttacactttattttgcttttcctggttgacattgacttctctaaagttttcctttcagaatgtatgtatgctttaacaatttaatctctatgctcccactgtattgaaacactagatcaagaaagccttgagaggagtaaaggtggaagttacccaccgtggcaacatgaggcggaagtaccggatatctggtttgacaattcagccaactcgtgagctaacgtatgatttctaatctgtgtgttttaccaagtaatctctaaggtattcatagaaaaggccctgtgatgctactttcgtatgctctgaaaaaaatatgttgttctccttgtggcagttttcctgttgatgaaggaggcacagtgaagtcagttgtacagtactttcaagagacatatggctttgccatccaacacacctaccttccatgccttacagttcagcgattaaattacctgcctatggaggtaatgtagtggtgaacctttgttgccttttgttgtaatgaatttctacaacactggcccaactttacattttccatgttcatattgaaaatataataccaaacactggtgctgttcaattttggattcacggtgattgcgactgaatttaaccaggtctgcaaaatagtggaaggacagagatactccaagagattaaatcagaatcagataagagctcttttggaggagacatgccaacacccacgtgatcgggagcgtgatattattaaggcatgaaatttgttatcacgtcttagtggtgcaatattgtgtgcgtgattaatgtttaacataattctcaatttctctggtttgggatggtacacagatggttaaacataacgcttatcaggatgatccttacgcaaaagagtttggcattaagataagtgatcgtctggcatcagtagaggcacgaattttaccggctccacgggtaggttgactatggctttgttgaggctttgttgattttgatgtactttcttgttatacccttcttgtcctttctaactgtattgtggatacagcaaaaaaaagggatgcaattaacattttctcctatatacttgtagccttacaaatatgtttttttgttatattttcttgtgatgcagcttaagtacaatgagactggtcgagagaaggattgcttaccaagagttggtcaatggaatatgatgaacaaggtaaccacatgaacattctgttgtccagcaaccatccatttattggcacaaaggcta

SEQ ID NO: 1172 - DNA, 724 bp, Oryza sativa
gtccctcaattgctgctgtaagtagaatatcgcctgtgacctgttcctgaattttttttccctggagggtaataatttactctgcctacgctaactatatatcgttttgcaggttgtagcctcccaagattggcctgaggtgacaaagtatgctgggttggtttctgctcaagcccaccgacaagagctgatagaagatctatataaaatctggcaggatccacagagaggaacagttagtggtggcatgatccggtatgctactcagtattttttagtagttctttccttaagaacttcacagatagttcttcatttttaaaataacatgatattaaagcccattttatatttatattgccaaaaaatgcagtgagctgcttatatccttcaaaagatcaactggtgagaagccccagcgaataatattttacaggtatctaccctttaggaggaacaattagactttctatgatttatagatttggaaatattatatgtgctatatccatgatttctgttggatcttttgaaacatagcaacatgttgaatttgctagaggggacatctcttccactgaacaggaaacaatcataattccactaaagccggatcttgttttcttttgtcagggatggcgttagtgaaggccaattttaccaagttctactttatgaattgaatgcaatccgaaaagtaaaagtttgccagatcctgtatcct

SEQ ID NO: 1173 - DNA, 743 bp, Oryza sativa
attcctgcagcccgtggcccacaaaagttaaggacatgttggaggagcagcagagacgaaccttggggcaaagagcagcatgttttgatttcccttcgatgaagtatgaggtcagcgagcaaggcggagtcacggcggctggggttcaatggggtggacgtcactacgtcgtggttgcgagagataacacatgtagttgtcagttccctcagctccatcacttgccatgctcccacatgataaccgtttgtaagttgcgaggtttggatgtggaggtggccccccgaatgtgttatgaagcttccaataaggctgtgcaggactcgtactcccctaggtttgaaccttacctagatccatcgcagtggccaagttatgatggagagttcttcgtgcccgacttgtcattaaagaacaacacacgaggaagaagaaggacaagaaggttcaagaacgatatggacaaagcatacaaaggctcagccaaccgacggtcacaaaagccgaacaatacaaattcagagccggtcatgcaaaatagatgctcgctatgccacgaactaggccataagaaaactaggtgcccgaagcgagacaagtctaaggatcgaccgaaaaagcgccgtaagactgtgggagggggtgagggtagcacacaggtgggattggatgacattcatttgctaagaccatattgttgcatcaatgtttactttctgttgtcctcctttccgttctcattg

SEQ ID NO: 1174 - DNA, 644 bp, Oryza sativa
ctgtcacgccgccctgcctgagcggcggatccgggggcggccgaagctgccacaccggaaccggaggggttccaagtccaggcctcctccttgcgagccactcggtccgcgagctgaaaaagctctgcggtagtctggggctctttggaggcgatcttttcgagcatgcggttgtgccgcacgccccccctgaacgcgtagattaccgcgtgtgcagggatgcatggtatggtattgcggacttgacagaaccgctgaatgtacgatcgaagcgactcatcgtcccttcgctgtacggcgtgcaagtccgcttcctcaccggggcgcggatacgtgccttggaagttcatggtgaactgctggcacaaatcctcccaggagtggacagacgcgggtggcaagttcattagccaaccccgcgcttgccccttcagggccatgggaaagaaattcgccatgaccctgtcgtcacccccggcggcctcaatcccggtcgtgtagacctggagaaactcggcggggttgacgctgccatcatatttttcggcgatggcgggcccgaaccttgggggccaacggacattccgaagactcgccacaaatgctctacagccgacaccaccaaccgggggcacggagggctg

SEQ ID NO: 1175 - DNA, 665 bp, Oryza sativa
gttgttgggcgtttacgtcttcaccgaccggccgcttcgtccgccgccgactggtgtttccgccagcacggctggcctattatgccgccgttgttgggggtctacgtcttcaccgaccggccgcctcgtccgccgccgactggtgtttccgcctgcacggctggccttttatgccgccgttgttgggcgtctacgtcttcaccgaccggcttgccttcgccgccgccgactggtgtttccgcctgcacggctggcctttatgccgctgttgttgggcgtccacgtcttcaccgaccggcttgccttcgccgccgccgactggtgtttccgccagcacggctggcctattatgccgccgttgttgggcgtctacgtcttcaccgaccggccgcctcgtccgccgccgactggtgtttccgcctgcacggctggcctttatgccgctgttgttgggcgtctacgtcttcaccgaccggcttgccttcgccgcctccgactggtgtttccgcctgcacggctggcctttatgccgccgttggtgggcgtctacgtcttcaccgaccggcttgccttcgccgccaccgactggtgtttccgcctgcaccgctggcctttatgccgccgttgttgggcgtctacgtcttcaccgaccggccgcctcgtcc

SEQ ID NO: 1176 - DNA, 1428 bp, Oryza sativa
caccgtgtgggaaaaactcatgccattgaaacgtccgtattggctccttcattatatcttttgttggtcgcacaagtggcttgatctgcaggtcagacataggacaccgagtaataaacttcagatgaattaacaaagaaagaagtaacgatgacaatttcaccaggaacctttacaggcaagaatatcctaaaagtcatccggaacagtacaagttttactcttaacactggggctttaagggcaaaacttacccagaaatggctggtagctcatagctgcaccgtaaggcctaaaagccacctaaatttcccatggtcttagaacttaaatttgggggtgccaagattagcacaagtgactaacttatacacattcttaactttttacagatttgatgtcttaaagatcacattgcataaggtccttcaacttgcaaaggatatggaaacataatgtactgttctctcaagttcaaggatccaggtagaaatatatattttatgaacctagcaaacaacatacgcatacaattatatgagtttatcaattgacacagcggcagagccacctcccaggctccgtcactggtgtttctactgtcctttcctaggcaacacatgtaaaaaattgccggttgctagtaaacgttcttcgtcgccccagttagacgatgccgctggctccgccactgaactaacacttagggtcctacaaatcctttggtataccattcactctatgaatttgaatgcacaaacatactggggcaacatatcttataaaagagaggtgaaacaagttgaaaacaatacctccacgtagtagcttactatcaattttgttgctaagagaaggacccagaacattgtgtacctagaagaataacagtcctcagagagagaatggtgcaagcataaacaacaaaagaatgttttatagaagtgaacatacttgaaaagggagaatgctccttcatgcattcctctaccaacaaacaagcgaggctgtaggaaaagtatgtttggtatcttacacctaaatggtatcaagaatcaacaataagaataaagctgacaaaggaaaactacctgcgaccaccacatcatgaatgttacaactttaagatttgatcgctcaagagctcttctaaggactgggaaaagaaataacacagccgacagcatgtttggtgctaaatatatcacaacagccaagatgtataatgatggttgattctgaccatcaccgagccaacttttaattgttcttgcaagacctgtaggattctcccaggtgtatgcataattactggtaaaatcacaacccatgcagcagctgatatcaacttcaagatgtagcgcagcttgccagcaagagacatgcttcttcttgctttccagctcaggatgatgtccagaattgctg

SEQ ID NO: 1177 - DNA, 520 bp, Oryza sativa
atctgatagacaacaggtgtggcatctgatatctgcccttagatatggattgacttattttgccttcttgccaaactgttgtttattttctatttgggcagagagaaggatctgttacttgtgccatactgcaaagatcgtgacatggatataatccagtggccaccattcttgcttgctagcaaggtatatgctttctattcagctcctattttccatgcttcctattttggtgaaatgaggtacctatgtttcattttgtttatttggctgaattttcagatcccgatagcgttggatatggctgcagacagtgaaggaaaagatcgtgatcttaagaagagggtgaaatcagacccatattttacttatgctatcaaggaatgctatgcttcattcaagaacatcatatatactttggtggttggtgcaaaagagagagagtatgttctacattctcacacttaaaaatcagattcaaactcagttttttcatgagtaactttatggcacataaatt

SEQ ID NO: 1178 - DNA, 1097 bp, Oryza sativa
tataccgtactatcaaataagcacgcccaagcaatacactgcgagagtttgatctatccttttttcccctatgactcctttctacactagatgatgccttattcatcggtttggatggtcaggtcctgtatgcccaaatcttgatataatccatgcacatagtcgagcacggactggcaatcaccaccattcttcacctatacacacaacacaaccaaaacgcgaactcagtcactaggggctaggggcttgtttagattgtagccaaaataaaccttaccaagttttggtaataccaaaattttggtggcaagatgacaatattgccaaatttttagcaggatttttttatgtatttactaaatttggtaacaaattaaacgtagacattttttttggcaactttaaccaaaaatggtatggttgaaaatgacatcaaagtgaataggccctagggtaaccacaacaagctgtctgttagtgttaggaggcttggcgtaaaagatgtacccggatgtcgagagatccaacagcgtgaccaggtacaagctcccaaaatcgaccttgacatacttcagaaacatcctcgcacgcagttatctggtgagcaaatacaatacatacggaaatgtctcaaagaagctttgggcttgccaaaatgaactgaataatatgcaaaaccaaaccgtgtacctacctgtctgaagcacttggtaagagctgaaggtggcacattgcctggtgcaatttgcagaaggatattaccagtagccttaaagagtggcaaaacaagcatgaacactgccactgaaacaattcccaggcacaacacttccgcattttcaacccttaaaagcagtaggcataaagtcattttaggattaagtgccaagctaaaagtgaccgtaacattagaggggcacagaaaattcgtcagaatagatttaccccaatgaaagaaaccaggaagctagtatcaagcctgcactgatggaggatttacacatgtcaactaaaaataactaacttcgtgactacagaaagagcaaatattataagggaagaggcacagtgacatgagagtatctcatacctcc

SEQ ID NO: 1179 - DNA, 710 bp, Oryza sativa
tgttttgtatatgatttactttcacttacaaaccaacgaaaggaacatctgatgcttattattttcatataaatcaaatgggtattttccttgatctttgtaagtttgtaattaggatgtactatgcgcaatgcctctcataaaatggtggcttctgaaacaaaaaccaaactaggcttaagatataacacggtgtcttcttaaaaaattcgaacaatacattatgtattatttatcattgttgtcatgccatacctttggcaatctcatgctgttgatattattgctgttattattctttatattatgtcatatgcattatcatatcttttgtgcagactacttgaatcagtacatggtggaaataatagaagatatgaagggattacaccacttgatcagcaagaccagttattcactaaagctattgattttcctgtaaaggaatcacatgcatggactgaaaaggttatatcttttacctgcttatttatttatctatgtttagagcagcctgttgctttatactgtatttatacctttcctattggtttcagataaaaagacttcaccttctgctcacagtgaaggaatctgctatggatgttcctacaaacctggatgctagaaggcggatatcattctttgctaattctcttttcatggacatgccaagtgctccaaaagtccggcacatgttacccttctcg

SEQ ID NO: 1180 - DNA, 6120 bp, Oryza sativa
tcgcttcattgatatcatgacgggacctgatccaaaccagaaccaaaaccatgatgctctggtcatcgaggatccacagattgaagaagtggaagccatggcacatcacccaacgcaaacccatgatgttcagcgatggtcgacgtcaagcgttcgccctcgattccttaacattcctattgcctctgctccacttcccaccacattgaaagactatcatgacatggttgaagacctggtgaacaagcggctgaagcaaatctccatcgagcaaacaccccgaccaatggagagtgagcttgagaagccatatgaagcttggcatgatttagtacctttcctggcagggtggcacccacccaagttccgtcaattcaatggaaccggagatgcaagagaacatcttgcgtactttgaagctgcatgcggcgacactgccaacaacccctctctcctcctccgtcacttctcggggtccttgactaggccagccttccactggtacagtcgccttcccatgggatccattggaaactgggcaaccatgaaggaagtattcaagaagcactttgttgctatgaagaaagatttctctattgttgaactatcacaagttcgacaatggagagatgaagccatcgacgactatgtcatccgcttccggaatagcttcgtgcgtctcgcaagggagatgcatcttgaagacgcaatcgagatgtgcgttcatgggatgcaacaacatcggtctcttgaagtgtctcacgtgaaccaaaaacatttagcgcactcagttccgccgtggcagcaaccaagctcgagtttgagaagtcaccccagataatggagctttacaagaatgcaagcgcctttgaccctaccaaacgctttaacgcaacaaagcctagtggtagtgggaacaaacccaaagttccaaccgaagctaattccacaaaagtcttctccaccgcacctcaaggataggtgcccatgattgcaggcaacgctccacgcttcaagatcttctcaaaaagcagtatatcttccgccgggagttggtgaaagatatgttcaaccagttgatggaacaccgcgccttgaatctgcctaaaccacggagacctgaccaggtaaccatgactgacaatccattatattgtccttatcataggtatgtcggccatgctattgaagattgcatcgccttcaaagaatggctccaaagggcagtcaacgagaaaagaatcaatcttgatgcagacgccatcaacccagactaccatgccgtcaatatggtgtccgttgagcctttccctcaaaaacaaagagaaggtaggcgtgcaacatcatgggcgccgctagcccaagttgaagaccaaattgcaaaaataatactgacgaaagcacccgccactcatgtggaggctagccatggcgacaacaaccgaccatggagtgttgtgcaacggaagcctcaaccattgagctttccaccccgtcgcccacaaatgaagttgtcaccgcatactcacccaacttcaagaagatggctagacccaagtcagcgacgtcctccacctcgatttgtccccttctcagagggagacaagtcttttccccgctggggtcgtgagctacctactttggcgcaatttctgcccaagggttgggagcaatcctcaataagcacaagggaggctatggaggtggacaattccaccccgactccaaacattgctccatgcaatgtcatcctcacctacaatgactccacaagtaccggttccgatgaaacgtttacgggaagggagcgagaaatattccatgctgagttggatccagagaagacgaaggtagaagaggtcaacataagcctgcgaggggggaagaccttgccggatccccactagtccaaagctccaaatgtagacaagcctaccaaggaggcctctcctcctggagaagctccagaaacaaaaactggaagcaaagagaagcctgctgtcgactacaacgttcttgcgcatctcaaacggatcccagcactattgagtgtctatgatgctcttatgatggtgcctgatctgcgcgaagctcttataaaggcgttgcaggctccagaagtttacgaagttgatatggctaagcatcgactctacgacaaccccttgtttgtgaatgagattaccttcgctgatgaagattgtggagattatgggtaccccatacccacacggcatggttatccgactagttataggggataacttatatatatgaaatatgtaacagatcatgacttgggtattacgtttccctgtatattatggaacggcctaaagtcctggtttgataagattgtaaagtagatttaggaaaccgataccgtattggttaaggtttctatcttgtaaccctgcccccaacctatataaggagggcagggagcccctctaggggcatgagacaacctgatcgtcagatcaatacacactcggcggattcaaatccccaaacaggagtagggtattacctctcatcgagagggcctgaacctgtctaaatcctttgtctctgcatccatccacttttaggtctcgtgcgctacccccttttattattgccgaattcatgtttcgacagttggcgcgccaggtaagggttgcgtcgagtttcctatcaacgagcgcgatggaatcaatttcatgagtcgccgacttcgctttcgctttgggagttttcacttcctttccgtcgaccacttcttcaagctcctcttctctgacttgatccaaatcagtcagggggaaactcaatctgatttttatcattatttatcatattgatttttaatctcagattaatttcttgctattttttgttgttgttcgcatataactacgcggcactattgaggcgattgatgctggtcatggactcgaggcgtctcagctttccggtcgatcggccgcgagtccactccgccggcttgtcctcgccaccgccattgctgatagcaacaacgacttcaccgccggcctgcctccgtcgccgccgactggtgtcatcgcctatacggttggtcggtcacaccaccgttcatgggcgtccatgtcttcaccgaccggctggccttcgccgccgccgactggtgtttccgcctgcacggctggcctattatgccgccgctgttgggcgtctacgacttcaccaccggcctgcctccgtcgccgccgactggtgtcctcgcctatacggtcggttggtcacaccaccgttgatgggcatcgtcatctacaccaccggcctgcctccgtcgccgccgactggtgtccccgcctatacggtcggttggtcacaccaccgttgatgggcatcatcatctacaccgccggcctgcctccgttgccgccgagtggtgcctccgcctacacagctggcctattatgccgccgctgttgggcgtctacgacttcaccgccggcctgcctccgtcgccgccgagtggtgcctccgcctacacggctggcctattatgccgccgctgttgggcgtctacgacttcaccgccggcctgcctccgtcgccgccgagtggtgcctccgcctacacggctggcctattatgccgccgctgttgggcgtctacgacttcaccgccggcctgcctccgtcgccgccgagtggtgcctccgcctacacggctggcctattatgccgccgctgttgggcgtctacgacttcaccaccggcctgcctccgtcgccgccgattggtgcctccgcctacacggctggcctattatgccgccgctgttgggcgtctacgacttcaccgccggcttgcctccgtcgccgccgagtggtgcctccgcctacacggctggcctattatgccgccgttgttggatgtctacatcctcactgttggctcaccttcgctgccgtcgactggtgtttccgcttacacggctgacctattatgccgccattagtgggcatcttcgctttcaccgtcgaccgccttcgtcgccgccgactggtgtcttcattgttattgatggacgactttgttcccacattggccacttccgccatcaccaaggggaatattacaaagctaagtcatcatttattttattctttatatgatatttttccttttcctctgcctcactacaccaattggtcttccattgagtagtgagtcgggggctacagatgttatatcatattttttataatatttatcttgattgcttgcgacataatctgagtacaaaagtacctatcgagttatggagttctatcttcctatgctttccgtttggtttgccaatggatggttgcctttgggccgattcctagcacccgggggctcgttggatggaccgagtaacgcaaggtgctaagtattattcggaataaatcaaaagcatagagatgagataaatttattttctgctcttaataattgcaaaagtacccgagtagtaaactccgatccgtgaaactttgttccattaatgacgaactcatgtcactcatatgtatgtttgggaagtgcttaggccgactcccagtgcttggtggctatgactagttgggcagagcgtttaaacgtaatgagtcatctgctcggggaaatcaaaattgacaagaggagaaatacatatttataaatattttaaaatacttgattttttctcgagtattatatttatatcagatactactcatcctatatgtttatgtttgttctgcaggatccagatccagatatgcataaaagggattcatggctttaagcttatctcttacgctctaggaatggatcagtcagaacatcaccaccggccgcctcgtccgccgccgactggtgttttcgcctgcacggttggcctattatgccgccgttgttgggcgtctacgtcttcaccgaccggcttgccttcgccgccaccgactggtgtttccgcctgcacggctggccttttatgccgccgttgttgggcgtctacgtcttcaccgaccggcttgccttcgccgccgccgactggtgtttccgcctgcacggctggcctttatgccgctgttgttgggcgtccacgtcttcaccgaccggcttgccttcgccgccgccgactggtgtttccgctagcacggctgtcctattatgccgccgttgttgggcgtctacgtcttcaccgaccggccgcctcgtccgccgccgactggtgttttcgcctgcacggctggcctttatgccgctgttgttgggcgtctacgtcttcaccgaccggcttgccttcgccgccgccgactggtgtttccgcctgcacggttggcctattatgccgccgttgttggtgtttccgcctgcacggctggccttttatgccgccgttgttgggcgtctacgtcttcaccgaccggcttgccttcgccgccgccgactggtgtttccgcctgcacggctggcctttatgccgctgttgttgggcgtccacgtcttcaccgaccggcttgccttcgccgccgccgactggtgtttccgccagcacggctggcctattatgctgccgttgttgggcgtctacgtcttcaccgaccggccgcctcgtccgccgccgactggtgttttcgcctgcacggctggcctttatgccgctgttgttgggcgtctacgtcttcaccgaccggcttgccttcgccgccgccgactggtgtttccgcctgcacggctggcctttatgccgccgttgttgggcgtctacgtcttcaccgaccggcttgccttcgccgccaccgactggtgtttccgcctgcacggctggcctttatgccgccgttgttgggcgtctacgtcttcaccgaccggccgcctcgtccgccgccgactggtgtttccgcctgcacggctggcctattatgccgccgttgttgggcgtctacgtcttcaccgaccggccgcctcgtccgccgccgactggtgttttcgcctgcacggctggcctttatgccgctgttgttgggcgtctacgtcttcaccgaccggcttgcctttgccgccgccgactggtgtttccgcctgcacggctggcctttatgaccgctgttgttgg

SEQ ID NO: 1181 - DNA, 642 bp, Oryza sativa
atatactgtcaaattctcaaaataatcaattatcattcagtttcagcaaaatatgaaattaatggttaaaaagcttaccatcatagaagaactaaaatctctctaaatacaatgtgtttagtgctttttcttcttgcggggaaagcaaaatcaatccccaatgacacaaaccgcacaaatttcataaagtgcatgcagttttctaattttcatcttacctgcaggaattttctcaaaacatataatagtttttttgcctaaatacttgcttgcatatgggtttgtctaaatttagaaatagggatatgacgcgtgggcctgggtgcatgtgatttcaccataggattgctaggcaaaactcctcctttttatattagtatagatatattttgaccacctccatccatatgcttcttctttgttctagacagctcttcctgctcttcctgtctttctccttggctgttgaagcactacatgcatttatgcaagatgagtctgagcataagtaaatgccttttcctttttgtttagtgtaatataatcccatcgttttggctaatattattattcttttaaaactaaaatatatatatatactttcaggcattatttcattgtttttgctgtccccaacctttt

SEQ ID NO: 1182 - DNA, 772 bp, Oryza sativa
ttcctgcagccctgtcagctacaccactccgccagaacacttttcgagttagcttccgcacttcggaaaattttcccaggaaaaaaggttggtttcaaagtccttgatttcaaaacagcttatatggctttactcggacaaccggttttacccaagtcatggccgtcccgcactacacctacttgatgataaaaatgcctggtcctcaagggatcttataattccggaccgacttcaaccaacccgtaccttgtaacaaaaaaggtggcaaaatggttaaaaccacaaaacccttttgcccaccaagaaaatccactggcttgcaacaccgcaagccaaggaaaagtggctggcacccaagctgacaaagaccgaaaaaagtgatgcccagacgaaaaagattcccttagatcccttcgatcctgacaagactactgtaataggcgctgagttagattgtaaataggaaagcgcgctcatcacctttcttcaaaataataaagatatttttgcgtggaaaccatccgatatgcctggtatccccagagaagggattgagcactctttacatgttaaggaagacgccaaacccatcaagcaacgacttcgccgttttgcacaagacatgaaggatgcaattaaggaggaattaaccagctattagcagcaggcttcattaaggaagtccttcatcccgactggctgggctaacccagtcctgggtcggaaaaagaccgggcaatggcgcatgtgtgtcgattataccgacctc

SEQ ID NO: 1183 - DNA, 514 bp, Oryza sativa
ccctcgcccccaccggagccatcaccttccgctggctcgccacccgccccatgcgccgcctcgccctcctcatcgctctcaacgtcgcctactccgccaccgagctcgccatcggcctcctcactgcccgcgtaggtcggtaatactaatactactgctactgctactgctactcattactcatctcaatcacactcttctccattcgtttcaggcctagtctccgatgctttccatctcacctttggttgtggaatcctcactttctccttgtttgccatggctgcctccagaaccaaacctgatcacctctacacctacgggtgcctccctccctcaatttactcctcttttctttaatcttccactcccactgattcattgctgcctttattcagctataaaagattggaggtccttgctgcctttacaaatgccgtaagcttttcaacatgtcattgccatgcccatccctctacatttctctactactatatatgagtttattgtgttt

SEQ ID NO: 1184 - DNA, 606 bp, Oryza sativa
caccaatcggcggcgacggaggcaggccggcggtgaagtcgtagacgcccaacagcggcggcataataggccagccgtgtaggcgaggacaccagtcggcggcgacggaggcaggccggcggtgaagtcgtagacgcccaacagcggcggcataataggccagccgtgtaggcggaggcaccactcggcggcgacggaggcaggccggcggtgaagtcgtagacgcccaacagcggcggcataataggccagccgtgtaggcgaggacaccagtcggcggcgacggaggcaggccggcggtgaagtcgtagacgcccaacagcggcggcataataggccaaccgtgtaggcggaggcaccactcggcggcgacggaggcaggccggcggtgaagtcgtagacgcccaacagcggcggcataataggccagccgtgtaggcggaggcaccactcggcggcgacggaggcaggccggcggtgaagtcgtagacgcccaacagcggcggcataataggccagccgtgtaggcggaggcaccactcggcggcgacgaggcaggccggcggtgaagtcgtagacgcccaacagcggcggtataataggcca

SEQ ID NO: 1185 - DNA, 893 bp, Oryza sativa
ataaaatagttgataagtccagcaaaccaaagaaaaattgtgcagatttggtattcaactgtatatgagtatcttgtgtcctgttttgattataattgttcttgttcaaatctttgcacggtcatttgaatagtcattcttcttctgaacaaaatacatatatacgtcgcacaagtttgtgtgcatccatagaaatgcttcaatgcatagctctctttggcaaattccatcttcaagatttgatgttctaattaacatctgacttgctgtctctttaattggaaaacttgtgcactgcagtgtcttgactccttactacaaagaagatgtccttttctcttcccaagcattagaagaccagaatgaagatggggtttctattcttttttacttgcaaaaaatctatccaggttctctcgaaatgtcaaaatatcgaggtttacatgactcaataattcccttgaaatcctcctggatatcaaaatattttttgtttctcggtttccttgtagatgaatggaaacatttccttcaaagggtggattgcaatactgaagaggaactccgtgagacagagcagttggaagatgagcttcgcctttgggcatcatacaggggccaaactttgacgagaactggtattttctcctcaattctctgtcatagcttttacattttattctcttgagaacaactttcagatagtaatgtgtttaggagtttgattcattgacagctgttgcacttccttacagtcagagggatgatgtactacagacaagctttggtgcttcaggcttttcttgatatggctagagatgaaggtatttcttagtggctgagcctgtttcttgattctgaaggctgtacacttaattcattggttttgcttg

SEQ ID NO: 1186 - DNA, 620 bp, Oryza sativa
aaacttcttttaatattgcttatttttaattccgaattttagctatttttatattgtattcctacttggactctcctttccttttctaattttggattttattttatttttatttcgaattttgattaatctcgtattgggttcttatatggaaacttctttcgatattgcttatttttaattccgaatttcagctatttttagattgtattcctacttagactctcctttcctttttctaattttggattttatcttatttttatttctggaaacttctttcaatattgcttatttttaattccgaatttcagctatttttagattgtatttctacttggactctctttttcttttttctttttctcctattaatatgggaatttctagcctccacagcgaacgtggtgcctccttttcgagctgtcttaataatataatagatatggatggcccaggtatgcatgcaattgttagttgaaaacttaaattaccacgagaatcttaggtgtggcattcaggccctgctgcttgattctttgcagcagttcgtcttccagagctctaacttggtccaggatgtagacaacctgaccaccggtgtctggcataccgaggac

SEQ ID NO: 1187 - DNA, 2388 bp, Oryza sativa
ggcaaaggctattgaagcaaagaaggctcaataatcccagatcagggcaggtctctgatagacataatgtctatcctgaggatgaacgccatgaccgtcatcgtcagcgtggtgaagagcaagcttccaatgacggcgtctcaagctctcgattgcgtggtagaataagacttccagcggaaacaacgtttgacagacttggcttacagcctgagaaagagagagacagagggcctcgagctagattgtcaccaccaagtcaaacagaccttagagggaagcttcatgataggctaaaggctaaaccaaatgaggatgtatctggtaatgtacaaagttctttgtcaaaagcaaatgaagatgctgaatcgttgaactttgctgggccaaagagccttgcagagctgaaagcaaaaaaggttgcaggcagtttaatgaagagtagtcgttctttaacagggccagttcgaatgacatccgaaatagttaccatcaaagactcttcggaccctgttctgtttgatggcccaaaaccattaaatgccatcctgaagagaaaaagagaggcagattctggaaatgctaccgattttggcagcaaacgggaagaacattctgggggagatgaagaaggatctcagaatgatttccgaaacatcgaggatgacatagttggaatgaacaccgaggggaatggagaagaagccttccaacctgaagacgatgtggtgtatggcgacagcctgtctcctgcggatgacattgctgctgaagctgcagacgatgcgagcagggagctggaggagcagcaagatgtagagacagcagaagagtacgactacgagatggatgacgttaatgcggcggaggaaaatgactaccaggagtatgaagacgaagacgatgatttggaggacgacgacgatttcgcgcgcaaagtgggtgtgatgatcacttgaagctgcgttgcagtaggcgtgccactatatatggtatgaccgaagaattgaaagatgtgttagtatccctcccaacaagatgttggtctgtttttcttgtggtgctagatacttttacttcactgcgccagagaattcagctaataaagttgggaggaagataaaattggctcatcggagagcttgtgtttcagccaagaggcggctgcttgtactctaatgtgtgggtgtgctctcctctgcctgcttgtgttgttgtatcattagttaaatcaaaatgacctaacaggttacacaatgtactacttctatttatattcatcagtgtataagatgataaaaggccttgaagccttttctttctggtagagaatacattgctcttacctccagatttaacatttcatttttcttgcttttgaattgtgtatctcatattgcaatttcgatctgtgtcgctttgctgggtcgaacacagcagacagttcattcgcgtatatttatgcacaagaaaactgtcaccctacaaatcgatgcctcagatagcaaacagacaagtcatggcgtctatttttccgtcttaaaaagtagagtaggagatgagctcaaaaaggaggacgagaagaaatttatcatctaaacatattatcttcgaatactcctacaaagtattacatacatatcaccgtataaaatctgccgtgcggtgtttacatcacctttgcagtggcttcaacaggtctttgagaggccctcgccgctgaacattcttggcctgctgtttctctgcgttgcagctgcagctgctggtgttgaggttttcgccgcagccaaggcagagacctttgcaggtgggactgcacagggcatcgagcgtgatctccaagtgaatgatgtccctgatgtgctttgagatatcaatctccttttctccagctgggaaatgcagccggtcatcccaatctatatcttcatcgtctccatcttcttggcttccggttagcgaaggagctttggtttgttcttcttcaaatatcgtgccgagatcaaccacatcaggttcctctactctgtcttcggtcagtaagagggaaaaattggcaaatataccttgaggcgctggctcagcacacctgaaaatgaagcacagtgcgtttcagtatagcactatcaaccttgtcttcaagttgtgccagaattaaattaaccaaaaaaaatagcctgtttctactttgtgaacaactcatgtattgtcaacaacgaaagtgatattcactgaatatatactagttgttacgtcaacaaaaaaaaaactagttgcttcatattcaatcctccataaacctttattatgcaattactagatatatattatattatttcaaggtttgcacacaagagcagcttagtcggacaataaatttggaaa

SEQ ID NO: 1188 - DNA, 3061 bp, Oryza sativa
tagtagaggtgataagttaaaaagattgttactgtacttgcctttgcctaatgaaaccaatttctttgggtcatactactgccttgtctaaaaggaaaggaaaagagaggtttacccatagcaaccgagggtgatgacagtgcggacgatgccgtcgaggcggaggcggccgcggcgcctggcaacgtcgagggagacgagcaccggggtgtcatcgtccttggtaccggtaaggttggtggaggagaggatgaggattcccatggtggcggcgcgcgcccgagagtgagtggaggagaggtcgccaaggccgaggcgctccagtgtggtggcgtactcgaggtggtgaaccgacgcgtcccgccggtacaccaccgcgccctcccacggagaaccctcctcgtcttcttctttctcctcctctgggtcgtagtcgacggtgaagaagtcgtcgtcggcggcggcggcgcatggggagtgggagagactaggagagggttgtggtcggaagaagaaggagcaggtgtggtggagtggggtcatcgccatcggcgggggaggggtgcaggtgcgagtgcggcggaggaccaagggcaaggctcctgcgacgcccccaatgccaaacccaatcatcatcatcttctccaccccccaagcttcttcttcctcctcttggtgccatcggccatcccatcctctcccgcgtgttgtagggcccatgggctgaatcatttagtaaggcccaagggatgcgccgtggtgcgcggaagtaacagcccatcgctgctcatggaaatgccagtttctccaaaagacgctatgtttataacaagtaaaaaaacaccagtaacaaaaaaaaaagcatgtactagtatctatctatctatctatctatctatctattatattattaaaatagctttgaataaagacaccacgttcgctgtcgaggctagttaatcgaagaaaagagaaaaaagctacaccgttagattacaatgaatataaattaaagggtgtaggtttatcagaaaaaaaaattttatcagtacgaaacaaagtctatccaatacataataggaaagttactctattatattattaaaacagctttgaataaaggcaccacgttcgctgtcgaggctagaaattctcacattaatcgaagaaaagagaaaaaagctacaccgttagattacaatgaatataaattaaagggtgtaggtttatctgaaaaaaaatttttatcagtacgaaacaaagtctatccaatacataataggaaagttactctaatctttcacgtacgtgcatacatgcatgttggattcctaatagtatttggacaaggatgctttccgattgggtgtggaaaaaaaggaaaaacaaaagatgcacagtccatggaagagtacatctagactcaaatcacttaattagccagataatcttgctgtcacgcaaaaaccaggcgcattaattcatctttgatatcaacacgtacacctacacgatagattgttggtaataattttgtagcttactaaaagttttttttctacttaaatacatatttaaggagtctgttcactatattggaactagaaaaaaaatatatgcacaattacatttgttgtttaattacgaagggtttaaatttactccattgatcatacttgaaaaaaaacatttactccaataatcatatttgaaaaattctacaccactaatattggttgatttaatttataataagttataacaaaacatatatagtatataagttaattgtataaggaaaaaatatttcttggcataatagaccaccttaacaaataataattatagacaagctagctcgaacgggaaggaaaaaaaacacagtccctgtcttcataagaatctagcactttgtgaaccctttagttgcatgccataagaaaataaagataactcacctatgtcgtaggttatagacttatagtacttaaaagaacaattttcacggaaaaccctgaacaatttccattgtgtgtattatatttagtttcctatggaggctacaaaatcccacattaatccaagaaaaagaggagaagagttcgagtaaaaatacatctagaaattattgaaattcggaataaaaaaatatggaaagaagagtccatgtagaacacaattaaagattaattaaaatttggaataaaaaatagaataaattccaaaattataaaaataagaataataagagttcaagtaagattacaattttcaaacaatagaaattggaaataaaaagaataagaaatattgaaagatttcccactatacagcacaatacaagattaatgaaaattagaaataaaaactaaaattaattcagaaattagaaaaataaaaataagagttcaactaggaatatggtttataaataactaaatttagaataaaaataaagactattgaaagaagagaccgtctagaacacattaggaagttaatgaaaatttggaataaaaaataaagtaaattctaaaaaatagaaaaataattataagtgttcaagtaggaatataatttataaatatcaaaatattggaatgaaaatatgattttttttaaaaaaaatagtccatatagaatacaacgatgagaaattgcaacaaagagaagagaagcaagcccgtaaaggagtagggtggtggcagttgatggggcataaaaaaactataaacaaaattctaaatagaatcccaatgatgattaagaggagggataacggcaagccattaagtaaccggtcacgacagttggcgggacttctacaaagtaaaaaaaaataaaccacaacgacaatcattttcgatatttaaaatctcaatgataataaaattgagaggcaccatgcgggtcgcataggaatacagtggttgagccaccaacagttggcgggtcttatagaaagtaaaaaataaactccaatgataattatgtttgattttcagaatcccaattacaataaagaggaaggcactgaacgggccgtagaagagtacaataa

SEQ ID NO: 1189 - DNA, 10476 bp, Oryza sativa
  unsure (1)..(10476): unsure at all n locations
ctttgggccaccaacacgttacacattaaaaacttacacttgcacactccatctacctttctagacaccataagcggcaaacccttacaaaatcaaaacccaatgcgcatacctcaagtatatccttaacgtcatccttagtcagtttgttctgtcttagaagcaactctattcttgttctcatctgtgaattgctgaaaatacatggcagggtcaaaaatatgagtattgcactgcacacccgacctcctaactcaacagagcaagaaacactcaagcttcacttacccagagtgccatatatgccccagaataagtgcaattaactgaaaaaaacagccacaattattatagacacttggtaaagtaaataaactaaaggatcaaccaagaaagccatacaagtaagaaaacaacactttcaagttattactatggtacctgaagtgtgtaaagaccagcttctagcttgcgattgtagcgctcatcttcatccatctgagataatgagaatgtagctataagaatttttcatctgttcaaatctgagacaaaaaatcaccgtgggggcttcccccactgtttccgggtcaaaaaaaaatctgagacgaaggcaactaggtagataaaagcacctctagatcatctaaatcaagactgtcaagtctttcagtctcagctttcactctttctgaatacctgcaaatgaatgagcaaagcatggaggataaagccaatagcagaaaaacacaagcaattttcttagttttcttcaaacgaaatataccttgtgtaaaactccatcaaacggtctatcttttcacattcattctcaacaaattttcctagtaacctgattcttcgtgaaccttttgtaataccacctaagaaaaaaaaatgcaaaacaccaaacatgaggaaataactagattaatagggtgtctgcagcatcaacaaacctatatataagtagcacagacaggaacagagtccttaaatgcaaaaggcatcggcagtattatgttcagaaagaactccccactgaattgaataattaactacagaaagaaaacatgatttttcaatatagatgcaaacatgattgtgaattaactactatagtgtggtaaaaaccactgagtattcaagttcaatggtgatcttcccagaagtactgttagatcatttaaatagaataactgcagctgtccaaatatgcagttaaggcttgaaatttttgcatgctacgctatacacttgggttcaaccttaaaaggccagtatgattgaaacgatctgctattcaactactccctccatttcacaatgtaagtcattctagcatttcctacattcatattaatgttaataaatctagatagatatatatatgtctagattcattaacatcaatatgtatatgggaaatgctagaatgacttacattgtgaaacggaggaagtatttagaaaatcaaaggttgcatcctcacttcccctaaagaaactagtttcaacagtcaatcatgtactaatgtctgttaagctgatttatatgtatattgttgattcgcagttgcaggtatcatatacagaagcaatctggatgaagtgttataatactaaggagcaccataaaaatataaacacccatattggaaaaaacctgcttgcttaccaaacaatgaagcaattagtgaaatgacccgttcttctagtgcttcctgataactctcttttttgtttttcttgttcacaggaatctgaaaaaccatatcccgaaataactgagaagcacataggtgattacctcataaagcagttactataagttaaaaatggagacgaataaagatgtcatgtagcaaaggtctactataagctgtttttcagttgaaacaataaggtgtatgctactagttaacagcatttgtgcaatagaaaaaaaaaaggaacctcacataaatttgatcaagtggactgaaactgaaaggcaaacaggatgctctgttataatttgaaaaggcagcagcatgtgtttcaagttacttaaatcagcaatgtatgtgttttccatgtaatgttggttgaaaaggctgatgcagttgaaccactttcatccattttcagatttacttcccaatagaaactgtaactgcagaccataagaacatatggccgggttaaaggtaatagtgataaatttaattctcttgcatattactgcatcacagcattgattgatgttcacaattgaaactatataggatttgatcagtataggagtatacaagcactttcatccattttcagatttacttcacaatggaaactgtaactaaagaggatgagcatatgaggcttcaggaaatggttatcaatttagttatcttgcatgttagtgcatcacagggcaccgcattgattgatactcagcatccgaaatcttataaatgagaagagaaaaggagtagcagacacttgccttacccatgaacgcagcaaaagcggtcttcagcccaagtacatcaacaaagcgctcgcaagcaggtgggaacctagtcatggcaaaatcgagggtccggatggcagagctgtatgccagcttcttctgcttcatgatgatgatcatgagctcgacgccctccgccttgacaaatctttccttgttctccatgggccattgagtctactatcnatgtcttagtagtggggcccattaaatttccccgtaaattaaaggngaagtgtttnttctttccggaaagggcccccaatttttccatttcaccctttcctttcattncaggaaggagggntctttggtcctgacttgtacatggcaacggcctgcagcaggccgtcgactccattgatgttgcccaggcgcttctggttggcggggctgtcctgtacgatgatggcgaggatctcggaggcgtactgcttgttggcatcgaactcgctggccttgaggcgggcgaggagccagcggagaagcttggtgcggtcgcagacaatgtcggcgagttgggggcggagctcgaggaggttttcaacgacagagagggggtgggggacagcctcggcttcgtcggggtcggcctcggagaagcgggagagattgtggacgaggaggtcgagggcgttggcttcgacgagggcgtcggcgagggagtggaggccggcgaggtcgtcggggtcgtcggagtcggtgaggtcggcgaggagggaggcagcggcggcggcgaggtcggcgttgtcgtgggtgaggagggaggagagggaggaggcgaggcctagggggacgaggtccgggaagaggtccggggcgccggcgaggaggcggaggcggtcggtctcggcgtggagggcgatctcggagtcggcgaagcgggcggggtcgtcggggtgcttcatgcgggcctcgaggttgtcgcgcaggcggcgctcgaaggcgagcaggaggcgcttggcggcgcggaggtcgagcacctccacgtcgtcggcgccctccagggaggagaggtccaccgcccccgcagcgccgtcgtcgtcggcgtccggccgcttgcgcttgtgcgccgcatccatcgaaaggaatagggggagggggagaggctaaaccctaaccctagccagcgagcgcggggccggaggcggaggcggctgccgctgcggaagaagaagagtagtagagctctaagattcgtgcagtgccggatgactagatgatatgaggctctcagtatactcgcagcagctactgatgacatacagtatgttaaaaaacagcagcagattgagtactttgatcaatttctgggctggattatcatcaacatgttgcaatgcaactacaaatgagatctacaaatagataaatgctttcatcaattgattgataaccagatgatcgagatgaggcattcatttcatacatgacaagcagattagaggtcagaggagagaccagcacatcacatacgtagctccataatactaatactctaccaagaattaataataagaagaagagtaagccgttacattcatgaaaatgaacagagagaccagtcacaggccaagaaaaagctattactagtacttgccttaggaaggtacagtaagttaaaagttgttttctgaccaaaggatgactctacaaccagaacgagtagcattcaggtaggctttgtcatgccttggggggttcttcgttctatccactggagtagaacccagcagcaagtttttatattagcaggatcagatgagcagcacgcctgccataagcagcggatgatggtcgctttcattttcatttcttgtgcgccctgtagtctggggagtttggtggcaatggtgaaagcgggtgcctcgatgatgaatctgcaccattgaaatcgatggtccgacccactgggctcgtatccttcaaacttgatgatttgcgcttgtgctgcaacaaacatatacatgatgacatcaaacttctttccaaccaacattttcaacaagagacaaattttccttgccagtttataccttggtggtggacgcactggaggaatgctttctctcagaccggtgctgtcgctctttctccaacagagccaacagttttttgttctcttcgtcaagaatcttgttttcctcgaatagcagcttgaccttcaattgaacacaagaaaattttctagccatcagccaggcggcacaggtttcttaatgatgcagaaatgaatgcaaggacaagagtgtttcactatcttacctcctcctctgctttattaagattgatccttaggttttccttgtccttgtgcagagcttcaacttgagtggtcaatgcagaaagctgcatatggaattagaatcagaatagatcaagcagggggcagacggtgctatagcatttgttactaacatctcaacacacgagcttagatgatcaaatagttaaagcagaatattcaacaacagttgatcaaatttttactagtttttttttgggatcaaagaggaacgaagccgtttccctcatttacattaatagaacggcagggtttactacatactagtaacagagaacaaaattaaaaagaaaatgcaggcctccgctctactggtgccatcccagcaacttgaggctatcctgaagaaaaccatctactggcagcaaaattttacgacattaaagcgaaacatgtactgaagagttctcaatccaacaagaccacatcacatctagtagagggaatattaattaatattcatactagggtaaaagaaaagaaattcacacacatgccgcgccaagaatgaaagaaaggggatgcgaaggaggaagggtactgacggtggtgtggtcattgaggcgtgcgcgcatttcgtcgttctccttagcgaggtcgtcgcaggactccatggcgcgttcgaggtcccgctcgtagagggtgcactcccgctcaagcttggtggagtgggaggagaggtcgttgtaggcggagaccatggtctccttctcctcgatgcagcggcgcaggcccgcggcgttcatggtggactccgcctgtgcaccagatccagcagagcaagagcagttgcagttaggggaaagggaaagggaaagcagattggtattggtattggtactagattagagattagttaccttgagctgttcgatgcggcgtgcggctgcgcggaggtcctcctcgaggacgaagacgtggtcctggaggcggcggcgatggtcctcggaggcgagcagcttgaggcggagggagcggtcggagacggggaggccgagcgagtcgtggatggagtcgcggatgtagtcatcggcgccgccggggagaggggtagaagaagcatcctcctctcgctccatggatgatcgccttcttctcttctcttcttccggcggcggcgggggcggcggcgccgacgaggagaggagaggagaggaggcggcggatgagggtgagggttggttgatcgatctggaatttcttggggaagagaatgtgggatccggatggattttgaactgaacccgctggataaggccggggtgaccgttgctgctattattgggccgggccttctctttcgatcttttccttccctatttcggcctattgcaggttctctttatttagacttaactttattgacttagacttttaataagtcagcttattagtttatatgatttatatatataaaccgatggatttaatgttttaagtttagtggtgaagtcacatctctacttcacataagaaaaaaaaaatctccaaactagtttttggcttgatgtgttgagcggcttatggcttcaaaataagccaaaaaaaaaaaactgtttgattaggcttagactttttggctcgtaaactatttactgggctcattttaattctgcagttgctttcataggcacgcgcattgtgattggatttcaactgcatatcgcactactcctgcggtaaaaacaaaaatcaacgtttaggataagattcaaccaaatttttaaaattccaaccatcactatattcggataaatttataaattgtaagttgataatactatggtgaatccacatataccaattttttatattaaacgaagctttcgggaaattttttatggccataatttgaaaagtttaatacaatcttgctaataccgaccattatacattccagaccgatgcatgagttgaccaatggacaagtacaaccttctagctctgcttgtacttgtagaatagaaaaacagtgtcggcggcaacaaaattacagagccccagaggttggtctgattacgagcatatgcacgcagtattttatgagataaaaaaatcaatctgtttaagatatcgatatttcgtacttcgttctgacatgtgtcaacctcattagctaaggttaaaaaaaatatagtccagaagaattactgtaatgtaatactgtagtgctggccagttttctccattgcaggcaaacctctctatgcaataagtcttgggagatgagatgtggaggccccagtgaacaagtagaatatgtgggcaatgaatcaattaagcatttcgtttccttggagagctagttagtggtagcggataaaatgaaatgtagggaaggaatacaaatgaagaatctcacaatgcgatgatgacgatggaaagaaatgccttgcttgcctggactcttgccggtctcgtccttgataccataacttgttcactttaatttgttctccatcaatcgctcaagcaatccatgctgccgcagaaggtggtgtaggtacatataagaaatgatgcctgcctgcttcttggaagtcatctttcttctctctccctccttccttcctcttgatcatctagtataaattgaggaggcttgctggatccatacaacaacaaagacagtagtatcatataacagcaagcaaataagaaagctaggtagggcattcctccctcctcaagtagagaagagctacagctgcagctgcagaggggggcataatggccgtcgggttgaggagatcggacagcattgccgacatgatgccggaggcactgcggcagagccggtaccagatgaagaggtgcttccagaggtacgtgtccagggtaagaggctcatgaagaggcagcagctcttggacgagctcgacaaatccgtcgatgataaggccgacaaggaccagctcctccagggcttccttggctacgtcatatcctccacacaggtaggagaattacttactttcctaggtacatgcgcatctctctgtcaatccaacatcatccatgggccatgcaggaggctgcagtgctccccccattcgtcgcattcgctgtcaggatgaaccctggcatctgggagttcgtcaaggtccattccgcaaatctgtccgtcgagcagatgacaccgtcggactacctcaagaacaaagaggccctggttgatgacaaatggttagtcaattaaatattcacatttgctttccgtgtagctattactattgctatttaatcaacatccttttttgctttataatctcataatctggttggttatatctaaattaattaattggctgggtcaggggggcttacgatgacgactcccagctggaagtcgattttggcgccctggacctgtcgacgcctcacctcacgctgccctcctccatcggcaaaggcgcgcacttggtctccagattcatgtcttccaagctgaccgacaacaagaagccattgctggactacctgctggcgctcagccaccgcggcgacaagctgatgatcaacgacatccttgacaccgtcgacaagcttcagacagcactgcttctcgccgaggtttacgtcgccggcctgcatcccgacacaaactactccgaatttgagcagaagtacatgctgtattaccatacctggtcaactaccaaaagcatgcaacacgaatacatgatccaatatatatttgtaatgcatcatgcaggtttcaggagtggggactggagaaaggctggggtgacactgctgaaacatgcaaagaaacactaagcagtctctcggaggtgctccaagcaccggatcccatcaacatggaaaagttcttcagtacggtgccctgcgtgttcaccgttgtcatcttctccatccatggttactttggccaggagaaggtcctcggtatgccagacaccggtggtcaggttgtctacatcctggaccaagttagagctctggaagacgaactgctgcaaagaatcaagcagcagggcctgaatgccacacctaagattctcgtggtaatttaagttttcaactaacaattgcatgcatacctgggccatccatatctattatattattaagacagctcgaaaaggaggcaccacgttcgctgtggaggctagaaattcccatattaataggagaaaaagaaaaaagaaaaagagagtccaagtagaaatacaatctaaaaatagctgaaaatcggaattaaaaataagcaatattgaaagaagtttccatataagaacccaatatgagattaatcaaaattcgaaataaaaataaaataaaatacaaaattagaaaaggaaaggagagctcaagtaggaatacaattttgaaacaactgaaattgaaaataaaaaattaaaacattaaaagaacataatacggtagtaactaatttttaaaaaaaaataaattatgaaattagaaaaagaaaaataagatttcaattaggaatacaatttataaataactaaaatttgtgataaaaataaagactattgaaaaaaaaaagaccatctaaaacacatgacgagataaattaagtaacatgcctataaaggagtagagtggtggcggttgatacgacatataaaaattgttaataaaacaccaaatggaatcctaatgacgattaaaaggaggaacgtcaggtaggccgtgaagcaaacaagtaaggcacttgctgggacttctagaaagtaaaaaaaaacccattgataatcatattcgatttttaaaatctcaatgacaataaaaatgagaagcagcgggcgaggtgtataggactatagttgcagagccgccgacggttgacgggacttctataaaattaaaaatgaattccaacgatagttatgttcgatttttagaatcacaatgacaataaaagagtaggcaacggacgggctgtagaggggcacagtgacatcgtttgatgggacttctaaaaattataaaaaatgaaactacaagtccaatttttaaaggttcggaacttccaaaaagtaaaaaaacccaatgataatcatgttcgattttaaaatctcaatgacaataaagaagggaggcagcgggcgagccgtagaggaatacaatggcaaagccgctgatggtttggcgggacttctagaaagtaaaaattgaacccaaacgataattatgttcgatttttaaaatctcaatgacaataaagagaagaaacagtggacgggccgtagaggagtataaggtaacgtttgacgggacatctagaaattataaaaacaaaacccaacgtgacaataaactctaaaaactataaaatccaatttttaaaggttccaacaagaatgaatagaaatagtggtagatcgagcaagcaaataaagaagtaaatgacataaggggtagcaactggtgtgacttttaaaaactatataattagaaacacgaggatgataaggtttggtcttttaaagtcttaagacaatgagatagctatttaataaattttaagtaaaatcatactaaaaaatatataattttgtttggatgctagccacgcaattgcgcgggccacccagctagttatcatatatgatactacataatcacttattgagaattcagatagatagtgacatatgaataaatgcaca

SEQ ID NO: 1190 - DNA, 1473 bp, Oryza sativa
cagttatccatcacttcgggttgcctatattgatgaagttgaagagccaagcaaagacaggaacaagaagatagaaaaggtttactactcagcgttggtgaaggcagctgtaaccaagcctgacgatcctggtcagaaacttgatcaggtgcttcgaaaatggattttaatttaatcattttttatgattatggcttcatgtgattgcattagtacgtctttattagtcacttcgttagattacaaccctattcgtaggttgtagttggactggttatgaaggttaagaaagttttgaatttgatgaatctacaagagaaactcacttgagtacccttccaattaagtgttctacaaatacgaaagataatgacttgtgttggtggtaaactggtaatgcggtaaacataggagagaatagcttaagagctaaggatttaaatctgcacacacaccttatattttggagaactggcattaactaaaatgtcttacataaagtaccaaatggagtattaatttataacgaatcgatgaatttatgaaattcctaatcatggatacaatgtttggagcagatgcattttctgatctggtggtgatacctactaatataaacttttctttgcgggaaaagggaacatataaaacttacttgaattgcatcatttgctgtgtaggacatatacagaataaagctaccaggtaatgcaatgctaggtgaaggaaagccagaaaatcagaaccatgcgataatatttactcgaggtgaaggccttcaaactatagacatgaatcaggtaaacagcactgatgcttctagttttgcaacattttctattctgtttgcttatgtaggcaagcataataggaacattacatggaggagactttgaaaatgagaaatctgctgcaagagtttctgaagaaacatgatggtgtgaggtatccatcaatacttggtgtgagagagcacatattcactggcaggtatagctgtgaacttgcgcttccccataaatttgtgactatgtatactacttctcatttaaattaccctatgatcgcatgtttgcttttgcagtgtttcttctcttgcgtggttcatgtcaaatcaagagacaagttttgtcactattggacaacgggtacttgccaatcctttgaggtgattcatcttactatggatatattttttttttagaatacgcaggagatctgcgtatcatttcattaagagaggaagacggtggaggaaaccccccaccaaggtcttacagagacaacaccaaacacaaagctcacgcagcaaaaagctcacatagagaaacacacacaaacgaaatttggcttttatgtttgtatggatttggctttaatatgcccatgttagtatgtgtatttttttgattcatatgtttgttattccttcatttagtaacagaatttggataattgcattgtaactaagca

SEQ ID NO: 1191 - DNA, 605 bp, Oryza sativa
cacgcagtcgttcaggtacggcttcgcctgcatatgcacgcgccacggcaccaatgtcaatgtccctggccgaacacctggccgccacaagcgcgccgccgtgcgcgtgttgtgcgatgcgcgacgcgacggcggcgatggcgtatgaatgtgctacgtacgtacccaggcgaggaggctcttgtgggagccgtccaccggcttcctcccggagatgagctcgaggaggaagacgccgaaggcgaacacgtccgtcttctcgtccacgatgccgtgcgtgaagtactccggcgccaagcacctgcacatcaatgtcgtcggctcagcgtcgtctcgtctccctgtttttactgccatggccatggtccatggagaacgtatgtgtgctcacccgaaggtgccctcgatgggcgcgatggcgtggtgcgtccactccgacggcagccaccgggcgaggccgaagtccgaaatctgaggcgaattcaattctttctcggtgagcaaccggacgaacagatagcgagcagaggagaggtagaggaggaggaagaacctggggctcgtagtcggcggtgaggaggacgttggacgccttgatgtcgcgg

SEQ ID NO: 1192 - DNA, 728 bp, Oryza sativa
tcctgcagccctgcaggcctcaccaatgcataaacctgcaaaacttttcctttcattgagagctttgggagcacctgcaaatgtgattatgttagcagttcagggaatatttcgtggattcaaggatactaagactcctgtattttttataggtaacttccaagaactactcttcataaccacatgattacattggtttgcattagttatattccttttagcagtcctagcaaatattttgtggaatcacaataatgtttccaatatcttttttttccattttccacaataaagggcatactttacgtccagtttcatttgattccagactcttctctgatatcaaatatctctcatattacactatatgatgtctgtaccatgttcttttaaaacatgtaggtttgggaaatctttcagctgtagtgcttcttcctttacttatttacgtctttcggcttggcataactggagctgcaatttctacagttgcatcacagtaagttctatattgatacctagccccatggaatccaagtaaaacaacaaaggtaaaaaaagggaatattttatatgaatatagcagcaaataactcagtttggttccaaataccaactgtttttacttatagacatgtttctaaaataatgaaatgcagcagaaaataaactttagctttccttttggttttcatttatcagcaattcagcccacacatttaaattac

SEQ ID NO: 1193 - DNA, 600 bp, Oryza sativa
cggtgaagtcgtagacgcccaacagcggcggcataataggccagccgtgtaggcggaggcaccaatcggcggcgacggaggcaggccggcggtgaaagcgtagacgcccaacagcggcggcataataggccagccgtgtaggcggaggcaccactcggcggcgacggaggcaggccggcggtgaaagcgtagacgcccaacagcagcagcataataggccagccgtgtaggcggaggcaccactcggcggcgacggaggcaggccggcggtgaagtcgtagacgcccaacagcggcggcataataggccagccgtgtaggcggaggcaccaatcggcggcgacggaggcaggccggcggtgaagtcgtagacgcccaacagcggcggcataataggccagccgtgtaggcggaggcaccaatcggcggcgcggaggcaggccggcggtgaagtcgttgttgttatcagcaatggcggtggcgaagacaagccggcagagtggactcgcggccgatcgaccggaaagctgagacgcctcgagtccatgaccagcatcaatcgcctcaatagtgccgcgtaattatatgcgaacaacacaaa

SEQ ID NO: 1194 - DNA, 647 bp, Oryza sativa
ctagacttgcatgtatacaggatgaatattctcaatgggtagtagctagccaaagaagccttcttgaagttatggctgcattcccttcagctaagcccccactgggagtattctttgcagctgttgcacctcgcctacaaccgcgttactactccatatcatcatctccaaagtaagtatattctgacctcttagttattatttatttaaaaggacacagatggtatccttgtgcttggcaaggaacatccacttcattttgtggggttcaaaacagcaagaagcttacacaaatttttattaggagtgcctttcatgccttggtcagcatgaattcttcaactgctagattgctgcattatagtgtaatgaagtcattttcgatttcagacactgctgcattgttgcatcatggtgtcatgttagattttggacactgtctgataatgtattttttgtggtcattttgaggatatgacttgctgttctatttgttctcttgctgcaagatctgactccttgaatatgtccctacaggatggctccttccagaattcatgtaacatgtgcgttagtttatggacctacaccaacgggaaggattcaccaaggagtttgttcgacatggatgaaggtgagtttcttgt

SEQ ID NO: 1195 - DNA, 1291 bp, Oryza sativa
ttctttgttccaagttcctacgagcagttgtgcttcctagttgcatttatttttaccttgaaacattgttagtactcccttcatcccacccactaagacactaagggtctgtttgacacagctccagctccacccctcctgagctggagcttagccaaacagtttcagctccatcaaaattgggagtggagttgggtggaactctgtcacaaaatatacgagttgtggagctgggtttagacagctccacaactccactccagactcaactcctggagttatatttaggagttggagctgtaccaaacatgccctaagatgtactccctccgtttcaaaatatttgacaccgtttcaaaatatttgacaccattaactttttagtacgtgtttgaccattcgttttattcaaaaaatttaagtaattatttattcttttcatatcatttgatttattgttaaatatactttcatgtacacatatagttttacatatttcacaaatttttttaataagacgaacggtcaaacatgtgctaaaaagtcaacggtgttaaacattttgaaacggagagagtatgtgtattttaatagtcaactctttaaatatttaactaataaatattttattataaattatattttatttgatgaaaattatatcattggattgttatttaatttacctttaaatgattatgattctattgctaaaaaaatgtagtatataagaaatttaaatataaagattagttttaaagtctgtgttaagtttaatcgtgttttattgagttggagggatggagtacttgttaaaatactggtaagtcaatgctgtttttagctacatccaccagcctcgttgaatgttgatccaaacagttgttctgttccattttatatattactctctccgtccctcagtagatcggatcagagttgagatttcacaaaagaataccttacgattggggaaagtaggaagcggtttgggcatgcgctgcacatgtgagcagttgtcagttgagcaccatgtttatgatgataagctcggacgtactttcttagtcccaaaataaaaatcaataaagatgtaacatatttcagtactgagaatcttcacgtggagatgttaagcaccataaatctagacagatttgtgatagttgtacgagataatctcttatatgccactgaaaattggtctgattccttatatgccactgaaaattggctcttcccttatataccattggtctaaatttgtgcaccatctcatgccactaccatc

SEQ ID NO: 1196 - DNA, 597 bp, Oryza sativa
cccccatagttcattttctaggagtagatctgctagctccactccaaaaaatggaggatctggaccgtttggcacagccccggctccaggtaagttggagttgggagctagagctgtgccaaacagggccctgcctaagagacagagcggctgtatgcctatatcagtgtaggataacaattgaagcgaagttgttacttatcgtacgtgcatacacatttgtgtttacagttatcctcactgaactctaagatggcagcatttatggatatgtggttgccagggctgctttgagattcttcaactgactggctcctttacaattgcggaggaaggcgttcggaggagaaccggcgggctcagtgtctcgcttgccggccctgatggccgtgttgtcggcggtgtagtagctgggatgctgcgagccgccagccctattcaggtaaagaaacaacaacaacaactgaagaacctggacaaaattaatcgatttttcgataacgtaattcagtcgaaccaagtaccatgcttttacaactgaagatagagaacttcgttgttaactctgtcactcatgcatggtagactctgtagcca

SEQ ID NO: 1197 - DNA, 1207 bp, Oryza sativa
tcctgcagccccaattgtatgaagagctctgtgtacgtctcttgccatacccttggcatcaccgcacacatatatgtaaccaccttgtgagacgatgttccaaatttctgtggcctgatatcagcagaaaacctcattgagtatagccatgtgtggggaaattctgtatagaagttcaagaaaagcagcatagtgcggtagaaatgtggagcgtgtatcgaactaaccttctctgtcatcttatgctgcacgtattctttggctggtccttcacgagagaaggcaacaatcagctcagaaagtgcaccctcctgaatgaagttttgcaactcgtcttcatatatgtagtcctgcaggttggtcattcagatgaggtccagtaagagcaacatgatcataatatgtatctcatgaactatcttttgatgcataccatattacggttcctgcatccaaagaagagaactgaattgcccagttcaactccagattgttttagagctaatctttcctgagcaagcataaataacagataaagttactagggccatctcaaatccaaagtaaacagaaatgaagatttgggaaaacaaacctgcaagaagcctctaaatggtgctaaccctgtaccaggaccaatcatgataattggagtggtcggatctgcaggcaacttaaaatttgactgcctcacataaattggtgcccagctacactcttcactatattctgatgggattgcgttctacaaagtagatattgtggaggaggaataagtcaaactgctgtaggaaaccttctcattgtcattgcaggcaatgcaatatagagatatatagagagagagttataatttgtacaagaaactcaccttcatccatgtcgaacaaactccttggtgaatccttcccgttggtgtaggtccataaactaacgcacatgttacatgaattctggaaggagccatcctgtagggacatattcaaggaccagatcttgcagcaagagaacaaatagaacagcaagtcatatcctcaaaatgaccacaaaaaatacattatcagacagtgtccaaaatctaacatgacaccatgatgcaacaatgcagcagtgtctgaaatcgaaaatgacttcattacactataatgcagcaatctagcagttgaagaattcatgctgaccaaggcatgaaaggcactcctaataa

SEQ ID NO: 1198 - DNA, 2099 bp, Oryza sativa
tttcctctgacttctctcaattagatcaaacagtaccatgactcgtgtgcttctcacaaccattgttcctaaaatatccatcttttaatccaccttgagcttagatgcttctcataatcagtgccccatgaaaaccatgtaacctaccgagactggctaactgatatgtttagttttgattgaatacccttttaattgtgtgatattttggtactgcagaaacctatcgtggatttggctgatgaattcgaaaacaataccataaaaaaaaagatcacggtatgttcatatattgtgcacattattttttgtcagtatacatttaactattctgctaacttgaaattctatacacagcttcttagcgaaaaatacgatttcttcagaccagttgacagagatggcagttgcttttatcgagctttcattttcagttacatggtaaatatttcggcccgcttgttcaaactatgctttgttcttgtttgttagacactaaagctcattggtgtacaaacaggagcgtattgtagcaatgcaggatgacttggagcgcattattgaagtttcccgtatcggagaacgtattggaaaatacaagcaagcttatgcaagatttggttcttttggaatacctcaagaagaattcttgaaagctctttctgtacgtacttttagttctcagttttcaacattcaccagtacaatttgcccagtgtgggacattcttttcacattttatattattgatcacaccttcactcttttaatcttgcaagtgcacacttcattgagtttgaatagtaactgccgatgtcctttggccccatttctattgaactgattattttgattagctttatagttcattttggaagtcatttggggcaaaatgttttctgtagtcaatggtacggcacatcacaaatgagctaagcttgtaaatcgttatgtgatttccatgtctgctcaggttaaattaacctgcgctttgctaacagctctggtttgctatgcttgctgatagttatgatttgtagcatttggttttctttataatttatagcccagaatcactgaatttgctgaatttctttgttgcaggcatttgaacaattgatcaacttaattgaaaaggggtatggctaattagcatcctgttggttttcaagttatgtttaggaatgatatgaagatattgtttcttgttatatcttagctgacaaacactgtttgtatttcatagtgttgctgttgaacaactatatcagatagatgagactgacatcacaaaaaacagtgaggatacttgatgattgctagactgtttttccttgttactcatctgtttcactgcatgatttttttttccctgtttaggtttacgcttccttaggtttctgactgagattgagatctgcacacatgaggaccactacaagggttttcttctaacagcagattattcatctgtttttgaggtagaagaattgtgacttcctagcctactaccacccacccatacttcattaccaatattttgctgcatgtgtagtgctttagatggttgttgctaattacgtaatattttggaatctaataagaaaaaaactccttaatttgtaatctaataagaaaaaaaaaactccttgaattatgcttctaatgtaccagatgttaaaatttctaaacaatgctaggattttctttttctttacaggctcatttgatcccacaaagtccaaacagtaggcagaatggattatctttttgtttgatttattggcccctattacagttcaaagtccaaacaatttgctatatgctccttttgactctttgttttagttgttgaagttaccccactttgaaaagatgttgaagttacataaaccacaaagtcaaacataggacataagcgggaagatattatattggatgaatctatttatattaataggtttttcttcgcctagcttctattccttctgtatacaagatttaccagcaaaaggaaaaaaaatatttaggcaattagcatttacttgtgctttgtttcgtcaaacagttttgccaggttgaagtgcgacctgagaatg

SEQ ID NO: 1199 - DNA, 3815 bp, Oryza sativa
ggtgatcatgcagatcgctgaactgacacgtagaggacaaaaatgaccgatctgtgaccggtctgacactggtcgcgtcagcaacagacagccacgatcccacgttgcgcctgtctccgccgggagtggaggtaggtgtgggttgtcccatcgaaatgtcattcggacggcaaccataccaatctccgtccataaagagaagaaaagtccagtttggaaagaaaagggtacatgtggtatccccttaagatataaaaggaggaccatgcccacaaagagagggggctggattttcccgggagaggagagggctggttgattttttgtaacttgctcttacacagatccaccaaaaacacaggagtagggtattacgcttcccagcggcccgaacctgtatacatcgtccgtgtctcgcgtttcttcctggcacgcgatctttccacacacagagagagcttgagatctcaccctaagcccccggccgaactggcaaaggggggcctgcgcggtctcccggtgaggagccccgagctccgtcatactcaatgatgtaaaatagcattgaggtagaggtggataatgcagaatgcatatatcgtgcacattctctctatatcctttaaaataaaggattttataaatagattgtattttcttaataaagtctgcttggtattgattgaggcaattaacattacaaagagactcacaattttaactcagggcagaaagagtgattagctttgtttaattttagacgataagatgatattggtttatttttaatatgaaatcatatgaaaatttaagcaccctctgactatacatactccctccgtcccaaaaaaaaaggcaaaccctgagtttctgtgtccaactttgactgtccgtcttatatgaaatttttttataattcatattttcattgttgttaaatgataaaatatgattaatattttatgcatgacttgtctttttaatttttttcataattttttcaaataagacgaatggtcaaaccttggacacggaaatcagggtttgtctttttttgggacggagggagtacattatcggaaataataaaaacaaaaacaactgcatagaaaaatatttaggagagtttccaaaatccaaacactcaatgatagattgatgacacgcaaacatatagaaggggaaaaaagaaaaatgtatatattagaaggtaggcacaagtatgatccacaaaaacaagataaaaataacctccaaattagaatcaggaataaatttatgtaaccaatcacatgtgatttcatatggtgtttttaattagaaaaagaacaccttaaataaataaagtagatactaaaggagaaaatgactaattggatattttccttaggaaacctcgagagaccagacgatgtcggttcacctcccttggaaattttcatcctcacccctcacagctataaaagcctagccctccgcccctcgggcccctcacgaacacccgcatccgcaattactcacaaagcgagggggcaaaccgagagaactcgcgagagaagggtaaaaaggtctcttcccaagaagaagtcatgcggcgtaagcccgccgcccggagggtggttggggaagcgacgccgaccccgactccgggagctccggcaatggcggtggcggaggttcgccgccgtcgtcgccgtcgccgccttcgccgccttcgccgcagccgctgctgccgacgttgccctcaccgcaggccttcgtggacgcgtacaccggctatgaggttagggttattgaatcgcgtctcgtgctcttccccccccctcccccccccctctcccatttcctgtgttgtcttcgggaacacaccccgcatcgaggttttttttttctggtgatctttgcgttaacgagttggtgggaactggtggggtttttctcgttgcgatgcgaggcttgttgagttttcccaacgcgcggctcggctgctcttgcggtgaaattttggttgggagtagtcctgcggggagcagcggggatgggttttttggggtttattgggtagtttctttgaattgatcggttgttgtttaccgtgtgtttcttgtcttctggttcttggattctaatctgtttgtcggattagtttcgtggggttttgtaccatttgttcttggatttttttccccctctctcagctctgcctctgctgcttcggcttcaccataccgctccttgtgcattggattgtttcttgaaggttttaatcgagtttcaaggtagttcttggtctctatctagtttgattgtcttgacataggcaagaattagggcatttctttctttaacctttgagtttgacgaattgcatctccccactcttgcttgcatgattctggacttgatacttcagacaggtggaattaatgtcagaaaataatacgatctgcttctgctgcttgcgtgttggtttctggtcgatttctctatgttttcagcgacccaaatagataactcagtgtcctaatttagacttctgatagctttgctgcctgtgagttttgatcttgttacttgtatatactattgtgaccgtaatattggattctattgtgatcgtaatgttgcctagtactgtgaaaatgtttgaaagtactacctcaggatttagatcacgtggttttattactgaggatcacatggttttattgaattacaggatcagggagcatgggaccccgattccttgtctctagagttgggacttgcaacgttacgagagttggaatgtatcagatatcaggtgtgaacatcatcaacacagcacaagactgtaaattcactagcagactaactagatttacccaaacatcaattttgaagctaatttttgcattttgtccgttcgtctgcggagcataagctgaccatcccattgccgtgaattttctttaggaagcacaagaagactggagaaagagtgatgataacaagtctgattcctgcaagcaaaaagataaggtgtgaaagttctctttctatttcatcgaacttgctttgcatggctacatggacctgagcttgactaattgcatcttttttcccctcttgcttctggacttggtacttcagataagtaagaaaaagataatgtagaaaagtgatcatctgttaccgctactcgcgtgttggtttctggtcgatttctctatgttttcagcaacccaaacagacaacttagcgtcctaatctagacttctaatagctttgctgcctgcaccttgtactggagagacttctgatagctttgctgcctgtgagttttgatcttgttaccggtttactattgtgatcttaatattggatttttgtgatcgaaacgggcaactttttagcacatgcctagtactgtgaaaatgtttgaaagtactacttcaggatttagatcacgtggttttattactgaggatcacatggttttattgaattacaggagcaggaagcatgggatcccgattccttgtctctagagttgggacttgcaccgttacaagagttggaatggatcagatatcaggtgtgaacatcatgaacacgtcacaagactgtaaattcactagcaggctaactagatttacctaaacatcaattttttgaagctaattttgcgtttgttcgttcatctgcaaaccataatctgaccatcccattgctgtgaactttcttaaggaagcacaagaagactggagaaggagtgatgataacaagtctgattcctgcaagctaagagataaggtgtgaaagttctctttcca

SEQ ID NO: 1200 - DNA, 2942 bp, Oryza sativa
ctcccgtgttgaaggcggagggagtcctgcgcctcaatcatcgcggtggtggcgacgagggcggcctctcgctcctcctccacctctcgggcgatctccgccagcgccgccttgcgggcttcaagctccgagatgtggcggcggtgagccttacggcccacctccaccatggcgtccaccgagcgccgcccctcctcgacgcgcgcccatgcggcctcgagctccgctcgttccgctcgcaaggcctccacctgggcgctgaatccatctagcaccgctgtgtttgcggcggccaaggcttgcagaaggggctcggcactcagcggggtggcagaagacgaggagaagagccgccttggagaaaatgcgacgcggctcggcccgccagaagacgcactgagctcggggatgtcccccggacccgtttggtcctgggcgtcgcccgagggagcgggcccaggcgatgcgcccgcggccttgtcgcaagccgccccggaggttgtcgcctgagcgtcacccgagggagtgggcccgagcgacgcgccggcggtcttgtcgtaaaccgcctcgaaagacgccatcgcctctgcctggcgagcccgggcggtttcctcccgggtgacttcttcagcctgacgagcccgggcggcctcctcccgagcggcttcttcagcttggcgagcccgggcggtttcccgggcggcctcttcagcttcccgaaggcgatctgcggcctctcgccggtcagattctcgcctccgttcctctgcggccgccggatcttcggcttcggattggccggacttgggatggcgggaggaacgcgacgggacatcactgaagcagaaagaaaaaccagaaggcaaacaggatgggtaagaagaaacttgcttttggaatagaagaaaagacggtcgcaatgagcatgggacgaacctgcgagggggtcggttaaatgaccaccttggaggggaaattaggtttccccgggatggttctgtctcccccatcttgcgcagccgcttcttcttgcgctccccctcgggctgcgaggttggcgcggccccctccgggcgcctgctgctggcacgcaccgccccgccccctcggggaggagatgggggaggtgttcctcccagtttcctcttcccccgggcgtcggtagggcggttgctccccgagcccccgacgcggggcccagaagcacggccccctcctggggttgattcttcctggcggctcccgccggcgccgtcgtggcccttaggagccacctcctctgaggccccgacccccatcatgatggtcagaatggaggcgcggtctggatcgcagcagagggggaggagtccttgaggaataagagacgcctccacggagctgagattcagcaccctttggaccacgatcttgaagtcatcgggagcccaatcccgtctgactccccggtgggtcctcatgtagtcctcggacccggtgtactcccatgcgctccgggcgcgccgctgaagcggcgcaatccggcgacggaggtagtcgccgtacaccatggcccctgtgagcccctgagatcgcaggcccgccaggcggtcgaggacggcgtcatagtcatcccccagatctactggcgcccgccagctggagaccggagccgggggctggcttgggagtcggaggcgcgcttcgttggcaaggggggtgtagaaccagtcgctcttccaatcgtcccacttcttgcggagggcgcaggggatgtagcggttcaacaccggcccccgcggctggaagtagcaaccaccgaccaccgacggcggcgacaccgactgcacggtgaagaaccaccggaacagccgaagagatgggcgcaccccaatgaacatctcgcacaggtgcgcgaagatggccaaagtcatcactgcgttgggggtgaggtgcgccatctggagatcgtagaactccagaacatccataaagaaagaagaaaaaggaggaaccaacccggccattgcgaaggggagaaagaagacggaccgccccgggtagtctggcgccgggcgtccctcacccagcattactatctcacggccggtggcggattccggcatgaagcggcccggcagcccagcctgcctctcgctcacaatgcgggaaggcggtagtacgctaccgtcgagcagagcggagccccgtgccatgtcgtcggagaaagagagggttgagaacgagtgtgtgtggcgaaggtgaggcgcagcaaagagagagttaggggcgcaaacggcgaaggaaaggggaatagtggcgaaaggaagggagcaagtcctttcctcgatagctttatacccttgccatcgctgagcccggctcctcgtttctcgtgcccactatctcgctccctcgttactcgctatctcgctccctcgtttctcgcgcccacgcttccactaaattccattcgcccgcttgcggcgcataaggtagatatgcggttgtggcagtcgagatagatcgtatcgtgtgtgcgttaattacgctcgctgaccgaagcgacgttaccatatctccagacgaaacgaatctacacgcccagattcgagcgctgctcaagtgatgtggcagtcttgaagagaccgcccatgactgacggccaagacaccgttaccgatatgcgtggtttgagaccgttgggtttctgcccaatcacggagaccggtcccacctgtcaccaggttttatgagtggcgtcatgcccgaccgcttcccttgagaaggatgattgccctgacataacgccgggggctactgtcggtgatatgggaccgggagtattgcgcccggaggcttgaggcagatggaatcgcccacgtggcctggcaccttcggggacgtcgggcccgagggtgaggtgtccgccctcctcctgatttccccgagggggggtcggg

SEQ ID NO: 1201 - DNA, 725 bp, Oryza sativa
ctgaaggaaaggccgcccctttcatcctccgaccccgaggtcatcggcacagaagacaagtgcgccccgaaaggccacttgaacgaagaacgccccggggatacggcccctagcagagaggatcggccccaccgaaaggtgcagtggcctgtctactttgttagtgaggccctccgggacgctaagacccgataccctcaggcccagaagatgctttacgctattctgatggcctcgaggaaactgcgccattattttcaggcacatagggtcactgtggttacgtcttaccccctcggtcaaatcttgcataatcgagagggtacaggacgggtggtaaaatgggcaatcgagctttctgaattcgatctgcactttgaaccacgccacgctatcaagagccaggccctcgccgattttgtggcagagtggaccccggctccagagaccgtctcaatccccgaggccagcacgaacccctcgcagctgcctcacaccacccactgggtgatgcagttcgatggttctctgtccctccagggtgccggtgcgggggtcacgttgacctccccgacaggagacgtccttagatatctggtccgccttgactttcgagcgaccaataatatggcagagtatgagggactccttgccggactcagggtggcagccggactggggatccgccgtctcctggtgttaggcgattcccagctggtcgttaa

SEQ ID NO: 1202 - DNA, 740 bp, Oryza sativa
ttcctgcagccctttttgtacgaaaatgcccaatgtccgctaatcaagtaaaaaaaaacaactgtacctaaaaaaccaggcaaaaaaaggtgttcccacgcgaaaatcgacgagccagaaaattcggatagaaaaaaccgaagcgtgtgtaggagtaaatcaattcatctgtcttcctccaaacctagttacatcgcacaaacatgctttaaactcatagggtaatcaacatgattcactttgttttgtgaaaaggcgtcatggttatgactgtgattagactgagaaatgggtgcttaatagtacatcaaagtgcccttgcgtaaaggaacagatcaaaggccctacagaattatttcccataccttaaaggctgaggcgtcacaaaaacccactcaagagacagtgagaccaaacaatatactacctccgttttttaacagataacgccgttgactttttcttacatgtttgatcattcgtcttattcaaaaaatttatgcaaatatataagatataaatcacacttaaagtactatgagtgataaaacaactcgtaacaaataaattataattatgtaaaatttttaaataagatgaatggtcaaacatatgagaaaaagtcaacagcgtcatctattaaaaaacggagggagtattagtttatgacaagctgggagtaagtggtaattagggtcagctcttgattttaattgtaataattcgtacagtattaacat

SEQ ID NO: 1203 - DNA, 557 bp, Oryza sativa
aagaggagcttgaagaagtggtcgacggaaaggaagtgaaaactcccaaagcgaaaacgaagtcggcgactcatgaaattgattccatcgcgcttgttgataagaaactcgacgcaacccctacctggcgcgccaactgtcgaaacatgatttcggcaataataaaagggggtagcgcacgagaactaaaagtggatggatgcggagacaaaggatttagacaggttcaggccctctcaatgagaggtaataccctactcctgtttggggatttgaatccgccgagtgtgtattgatctgacgatcaggttgtctcatctgccccctagagggcctcctgcccaccttatataggatggggggcaggattacaagatagaaaccttaaccaatacggtatcggtttcctaaatctggactttaggctgttccgtaatatacaaggaaacgtaacacccaagccatgatctgttacatattacatagatataagttatcccctataactagtcggataaccatgccgtgtgggtatggggtacccataatctccacag

SEQ ID NO: 1204 - DNA, 1451 bp, Oryza sativa
gtccagcgatctagccagaacgttcgtgtcgcgagtcaccgacaagtctcagctccgtcatggcatgggctgttcagtgggttggctggatggtctgcctaactgggccaaggattttagaccgtggaaaggaaggaatctctttttgtctctctctctctcttttgactcacgccactgcgtccctcgtgttgtgtcgccccttgggagagagctgaggagaatcggatgtaacattttctgtagatgtccgtggatatatcatttgcctgattccgagtccgtatgagaaagttacgcctattttaagaaatgacacccgaatgacgcctaggcatgtcggataagttcactttaggtccctctatgtgtcacccagtctgattttcgtcccttgatcgcaaaaccgggtacaacaggtcccccaacttacgaaaccgtttaaataagttccctcggaagaatttgaccccggttttggctgaggtggcacctacgtggctaatttgactcggtcttcatctacgtgggcattgacgtgacgcttatgtggcaatttgatccgaaaaatattaaaaactaggggatccacatgacagtttcacacacaataattaaaaaaaatggtggggcccacgtggaccccacctgtcatcctcactaccctctctctctatatcctctctccttcctctctctctctctcctcttctccgccaccttcttctccgtcgcttcgccactatccgtgtcgccgccgccgaccacccagacaccctccgcgcaccgggacggcatcgccgagtgcctctacgccgcgctcgtcgtcctccagccgccgctccacaagctacctgccgcctctcaagtctcagctccgtcgccgcccctgtgcgccttccgtcgccactcaccattctcagggagagagaggggggatagagagaagaggaaggagagaggatagagagagagggatagagagaaggggatagcgagaactgcgccggagaagaaggtggcggcgggccgcggcagcgcccggggcggacccaacaaggaagtcttcctcctcgtcgtcgctggactgcacgaaagcgaggcgacgaggccgaatatggcgagcatctcggcaagcagcgccttgggcctccccatggcggcctacacgaatgccaccgccgcggtgctgttcgacgacgcggcgtccctctaccccactgcagcgtccgccgccgctgagacggcgtccccggcggcggcgaaggtggccgccacggccctctcgacggctgctctgatggcgcagaggaggaggcagctgaggtagcccgggagctggaccagcatgagcaggagcacgacagccatggcggcgcccttgaacaccaccgcggacgagtaggcgatcccggctcagccctgtgatgaacagcttcgccatggccatt

SEQ ID NO: 1205 - DNA, 733 bp, Oryza sativa
cgccgaggggtgccaaggtgtacaagtcgggcagcgaccgcgtcaccctggcgcgcggcaccaactacttcatctgcagcttccccggccactgccaggccggcatgaagatcgccgtcaccgccgcctgatcggccggccggtcgccggagtccggcgggatcgaatgtagtagtggcaatctctaaatatccgggaagtagatccaataattctgtcagtgtcctacgttgctgaatgaccgtcttcgtgtttaggcctctgctttgttgcaggttagttgattgttggcaagtatagagaggaatatatgatttatgtgatgtgtattttgagaagaatttaataaaagccaaacagctgcgttctggcccagccgtatatatgtagtacaaggttctgaaaattgctttgtgtgaatgcgatggttcatgcatgtttgtaccatcctacattcgtctgtggcagttgagagaagaagttcagtgaactggtataactaattggtgcagaagctaataacagtcaaatgtttagtttcaacattgagaagctcgcactgccgtcttgaataacagcaattttattcacacaagaacaaacaatttctattttatagttatgctcgttctggctggaaagaattcagatttcatagctacaagttcagttcaggcatagtgtaacccaagtccattgactacttgcaaactatgccagacagggctgcagg

SEQ ID NO: 1206 - DNA, 1432 bp, Oryza sativa
gcactgacagtctaaccaagcaggactgtcccacaaagtcaaagcgaaccgacttgaccaactggctacgacgaggtctctaccaaaatggaaacgtaccagacaacatccgggagacagcgaggcgaccggcgtcgtacgtagtacaaattagtcgtcgtactcgtaccctcaattgccccaaccccgcaccgtcgtctcttcgttttcccatcgcagcggtgttttgctcgtcgtttttcctctcgatcggcccttgaccagcttgcgctcaactttcgtggtttattagtccaaaagttatgtccacttctcggtgccgccatgtgggtggttggtctaccaaagttcgggaaactattttgatcactcgatgggatatccctcatttgcttaaaaattatttaaatagttacttcctccattccaaaatactcccaccgtattaataaagatagtcgtttaggacaatgtttaagtcaaaccttggaaatataaatcatgaataactcttaaattgttgagtttgaaaatttaaaaattatatgaatagatttgtcttgaaaaatactttcataaaagtatacatatatcacttttcaataaatatttttatagaaataagaagtcaaagttgtattttagagaccgtgtcgctgtccaaaacgacttcctttatgagtacggagggagtaaaaggctcaaccactcttaatctaaagaccaagaaataattattatcatctcatagtttggatcactcatgcaaccaatagaattaaatatattgagtatggaggattcgaaagaaaatgctagttaatggcatgtattcatgtattccttaattatattatgaaacatttaaaaaaaatagttgcgccttatataatggaatggagggagtataaaaaattgtggaaaaatttaataacacttatacaacatatctatataaccccacaaaatattaagttcaaactcaactcatatatcgagatataaaaatatcagcatatgaatagtattatacggatcacatctgaatttttcactaaagccgagtatttaaacttaatttttattacctatcgattttactatatactttatattatcaattttttataattttttttaactatttgtatcgaatttgaaaggaaaaaaacacaggaatatctcttcgagggattaaaattcactcccactaagtcgtggtttcctcccagctgccaggctagctcgctagttgcactgtgtcgccggcgcgtcgcagatcctatcattcccaattcccacgcggtcgctgagctcagtttcacagttttcacacatatgtacaattgacagccacaagctctaattttggttaattaatcaatttcctatttatttcatggcatgtaggagtaagtgtgtgttcagtgat

SEQ ID NO: 1207 - DNA, 1358 bp, Oryza sativa
  unsure (1)..(1358): unsure at all n locations
tttactattcaacttactaaattttttagtaaatacgtagaaatataagaaatgcttaaagtacgtctaattaatattaatataattcacactaaaatcaattatatttatttttttaaaaaaaatatgaatgttaaacttagccaaaaatcaacaatgccatctactatcttcattctaaaatatatatgaatctagatccaaagaaaacattttataatattatgaatctgaaaaaaaaagacatagccagaattgtagtattagaatatatttcatccgattttagatttttatatctaagacgaaggtagtatggccgtgtttagttccccatccaaatttttttgatgtatgtgtacacacatttaaacatagactaataacaaaacaaattacagattccgcttgtaaactgcgagacaaatctattaagcctaattaatctatcattagcaaatgcttactgtagtgtcacattgccaaatcatggtgtaattaggctcaaaagattggtatcataatttacaagcaaactgtgcaattggtttttcgtctacacttaatgctccatgcatgtgtccaaacatttgatgtgacggaaaagttggaagtttgaagtgaactaaacacaacctatattcaaataagggttaattggatacatgccattaaaatttttatggttttgaaattaccactagtattcatgtatttggaaatatgccattataatttcacacatattcaaaagataccactacttaccccttggatgcatttccagataaaaatggaccaaactacccattatcccctcgactaactacttcccctaactccttcctcctctcttccttctcaggggcgacgcggcgcgtcaacggtagtagcggcagcaacgcagcacggtgcgtcggcggcggcgcggcggcacagcagcaacaacggcgcgacacggctcggcagcgacagcgagacgcggctcggcggcggcagcagcagcggcgcggcggtggagcaagctgcagcgcgcgcagcgggatggcggcggagcgagcggcgtantgagaagagagagacggtagaagatggggaagagagagagaggtagaagatgagggtatttttgtccaatacatgcaaaatgcgtatctcagtggcaccgctaagattagaaacaagtagcaatggcatcggtacaaatacgcaaatagtaatgtatatttcaaaaccggtaaaattttaatggcatggatctaatgaacccttaaaataaagccccctttcctcatcttattcctctactgaccaccctgatcgagccgttaccaagctccaccactgacgcatgctga

SEQ ID NO: 1208 - DNA, 903 bp, Oryza sativa
ttcagatatagttcaagcagtgacgagccatgagcaacttcataagctaaaactacaaggaagagtacatcgcaatctcctgctagaagatccacatttcagttgcatcaaaagcatcacattatctggctcgtggattgttttgagcccgatggaatcactaggctcactcacaactctttatgaactcaagctaaaggatgacgcgctccggtgctcagaggtctcatgtttacaaaacagtttccctgagctgcggtacctgaaaatcagtggactaaagaagcttagggtgttccatgtggggaatggctcatttccgaatctcacccgcttctccatccacgactgtacagaattccttagcacggttgaggttatggagcatgctacaagactgcaagttctgaaaattaaggaaatgccgtcagtcctgcctgatgttacagatttttgccacagcagaaacatcaaccttatcagctgatctggcatcaaagttatgtatagttgacaccattactgcaaacaccgtttatttttttatctcgttcctttttagtaaaattcagctcaggttcttctgagttctgatggcaagaaaaaagaaggcttagctgatctgatgacaagaaaccatacaacgttccaggagaacatgatccaaagccaggagtccagcacatgatagctgtttaatttctttgcttgagctcaatgtaacccaattgtacatggaaaaagagtaatgctagatatttggtgtaaactttgcaatattattgtctactaattattctctggagatagatgatgtcagtaaactgtagtagaattggtgatgagaagtgagagttgtacagttaagtgttgtggccacatgtttttcagggggctgcagga

SEQ ID NO: 1209 - DNA, 721 bp, Oryza sativa
gacctggaatacttgctacatgcgttcgcctcccgtctcctccattgccctcctaccgaatgccgatgcatgagtctccctgtcgttccccgccattgctcttctgctgccgcgcatcactcttgtttttgtcgctcaatccaaagaaataaataggaatacgaaccctcgtccccaaagcccgggtcctagactactacgatagaaagatttctacggatattcttcgtatcaattttataatgcttatcacctccttctgagctattcccacggtgccttcgggtcaaagcttaatccttaatagccaaccgatgcctggcaccaccgctaagcacaagggcaagaaaaagattggctttaaaagatccaaatacttcctgtgggtttataaaaaaccatatcatatcgaagaacttgatggtctttctccacccgttcgattacttcttaaaaggattagatatagaaaaaaagtagtctactcaggagaatgagataatgctcataatatcgctagtaaccaaccacaaaagtaaaccaccgtgcaaaggaaatatgggaaagagtgaagtaaggaaggaaaggagtcactgacatgtggactttatatgttaacttacgtggttggactaggtcaatgaaaaacaccttcaaaaccactgagggagtcattttgcattggttttaaaagtttggggatcaagatatccacggttac

SEQ ID NO: 1210 - DNA, 659 bp, Oryza sativa
ctctttggtactccctccgtcttaaaatatagcaatctagtactggattagacacaacctagtacacgaatctagacctccctatccaaattcatagtacttggtttctatattttgggatggagggagtacatttatagtgtaaatatgtctttgcttcaacaaagaaaattgcacggtacttaaagtaagtattgagttaaatggttggacaagaaacctctagtattactatggactttacaatatttgtaatgttctttgtggatcatagaggcacacctcttagatgatatcaggttatggttaactatggtgttagaagattatatattatggtggcctcttttatcgtttacttcactgttattatttttattccccatccacagtgtgtgtgcgtgggcctgtgtgtgtgtgtgtgctggactgtagatgcctggttatgccttgtgaatgaccctgtcctaacatcctctcattttggcagttgcaacttcttaaattttgctcgaaatcggcactgccttgaatgcaaagcagatggaccaaagaagatagaaacagctaccactgaaatgaaaacgggagactggatctgtccacagtaaccatcgaatgccatatttgttttcttggactgttcaacattattatat

SEQ ID NO: 1211 - DNA, 1531 bp, Oryza sativa
  unsure (1)..(1531): unsure at all n locations
acttaaccaaatagggatcttataacctaaaacttgtctaatctgttggcattactgtccctctggcgcaggagcagcaatacccacagtactctgttatgccacatacataataagattgttcactttcgaattttttttctgttttaatatttcttaactaatcgtactgaatgaaacacaaggatgagaaatttcatagcatggggccctggaggcctcgaccatggtcatctcatattcccggttacccctctctatattctctaattagaacaagtctaatttgcctcctcacagttgctagttgtctccctcatcctaaaattggatatgtctccccatcttcaaaaaccagtgcaagttgactgtggttgacttgctaagtcagcaggtgggggtccacatgttagggatcagaggaaggacttctctcctcctcttctttgctcttcttcctcgcgcgagtgtgaccagatgaagccagttgtagccgaatgaggatgtagcgatggcgggcggggtggatggtcaccacagggctggaaactatagttggccaactgggctgctcggcacggcacagcccaggcccggccgtgcctgagtcgaggctaatcgggccggcacggcctgaccgacacgccgggccgtgccgtgccagtccacgggctaaatagtgtgggcttctcaatttttttaaaaaacatagtgcgggccccacctgtaaggctntcctctctctctctccccctctaacctctcaatctctctctactctctcttcctaaatccccatcccctctctcttccctcccctgatgcagggagcggcggcgcctggtggacgacggtgtgcagccatgggcggtgagcggcagcccggtggaggcgagggaggagaaggaggagtcattgctgttatcgcgctgcgcggcttggacggaggcgaggttggagcggtggatcttggcgacgagcgccgtggaaggaacgaagaggaggcgacggcggctgcgcggcctcgttgacatcgtcatgggggaagttggtgcgcacgcgcgggccaaccaagaaatcaaacagccatggccaagaaaccgccatggcgaggaaaaaaccaagcaatcaccgttgctcgctgcagcagggagggaggggagagagaggggatggggatttaggaagagagagtagagagagattgagaggttagaggggaaagagagacgagagccttacaggtgaggcccacactattttttttaaaaaaattgctgactggactaccacgtaggactgaaaccatcccggattgagccagggggggttatttgtccggtttgcataattaagtgtgtaaaatatccgtattcgagtttggggggggggggggtaattcgatcgcccataatagttcgggggtaatttgtactttttccataaactattgatacacatgtatgttacaaagacgagcaaatgctactacctccgtcctaaaatataataagttttaggagtggatacg

SEQ ID NO: 1212 - DNA, 726 bp, Oryza sativa
tatgccacgtaggatagatacacaacgaatccatacctctcacagtgcagggtacgatccccaaaccaaccaccccaacctattctctctcccgctttcccctttctctccttttccctttccctctcctactttcactcccaccgacccgacagagccggagcgcgcggcggtacaggtcgtcgtcgcccacggcggcgcgtgccgtccccgcgaatctctcggtggcgacgagaaggcggagcgaggaggacggcggcggcgcggatctggagcggcggcggcgcgaggggacaacggcggctggcggattctggagtggagcggcgcgccgtcctcgtgctcatgctcgtggtcgtcgtccttggagtggtcatcggagtggtcatggcgggcggcggcggcgcgtcgtcctcggagcggtcatggcgggcggcggtcctcgtgctcgtcgtcgccgtcctcggagcggtcatggcgggcggcggcggcacatcctcgccccgctctctcaccgcctgccccaacgccaagcggcggcggcatcctcgggacctggcggcgcggatctggagcgtcctcgccgtcctcctcaacgacggcggcggtggtggcgcgtcctcgcccgccctcaccggtgacagtggcccggattggagctggagccggagtcgtcggagtggaaggagttcctgctcgggaatcaaggtcggccgggctgcagga

SEQ ID NO: 1213 - DNA, 725 bp, Oryza sativa
tttcttggcattgaggtaaacaagacacacaatggcattgttcttactcaggataagtatgctactgatttactaaagaaggtagggatgttgaattgtaaacctgctaccactcctttatctgttagtgagaagttgtctttacatgagggatctctcttaggacctaatgatgcaacacagtatataagtatagttggtgcattacagtatttaactctcactaggccagatatagctttctctgttaataaggtgtgttagttccttcatgctcctacaacagtgcattggacagcagtaaaaagaatattgagatatataaaacagtgtactagtatggggcttaatatagacaggtctgggtccacacttgtgagtggattctcagatgcagattgggctggcagtgtagatgacagaaagtccactggaggttttgctgtgttcataggctcaaatctagtgtcatggaatgctagaaaacaagccactgtctcaaggtcaagtacagagtcagagtacaaagccatagcaaatgcaacagcagaaataatgtgggtacaaaccttattagcagagttggggatcaagagtcctcgagcagcaaagatttgatgtgataatcttggagccaaatacttgtcagcaaattcagtttttcatgctagaacaaagcatatagaggttgattatcactttgtcagagaacgggtgagtcagaa

SEQ ID NO: 1214 - DNA, 1074 bp, Oryza sativa
tttcttctccaaaattggcattgttcatcatgtgtcttgccctcacactcaccaacaaaatgggtctgctgagcgcaaatatagacatattgtagaagttggtctctccttattatctcatgccacaatgccattaaaattttgggatgaagcctttcaagcagcaacctatttgattaatagggttcctagcagagttatacaaaatatcagtcctttggaaaaattattccaacaaaaacctgattattcctctttgcgtatttttgggtgtgcttgttggcccaatttacgtccctataataagcacaagttggaattcatgtctaaacggtgtgttttccttggttttagcaatatgcacaaaggattcaaatgcctataaatttctttaggtcggatctatatttctcgggatgttgtttttgatgaaacggtattccctttctctgagcttcatgcaaatgcaggcgctcggcttcggtctgaaatactcttgtttccgtctttgtttactagtggggatgacaatgtattacaccatttgactaatcctataaatcctgctgctaatgagtttgctgatgcaaatattgagattgatacagcacattccgtggccacagaagatcccgcagggattgattttgatgcagattcggcagaacaggagcctgacaccttcctgtcgccagggtctgttcacacgcattcgcctggacctcaccattcaggcgctgacacgcggcagcatcaggagacacatgctggcgacagaattattcttccaggaacagctcgtcaggaggcacagggggagcagcggtcatctccctccgccgatctgtcctctgctgatccatcatcatcgctgtcaggtactgatgaatattactccctccgtccataataggtgacgtttttgactttttatttgcaacgtttgatcattcgttttatttgaacaattagtataaatataaaaaaagataagtcatatgtaaagtacttttgataatagagcaaatgacaaacaaaataaataataattccaaaattttttaaataagacga

SEQ ID NO: 1215 - DNA, 1034 bp, Oryza sativa
cccgcgggacctcaacgtcttctacgaccgcttctccgagtccatgccctcgccctacacccgctcccagctctccgagaagctccgccgcctcaagaacaagttccgcggcatgtccgcccgcgtcgcacggggcctcgaccccgcccgcctcgcgccgcacgaccgcgacgtgctccacctctgctcccgcctctgggacccgccaacgccgccacctcgcccttcgccgccgccggtgacgcctcctcggggaacaagcgccgccgcgccgccccgcgcgccgggccgctcatgcccccggatccctcaggggacagcaattcccatgattacaacggcggtattagcgccggtacgcccggcgcatttggggatgggcacggtggtgaggaaatgatgtatcttgagcaggaaagtgggcactttggttatcatggagatgtcgcgattgcggctgacggaagccttgatgggattgtgaaggtgcagcctgagactcttcctgccctccccagtatcggggacattgcggttcacagtgagaatggcaacggcaaggccgtggtgccacgtagcaatgagcatcacatggcaaatgccgtgctggatatatttgaggagtgcttgcgagaggtgaaggccaatggcattacctacggtgctaatgtgaatgggggcagtgaacttgcaaggcgatggagagcacagaggattgatgagcttgatgtgttgagccggaggctaaggttgcttgttgaggatgctgcaacggctggtcgctaaacggacatactggtggttttggtgacgtgcttccgcccttcaccccatgtgtataaaatattaaaatctagattattatgctatatgcttttgtagttcctcactcagcttgggccttgccttagtcagcctaatatgcctattatttatgcctatgtacatcgtctacggatattgccttttagtttaattatttcatcagcataatatatatggttccagcattgttatctatacagctgcctgct

SEQ ID NO: 1216 - DNA, 2453 bp, Oryza sativa
cctcacccactaagcaaagtattaaactaattaaagcctagttcatgcacagaaccgaggcgataataaattgcaaggcatccatctcacgggcaaataacctgaggagatcgaagcgctctcggccgaacttgaggcatgcgttcttcaacctgttcaggtccttggatgggtaattgtcggccgaggccccagggtcctcccccgccgccgccgccgccgccgcggcggtcgcagccacctccccctccgcagcatcagcgcgagacgcgagggtgggctgctcgaagtaccccttggcccgaagcttctcgaggaaatcgccccactcgggccacggatgatctggtgctgcggcggcggcaggagcgtcggcgacatcccccgcggcggagcagaagcggagggagaggagtgggccggtggggaggcggcgggacggggcgggcaggagggaggagcggaggaaggaggaggtgagggtgagggctaggagcttggaggaggaggccatggcggctgggtgcgatggtgtcggggaatcaggtgagcagggatggaggcgggagcgaggaggggattagggtttaagggtttagaaatgtcgcggtctcgtttagcgtccgtaggaaactagcaatttatcatgtttttgcttcaattttcaagttgtaacaccgttttatacaagctaaatttctaaatgcaaaaacagtaaaaaggttttatcttcacaaacgggattttcatgtaatttaacacgagccaacaaattaaatttaatacacaactcttagcttctactccctccattctaaataatcatctacgtatttataagatagagtaatagatagaaaactaagtggtataatgtataagatatgaattatctctatatttatactaatattgtgtgcaagttattttagagagattatcttcatagttacaatgtgaaaagaaattatcaatattgtgtgcaaattatcttagagatttatctatatattatattatcaaaggaagaggaagccatggcagtattgtgtataaagtagactttgaaagcacaattgcgttagacatatcgaacaaccattaacttatatatgcattgatataattatactccttatatattcgatcaatcatgaattaagcaatagcttaactggttggttttttttatggtggaacctatccaaccaaattcaaatataaaaattacgatataaaataatccctctatttcatattaatatatatgtgtgtgttgatttattaccatatatacgaatgtgggcaaggctagaaagttttataatatgaaacggaggaggaagtaatacgtatgtaaaattcactattaatttggtttatataaacactaaaatcgtacatgcatacaaacaaatccaatatagtcggtctcacaattttatttgtcaacattaatagtgtgcatgtttaatcaatcaacattagtttaagtgaaaacattaatatttttagtctggttttcatattttcatgatatagcatagaatacatattgtgttattttaacctaagcatctatgtttattatctttttacatgattaaatgtttagagttcttttaagtttgcccccctcttctaaagctgcaatccactcgaaaagaaagtagagcaagctaaaatgctttcagaaaataaagatggaacaggattttacactgttccacaactttactccaaacctatcgagttaaacaataataagttaaaaacctgctaagaccctgtttgatttagtttaggattattatgagtaaactgaaacaaatagatagcttattatgatagattattacaatctataagccatactactataatctgataatccactttaaagatgattttttaaaaattattggatagctaacagctaacaaatagctactaattaagagacataaaggttatgcttattataatccagcttatagtgatatagctaaataatctagattacaataatattattaagatgctcttaatcgagctaaccagcctttaagtttggaacaaaaaatcaacctatgtgtaacccttcttttgcaaccgatacccggttagccgctaccaaaaacccgcccagcctccagccacacggcaccaccaccaccgtgtagccacaaaacgcccacacatcccaccgtgtaggtgcgctgcggtggcgttggcgttggcgttggccggtggggtgggtcagtccggtccacgcataagcctccaatccccaccaccaccaccaaccggcacacaaaccagagccagcgcccacgaattccggccgagccaaccatccccggatctgatccagccatccatgcctagctaggtctagccaagccaagccagccgtcccgtctccatcccaccacttccccccttccagtccg

SEQ ID NO: 1217 - DNA, 1046 bp, Oryza sativa
gatcggttttttacttctttttttttttggttcctgtagggtgtttgtgcggagttgcagatggggcgaagggagggaggaagacgaaagggccggtgatcggcatcgacctcgggacgacctactcgtgcgtgggggtgtaccggaacggccacgtggacatcgtcgccaacgaccagggcaaccggatcacgccgtcgtgggtggcgttcaccgacgacgagcgcctcgtcggcgaggccgccaagaaccaggcggcgctcaacccggaccgcaccatcttcgacatcaagcgcctcatcggccgtaggtaaatgttcctcactagcttttcttcttcttcctgagctctctcgatgcaaatggagaagctagccgtggttgattgattgatttgggtggatttttccggcctgtcgccggcaggttcgacgacgaggaggtgcagcgagacgtgaagtatctcccgtacaaggtggtggacaagggcgggaagccgtacgtcgaggtgcgggtcaaggccggcgaggtgaaggtgttcagccccgaggagatcagcgccatgatcctcgccaagatgaaggagacagccgagtcctacctcggccagcgcgtcaccgacgccgtcgtcaccgtgcctggtttgtaatgcgaaagcttctggccgccgctccagaggttgacgacgacgacgacttatgctaagtgtgctctgcttgatttgcagcgtacttcaacgacgcgcagaggcaggcgaccaaggacgccggcacgatcgccgggctgaacgtgccgcggatcatcaacgagccgacggcggcggcgatcgcgtacggctcgacaggaagggggcgggggagatgacgaacgtgtggtgtacgacctcggcggcgggacgttcgacgtgagcgtgctgagcctcgaccacggcgtgttcgaggtgctcgccaccagcggcgacacgcacctcggcggcgaggacttcgaccgccgcgtcatggaccacttcatccgcctcgtcaagcggcagcacggcagggctgcag

SEQ ID NO: 1218 - DNA, 876 bp, Oryza sativa
  unsure (1)..(876): unsure at all n locations
tcctgcagcccctcgacgtgacgttgtgacgctcggcatcgagaccgccggcggcgtgatgaccaagctgatcccccggaacacgaggatcccggtgaagaagtcgcaggtcttcacgacctacgaggatcaccagaccacggtctcgatcaaggtaagcacatttcagctcgtgcattgacctgataacattgattcttcagttcttgagactgacgaagctctgaatttctttttcaggttttcgagggcgagcggagcttgacgaaggactgccgcgagctggggcggttcgacctgtccgggattgcgnnnnnnnnnnnnnnnnnnnnnnnnnnnnnnnnnnnnnnnnnnnnnnnnnnnnnnnnnnnnnnnnnnnngacggccnnnnnnnnnnnnnnnnnnngacggcgtcggacaaggcggcggggcggtccaagtcgatcaccatcaccaacgacaagggccggctcagccaggaggagatcgaccggatggtgcgcgaggccgaggagttcgcggaggaggaccgccgcgtccgggagcgcgtcgacgcgcgcaaccgcctcgagaactacgtgtaccgcatgcggagcgccgtgcgggacggcggcatggccggcaagatcggcgacgacgacagggagaggatggagtccgccctgacggaggctctggagtggctggaggacaacgacggcggcgcacggacggcggagaaggaggactacgaggagaagctgaaggaggtggagcaggtgtgcggcccgatcatcaagcaggtctacaagaagagcggcgacgcgtcggccggcgccggagacgacgacgacgtgaatgagctgtagagcattttcgctgctccatgtatagtgt

SEQ ID NO: 1219 - DNA, 1541 bp, Oryza sativa
cgggggccgcgacgacgacaggagacggccgggaggcgcgcagttcgacagggcgacgaagagacgctcgccggcggcgaggtttcgggtgatggcaagaaatctggcaggatcagacgtgccagcctcggccggaactacagttcagagatcgaggattcagctgaggatgatgaagtggtccgccatgagatcactgcagagagcgaggtgaaaccgcggggtctgaccaggagcgtgccggtatcagtcagaacaaagagggtgagttagctgcaaccagatggcaacaagagtgatgggagatgatttcttgattcgtgatattagcagctgctattatatttttgcagattcatcgttcgttagatcctaggcctgtaggccattgcatgcatgtaattaaatggagcctaacaaaaaaaaaggaaaaaaaaacttgattcagattttgttcatcggttagtaggagggagcaaaagtcagcattgtagttgatggcaggtttcatcattgattgtagatatattagaggatggattgattttatattacaacaactgggaccaaaatattcctctaatctcgttacctctggggaaataaactaatgcagcgatactactaacttatatgcattaactagaaatttcaacagcagatatgaccgggtctggactacgagtattcatgaactgtaggcctgtagctggtaaaacttctctcatgtaacctacatttgatttgagaaactcccatgctggatgatcagcgggatactttccttcttttactgagactcgtcagcatgtcactgtaagactgcaagttaacaccgacatcttcatcatactcgagaccaagctcttcctgcacagatacatattattcattaaaatgatgaccgtgctggatgctagcaattggtaacttttcaatctttttttgcagggcagaaatgagaaaatctgacaactaaaaattatctttcctgttgtattaagagaagcatctagtgtgtattaactactaagtgcaggtaaatgtaaaagaaagaagtgcatcaaaaccttaaattccttctggtctttagggctattctcagtgatattatcccatagctccttgaacatcctctttcgctttctccactggttaactttctcagagaagctctcttcaataatcttcttgtcctcaggtttcaccaagataacaccattcctcaatttatttagtttctcttccatttcctggacctgcaaaaatacaagacagccattcttaaaagttaatacaaggaagacattgaaaccataaaagataaaaaaaatcgcatatatacataacggaacacgtttatgcacatacttctctttgcaatttagcttcctttgacttgatctctgctaaagtcaagtttgactgcagacctcgtacctctgcaatagggtttgtattagacatttccatactatgataatggcactcagcattgaaattaaccaccaataagatcatagcatgaaatggaacctacc

SEQ ID NO: 1220 - DNA, 500 bp, Oryza sativa
agaaatcactaatctgtctgcaaaccattaagaaaccaagcattgaaaaagaggggatttgttttgagtttgactgcaaaagaaaacagtgtcgaagtcaagaaagatagtcaaataaggaacactgaacaagtatgtaactcacttatttcaggtgcccggtagaagcggctcacaagatacggtgtgatctcattatttccagcagacatagcactaccgaagtcacacagcttcagcaaattgttatctttatttacctacaaaatgacaaacatcaaaaaagctatgctaaataattcttctaccatatatacaaaagaaaagggggtgtaagtcatttttagccttttcctttctcggtcatcaagtacataaaactagtcataatttgtccaggaaaacaataagagtagactatgatactcagcaagattacatacccgtatattgtctggtttaatgtcacagtggagaacaccacagtgtcttagatgctt

SEQ ID NO: 1221 - DNA, 671 bp, Oryza sativa
gcccgtaggtgtagtacaccaaagaaaaatgtcaaagtgcgtgtttaattggtgatatgtcaagattgaggagtgggtgacaacgtggagtagctttgaagtggatcatacagtatactattcaacatggtacggatcgtgcaaatgtccccatctcttcattttataatctgtcaaagatcgcagctacttgttggcacgacgttgatgaaacttccaaagtttacatatttagtatttcattactcatttcaagaggtatatataaggtgtgtccagacttcagacttcagacttcagactgctcgagtcgttgctaaatcgctattaattatgggttgactcgtacgtcagtgggtaatgcagattgcaaccctgcaccaatcaccacagttatgatagtctagtctatcggtgtcctttgcattgagtagcaaagaaaggatcacttgaactgaagtttcatctgaatttgcaccaaatggcacacctatcactttgtcaaccatctcatatcttggtttctgatcgatcatagtggttctaacctggtcggattaattttttggcaaatgcttcaaggggctgaacttcttggcgatctttgggttgatcatctgcacggcttcgttcggcatcaacctggtcctgagggaatccatctgagctct

SEQ ID NO: 1222 - DNA, 988 bp, Oryza sativa
ggtgtgatgttcctttaaaaaagttctcttggttgccagatccttaagaaagaaataatcacggtgaagttcaagaaaagcagaattatcatcaactaaacggtgtacagatataagattccttttggcttgtggaacatatagaacatttttaagatggatatcacgattactaggggtatgaacaatagtattgccaatatgacttagatccatacctgcttcgctggcggtgtggatctgttctcccccattatacttgtcattcacagtgagtttctccagttctcctgtgatgtgatcagtggctctagtgttgatataccagttggtatcaacgccataggagcttgttgctactgcagcaatattcttactgtcaggaatataatccttgtcatacctgtaccagcaatctacggcggtgtgtcccctcttgaagcaaacttgacagatcggtctgcgatccgccccactttgcgcgcgtcctcgaccgcgcgctccattgcttgtgccgcggctaggaaaggcacgaccgccgcgtggagctcctccgccgcggccaggaaagctgccgcggccacctcctttgttggcgacgttgacggtgttttcttgagtcccccgatagagagacctgcgggcctcaaaattgaggacttgattgtagaggtcacccaccgtcatgggttctagccgtgcgcacacggcggagatcacttcgctttagtcttcgcccaacccagtgatgatgtactggattagttcctcatcgtcaaccgcttgccggatgcggtggccatctcatctcctagagctctcatcttcccgaagaactccgggagcgagagattgcctttcttggtgttggagagcgcgaatcttgtgttgatgcaacgcgccctcgtttgcgtcgagaacatttgctcgatgattgtccatgcttctgccgcagtttcacacgtcgcgacttgcatgagaacatttt

SEQ ID NO: 1223 - DNA, 1041 bp, Oryza sativa
tccaaagcaagtcagttagtagttggcgagtgacatgcacgcacagaagaagtctcccatcgtttagccaaacaacatatttacaaacaaaaaataatttataaataaaaattttatatacatgttcttagcaatctaaaagcaaatgctgaaaaataaactttaatgagaaaacctcaaaatcaactctaaatttaagtttaaaaatttaaagtatagctaataagtaaaagcataagcataagcgaaaaaataaggctgcttagttctgtacaaaatcttcatagtgtttttatgatgtatgggcatgcagagggtgcagtatgctgtagtacaatagaacatccacttaattaagggggtatttagatataaggttgtaaagtttgggcgtgtcacatcgggtattatatagggtgtcgcatggggtgttcggacaataataaaaaaactaattacagaatccgtcagtaaaccgtaagacaaatttattaagcctaattaattcgtcattagcacatgtttactatagcaccacattatcaaatcatggagcaattaggcttaaaagattcatctcgcaaattaatcacaatctgtgtaattagttattttattagcctatatataatactttatacatgtattaaacgttcaatgtgataaggtgtaaaattttgaggcgggatctagacatgccctaactaacaattacaaaaatcgaatatatgtactagtactatgtagtggcagtggcaagtggtgtaccactaccagcttgcaaccagtcaattaaatgtgcattagtattgaattggcaacctccataatcactcaattaatggaagtttcgtttccagccgagatgatacaaatacaatacccgctatcctaaaactaaagacctatctcaggtgcaaagtgcataagatacatccaaacattcatggctaaactctaaacttgaagggtgtacttacatttggggaaatttaacttttcgtaaatttaagatgtagcaattaattattgagtaaattg

SEQ ID NO: 1224 - DNA, 730 bp, Oryza sativa
cctgcagcccgctcggtgatgagattgcagtaggactcgagcatgaggaaggcgtcgagcgtgttctgctcgcggatgacctgctcggcccggagcagggcgcggccggggtggccgaggcggagcagctgctccacgtcgccgcgcgcctgcgcgcaccgcacctgcctgtgcccgcgcagcacgccgagccgcgtcaccgccagccccagcatcgacttgagcctcgccgtctgcttcgtcgtccgccccagcaacacgtccagcgtcctccccatcgccgccggcctctcccctctctcacacacaaaaacgagcaactgcctcctcttccacgctctcctgagacttcgagctcggtcttatgtaccccctcgtgtggcgcgggtgtgtgaaagtgtgaaaatggaagggaaaatgcgagggaacgaaggacccgaggcgaggggatgtcacggttgattagatcgggtttgctttgtggcgaaggcgtccgtccgatttcggtgtcgacgtcgacgtcgagcgcgacgtgtatttaaagccgttccgagtaagcaagacgcgtgcggggccactggggccaggcggcccccgctcgcgctcgtgagtcgtatgacccgtgcagctgcaggtgcagccgtcctcgcacagaactggttcacaatctcccatggaccacgtccccgcggctcgctcgcaccacgcggcctcccgcgcgcaggagatg

SEQ ID NO: 1225 - DNA, 593 bp, Oryza sativa
atccacttgggtggaatctggcaaagtcgtgtgatttgtatgatcttcttgggtttcatccattgttccttgggtggatggtgtctattatgcttatctccacttgggctagttttccgagaaccgtatatgttcttgtaaatggtccacaagtgatatagtaggttgtatctgtgtaagtgctgatatgcattatttgcaggtgcacaaggtcagactaagtttgcgttgaagaacaaaggagaggaaaaatgtcgcctgctgaggcatcgcgtgaggagaatgtgtacatggcaaagcttgccgagcaggctgagcgttacgaggaaatggtcgaattcatggagaaggtggcaaagaccactgatgttggtgagctcaccgttgaggagcggaacctgctttctgtggcttacaagaacgtgattggtgctcggagggcatcgtggaggatcatctcttctattgagcagaaggaggagagccgtgggaatgaggcatatgttgcatcaattaaggagtaccgtagcaggattgaaactgagctcagcaagatctgtgatggtatccttaagcttgagtattctatagtg

SEQ ID NO: 1226 - DNA, 569 bp, Oryza sativa
attggggttgagttgaactcgacacaggtagctgcaggcaaaaatgccatgttcaggtttctgcagcataagaaatacttgattgtactagatgacatatggacgacagaaacttggcttgaattaagcgaagctttccccaaatctacgaatggaagcaaaatcttgctgaccactcgctccaaggaaattgcggtttctgctgacccatcttcccttccctatgagctagatccactgagtgaagaattgagctttcagctattcattaccaaagtttttgggttgaatcatgttgacacaacaagttgtccaccacagctcaaggatgtagggcaccaactttcaagaaatgcggagggttgcctcttgctcttgtggaattgggaggactattatctgggaaggaaaagcaattcgaagtttggaggaatatattgaagagcatgaagtggagcaactacgaagctgggaatcagtgcttggagatactggccttaagctacagctgcttgccttaacatatgaagctgtgtttcatgtaactaggtgctttcaaagaagaaact

SEQ ID NO: 1227 - DNA, 1022 bp, Oryza sativa
tggtgtgtgctggaaaggtggcagtggggccaagctcgaaaaggttaggtgttaggccaacggcgaggagaagaagaggaggcgacgattagagtttgtgtgtttgcatgaagtgtttgaaacgaaaattcacaaggtattctaggtttttttttcatatgtagagtaacgctagggagtgacggcgaaggtggtggggtcaagttcaagatattgggagctgtggcggcggaggaggagcgggggactagggtttaggtgtttgcacgaattccaaagcgatccgacgtttcagaattcacaagatatttatgggctattttttttctaaatgtacaatagtcagttacttcatttattcgtctcacattcctaatttccaattaagacagggacctaacagcaaaaaggccaaaccctcccgcgacagaacgggcagtcgggcacgaccgagaccctcgcgcccacgcagcaacctccgtacacacgtcgcacttgacttgcgtggactccaacttcccattttacccctccgtgctcaaccaaattgccactaaaccgctcaccactcactaatctatcaggggcaagatcgtattttgccactaatcccactaatccccctgcgcgcttctcgtataactactccccactgctctcttcgatcccctcttctgctttttagcgaaatccgagaaaaaaattgcctgcaaaaaaaaaaatcgaaacgtcgttctgatcgatcggccgttcgagttcacggcggagatggagcacgagcgcggtggcggtggccgcggccgcgggaggggtcgcggtggcgggcgtggcggcagtggcggcgatggtcgcggaggcggttatggtggtgctggtggtggtggtgtcggcgggcgcggtgggcgtgggcctcctggtggtggtggtggacgccggtacgagcccggcggcgggcgtgggtactgtggccgcggccgccgtggtggacgtgggtatggcggcggacgcggccgtggtgggta

SEQ ID NO: 1228 - DNA, 3168 bp, Oryza sativa
cagcagcgagcaagcaaagcaagaagcaacttgtccgagatacaacgtacggccaacgagcggtggcttggggagtttgatcggccaagagcaggtacagtagatgaattttaccggcgatactgtatgcatgcagcctaatattctgagttggcatcgaaatttgaggagagagagggtgagccggcgactaattagtcgccgactccacgcgtgtgccgaggcaagaaaagcaacagcatgcgttttcttactggaccatgcagttgtggggtccacgtgatttgtagtctgtagatgagaagataacacgtgtagacatgacactataaaaaaaaaagaaaagaaaggttttggtattgagtggaggcagcttgtagactattgttgtacagattagctatttggtgaaatagtattttattatacttgttaggttttggagctgacagcttactcctctattaaacttgctcttaagcgcggttgttgtagtattcatctttttttttttttgagcgggaggggtcaggggtctctgtccacgtgggttgcgaatgttgaaaaggaggggaaactggggaaagagtcaaagcgttggcaaagaattatctaaaaaaagcgttggcaaagaggtggttcatggtcatggatgggggtaagtagcttttgaatgggaaattgtctggtataactagtggagttgggggtggacgacaggttctggagcaagaaatatactaatggttttttctcgctaatatgaattaattttcaaatatgctctgctagctggttttgatttactgatttcgacaactctattgattataccataactcgttaggtgattatgtgttgttaaattttgatgcggttaaaacgattattttggtataggtctacttttggacacatagaatacattggcaatacttgtcaaccttgagggagtacttaatatgaatgtttttttatcccgcatgcgctcagttgtttgcttgaccattactatttttttaagtgcccgtatcccgccggtacatagtcccagggatttttttagttaaaggtaactctggtggggtgtgcccatatcacccaaatcataatatattctaacttttaacatttttaaaaatctcatcaaacttgaaggcatttactttctttttttttaattagtgagagcgatctccatgaaaatggcaagctggctaataagctcaaaagggaaacaagaaaaggacagcgacctgcactgcaaaactgacagtctcgcacaccatttgccctctgcaacgagtattcacaagacgagattatcatctgccacttcatgagacaagtcagacccgcgcgaaaatcaccggccttccgggatgacggagttcaagaacaatgacgagccttgctgctccgaggccgatcccggcgccgagctcgactgcccgctgactccgctgttggcgaagctggtgttgccacccttgatctgccactcggtgatgtagctcggctttgtcagcacatcgggcacctcgacatcgccggcgagcatcgacacgaccctcgacattggcggccgctggtgaggcgagccctgggtgcagaggagggcgacgcggatggcacggagcacctcctcccggttgaattccttgagctttgggtctacgaggcccagagggttgttgttctcgtacagctcccaggcctgaatgtattgagacggtaagtattcagatgatcagaacataggggcataactagatttttttttgcatgtttagataaaattggatgatggcacttgtgtttaatgttatcaatctttactagaaaatttcagagtatatgctgccaataacacaaagaccagattataatttgtccttccttgggtgagagttcataagtgagctgctgagcttacccattcgaaaatataaattttgtcttcttcaagcgtatcatcatagtttggccgtccggctaaagtctccaataagaccacgccaaatgcaaagacgtcaactttctcggtcatatggcctctcatggcgtactcaggtgcaagataaccgctggacaaaggagagccaaaaaagccaccgccaacataagtatgaaaaattgtaaacataaaggtgggaaagaaggaatgtacttacaatgtgccagcaaccttcgtgctgacatgcgtcttcttgtcatcataaagtttggctagcccaaaatcagagatcttaggattgagattggcgtcaattaagacattgctggccttgatgtccctgtgcacaacacagatgctggactcttcatgaagataagccagacctcttgcaatgcctaggcatatctcaaaacgtgctggccaatctatggtcaatttctcagttcctgcaaatgaagggttaagcttttacgttgtagactatgataaacctgaattatgaaaatatcagttgcatcaaactgaaattgctcgtaccaaacaatgctttatcaaggcttccgttttccatgtactcataaaccagcagtggattattgccttcaaggcagcaaccatacaacttcacgagattacgatgttgcactcgggatatagtttctatctccgtcgcaaattgttttttcccttgatgagatgtttgagatagctgcttcactgccactacccttccatcagttaacttgccctgcaaggtggcattcaccaaacagcaagttcaagggatcgcaatgtcaaagccgaacatatttggtaatggatacattggaatgtttttttttttctgatttattaatatgcatcatttatgtgcaaaatatagaaagcacaaagaatctaaccaattatccataaaagaaatgaattcatacaatcatatgtattttttagctgtacactacttgtctagacgttaataagttaattcgtaggtaaaattccataacaagttcgaaacttcgaatatatatatgtacttacagatgaactaaccttataaactgtcccatatcctccttcaccaaggcggttgctggaactaaaattttcagttgcagaccttagttcactataactgaatacattaggtcttccgacaatactgtatagctctgcaaacataaaaatatacatcaatttattaactt

SEQ ID NO: 1229 - DNA, 742 bp, Oryza sativa
gatagcatcatctacttccgcgacggcgtcagtgacggtcagttcgacatggtgctgaacgaggagctggcggacatggagaataagatcatggtgggtgactacccgaagatcaccgtgatcgttgccaagaagaggcaccacacgcggctgttccccaaggacaggaaccagcggcagaccaagaacggcaacgtgctccccggcacggtggtggacaccgacgtggtcgacccgacggcgtacgacttctacctgtgcagccacaagggggaggtcgggacgagccggccgacgcactactacagccttctggacgagcacggcttcgcctccgacgacctgcagaagctggtgtacaacctctgcttcgtcttcgcccgctgcaccaagccggtgtcgctggccactcccgtctactacgccgacctcgccgcctaccgcggcaggctctactacgagggcatgatgatgttgcagccggcggcgtcagcggcatctgcctccgaggccatgatgccggcggcacagccccaggcggctgcggctgcggctgcggcagcgtcgccgtcgtcgtcagcggcatcctcatctgagggcatgacggcgtcccagccccaggcgccggcggcggaggcggcatcctccttcgcgggagctgccgacttcagggagtttgcttcgatgcacgaggatctggtggacaacatgttcttcatctgacgacagcctttcgtcgcat

SEQ ID NO: 1230 - DNA, 1104 bp, Oryza sativa
tatagggcgaattcgagctcggtacccctcctatgtgaacttgacctgtttttgtttctaacggttcttcattttccttcagagcgcattgcttctactgaggttgtaagagtacaaccacctgcacccccagttgctgtgtctcgtagtggcacgcgtgtgccaatgcgaagacctgatggtggaggctcagtatcgaaagccaaggtcaaattgttggtgaaccattttatagttaagtaccgacaggcatcaactgtttttcactatgacatagacatcaagcttgatataagttcccccaaggcttcagacaaggagctatccaagggagattttcttactgtcaaggacgagctcttcaaggatgagagctttcggcggctttcatcagctgttgcttatgatggaaaaagaaatttatttacttgtgctgagctaccagatggtttgtttcgtgtcaaagtccgttcacggacttacattgtatctgtggagttcaagaagaagcttcctttgagccaactctcggaactgcctgtgcccagagaggtcttgcaggggcttgatgtcattgtgcgtgaggcctctagctggcgcaagattatcattggtcagggattttactcgcagggccgcagtgtgcccattgggccggatgttgtagctctcaaaggaacccagcagaccctgaaatgcactcagaaaggactgatcctttgtgtggactattcggttatgccgtttcgcaaagctggacctgtgttggatcttgttcagaagtctgtgagataccttgactacaggacaacactaaacaaacaccaattggacactttgaagaatgaactcaaaggccagcgtgtcactgtaaatcataggaggacaaagcagaagtacattgttaaaggtttgactgataaacctgcaagtcagataacttttgtagattctgaatcaggacagaccaagaagcttcttgattactattcgcagcagtatggcaaggttattgagtatcaaatgcttgcatgcttggatttgagcaagagcaaagacaagctaaactatgtgccgattgaattgtgtgatcttcttgaaggg

SEQ ID NO: 1231 - DNA, 3541 bp, Oryza sativa
cttgcatgcctgcaggtcgactctagatttttccacataaagtttttagaccatcctgtttaggaaccggggtgacacaactgaacaagttagaggacctaaacgagtgatctacgagtttagggatcaggatgacacagttgaacaagtttgaggacttgaacggtcgatttgcgagtttagggaccgggatgacacaacggtacaaatttagggaccggtgatggactttactctattatacagtacatatggaacaagaatgtgcatggtaggcgcacaggcgacaagagagaacacttttgattctacgatggaccactgttagttaaattccaaggatttctgtacatcagttccctactgtaatccttccctcatttcctccaacctgctcagctcagacttggggatttgccagccaggtttcaaatcctgaaacctgcaagacaatcaaacattcgtgaataaataagaatgaattgcaacgcaaactttagtgttagtttgattttgtgaaaattacctgaacttctgttcacaagatgggaccagtgaattgtgtatctgtgttaccggtgatgctcctctgagttccgggctcccggctaaacatgaaccgactggtatgcacttgttcatcgcaataattcaggatgtgaatgagcaatagagcaagtgagacctcagttagtagtgatgctgtcaaaacattatccacagaccataattttattggtaaacttgtttattcacagaccgcacaccgacagttctgactttgaatttatactgaggaagctcttcttcctcttcatcctcatcttcacttgagtcatcttcaactttgtcccattttgagtaatcaagtcctgaatgtccctttggttttgcgatggtctcccacccttgtggtttttgaggcagactgggaggcacctcaacctttggaggttcagttgcatgtttcttttcaagaataagttcagttgcaggtttcttttcaagaatcagttcagttgcaggtttattttcgacaataagttctgttgtaggtttctttttgagaatcatttcagttgcaggtttatcagacttggtaatacaaatctcgatatttacatttctctctggacgcaactcttgcttatcttcttcaagatataacgattcctcttcagattctggaatgggagctagtgcctataaaggttaaaataacacagataacaggttaacaggcagtaggataataagtaaacaagctaaggtatagtttctttcattcagaaaacatttgtaaataaaggggagaagttatgtgctggtagcaactaaaaagcatatttgaattatgtaaggatatttgttgtagttatatcgaatgaaattgcaactagagtaatgccgatgcaagaagctaaagcaaagtgaatcaattagcacagcaaagagaatgaaaaacttacaagctgtgtcttcagtcgtgcatgaaggttccgatatacttcagatgacggatttatctcaatcagcctgttcacatcaaatagagctgactggtaatccttcagagtgacaagtgtctgtgcacgtaacatgagagctccagcatgctccctatccaactcaaggacagatgtgcactcttctgcagcctacagaattttgaaaagaagaaaaaacacgctggtaaaagtgatgataacatagaaaaataaacaaatgatgtcaggtgccaacttattccggagaaacacacagcctactgcagttttcatcagaccatcaaggcatcaactaccccacaagtatttcagatgaaatgaaccgtaattttgtctcattaactaatgctggtttctaaagggagcatgattttgcccctgtatatagttggtcatcaaaacagaggtttaattatcctacaaatttggatgccgcaattaaactttctccatagaaatcatgcattctatagactattgaaacctaccaggattattagaaagttcattcaaatactcaatagtagcctaatcattcgccaagtggttcactacatcgaaatcgatctgtgccagatcaatttgaactactattattgggaaggaaacacaggtttttcacgaagcaaggcattaggcccagtacatggattgcaaagtgtcactcagcacgaaatttaacaggatttgagctcaatctacagaccaccacaatatagtaaacaagccacgattgatgagagttcgtgttggctataatcgaatctctcatccaaccgaacagattcctgaatctgcttctcctcccgacctccccaaaccagagtttgcacaggtaaatcaaaaaccccgccgttgaactggaatcacaaaccacgactaggcatcgatgactaacaaattaagcctttattactctaaacaacacttggaagcggcaacgggcgctcaaatctactcaagtcaaagaagagagagagagagagagagagagagagagagaaacagaaccctcgagaagcgagaccttgtggaagtcgtggagcttgaggtagcacgcggcgcggttgctgtgcagcgcgatgcgctgcgcgggtccccgcgccgccgccagcgccgccgtgtacagctcgagcgcgtcccggtgtcgccctccccggtagagctcgtgcgcctgctccaccgccgcccccgccatcgccgccggcgaggaagcctcggtgtgctgatttcgggggaggaggaggaggattagatgagagaatcgcgaatttgggggagattacgaggattggaatggaattaattgtggaaattcggatgaggagcggtggggagatttgaatgtggacggacggatcggatggattggatactttagcggtgcgggttgtcgggttgctgcccgcgacggatgcgggttactcccctcctgtgaattgacggatttgcccctgccctcctttcatgcaggaatgacgtgtcgtgtaaccgtgtataaagcattacttcagtgggaaaagaagacaaactcgtttggctgatttgaggaaaaaacgaaaagttgtattaataaatgaaaaataaatttatgaataaagcttttataacgtgtttttaatgattaaaagtaaaggttgaaaataaactacgatgaaaaaaaaaaaaatatccaaaaataaactctgaatttaagattaaaaatttaaattttctgataattataagcgaaaagatgaggacatttgtttcgcggctatcttagaaattagaacgtgtagaatgccataaaaaagtcactatctcaccaaaccgacacctaaatagtaccggagaaacattgcaaccagcagcttagctaacagtatcatcagtcctcgtgcttctaatgatgatattaacaaaagaatatttacacaaaagcaattgctactttgttagcccttcatctgcgtggtgtgtactgtgaaaagggcacaccctcttgcgcattggaggagaaaaagggaaacaaaagaacaaggccaaaggga

SEQ ID NO: 1232 - DNA, 718 bp, Oryza sativa
gtgtcactgtaaatcataggaggacaaagcagaagttcattgataaaggtttgactgatatacctgcaagtcacataactattgtagattctgaatcaggacagaccaagaaactttttgattactattagcagcagtatggcaaggttattgagtatcaaatgcttccatgcttggatttgagcaagagcaaggacaagcaaaactatgtgccgattgaattgtgtgatcttcttgaacggcagagatacccaaaagcaagcttaaataggaattctgataaaacactgaaagaaatggctttgatccctgcctcaagtagaaaggacgagattctggagttggtgaatgctgacgatgggccttgcaggtaactgtttcaacttttgagttccaactatttccactgtttgcaaacgcctaattgatcttgaaacttaacatgttgctatgattaattagtagtagtggtggtagtacaactatagattcgtggattcaatggaaatacttctctgcgtgaacgacctagtaccacaaaacttgggttaatatatgtgtgcgaaacaacaagagacttaactacctcaaatattgtatgggtcaaatggttgactcattgttctccttgtcacatttgtctttctgatatttaactgttattactcatttttttccttgctaagggagaacataaacttaactgatctttgtcatt

SEQ ID NO: 1233 - DNA, 2464 bp, Oryza sativa
aaataaaaaaacatatgtgtccacattcatcctacaattagatttattttgggatttgcaatgaacggagtcctcgcactcgccagcttgctccttcttccttcctgtagccttgacgatttagcacgtcagtcctcgatccgccgccggccgacctcgctgtctccgacggccggttctggctgaagtacgcggtgagactgtacattgggtatattccctccgtacttttttttaaaaaagacaaaccctaaatttccatgtcctacgtttgactgtccgtcttattttaaaaaattataaaaaaaaatttaaaagacaagtcacgcataaagtattaatcatgttttatcatctaacaacgatgaaaatactaattataaaaaaatttcatataatacggacagtcaaacgttggacacggaaacccagagtttgtcttttttttaggatagatggagtaccaccaatgggagtgaagaaaggttagggcatggggccgactaacctcctgcctagttataccgccgcagtctatagtataattaagtggtagtagtaaatatgtgtatataatactgtatgtcgttatcggctgtcgtcatatttataattgtgtattgtacaagtattaatgttgggtgtggtttctactaacggaatctcttttacgtgtatatttcgatatcattttgaccctataaagatccaatatttcttaacaatctgcttggttggcacacctatttccttaagcacgccataatttttttctttttactagcacgcctaacatttggctggtaaaaatggagccaccccctttagctaaaggaagataacattgccacattcttctgtgccattgacatatggggcctacctaatgaggaatgaatcttgctgcaaagtgtgacaacatatagcctaacctgattaaacttatctaacattttttatggcaagatgaggcaaaagtggccccgaaactaaacatagccctgaacgcctttgactctcgtaggttgtttcttgccatctcaacaaatcacatatgcaccatatatttcaactgcacattcaaatgtataattcaaacgtatagtagggtgtagaatgctatatagtctagtgcctagtacgataatactccgtattggattatatggatactgtgtcaattttttaggccgtattcttttggaggggctgggaactcctcccttcacacgcaaaatggagcgatgaattaacgcgtgattaattaagtattagcttaaaaaattttaaaatgtatttcttataaaaacaatatcatttctatttaaccataagacctgacgcacaaaaacaacttgttccccctccggtttcttttggctaaataatctaccttcgctctaagcgaaatatgaagaaaccaaaaaaattattcatgggcggcatacctacactagataaggtcgtatacgtcaattaggctaagaaacactctctttatttgtgtttgcgaaaaacactctctttatttcagaaaaaaaaaacttttgtatattaaggtagacattggtaatgcccaaattcgtattcaaatattggtttattataggatagagggagaatccacattgacacaaatccaacctaaaattatcctaatattatgtaagatgcacattttctagttattattattattttcagaacatagtataaatgcaaacactcgtatgcacacgcacactcatcctgaacgtgcccatacacatgacacatcctactcctattgacacatccaaaaaactgagccgacatacattaagactgataaagtcactacatgacccgtacaatcgaagggtataccacctttcactaaaagaataaatagttgtaaatatgagcatctgtgtaaagtcctagtacgtgaaattggatggacaggttacataacctaaccctgggttcaaaattttggttttatcgaccccccctcccccaatgacattattttggccaaaattttaaacattttatttttttttgtgaatttgacaatattttgttcaaatttgactaaattttgtttgaaaatcaaataatttcagaccggagtttctgaaatttcggtatattggcacccctaatacaaatgccaaaaacgattgattaaactctgacctgaccaactatgcccagctcgtgtttttctattattaattagaagagattcgtaggttatcccaattctttgtcatatgtatactaagggggtgtttaaatgggtcaaactttttagcccatgtcacatcggatgtttggacactaatttagagtattaaacatagactaataaaaaaactaatttcataaatgagagctaatccccaatacgaattttttaagcctaattaatccataattatcaaaaatttactgtagcatcacattgtcaaaatcatgt

SEQ ID NO: 1234 - DNA, 2654 bp, Oryza sativa
aatctataggatttatatttttagatttatcatttttatattatattgtttacatcttgttaagctacatggatttttaaaaattaataatcaaatataaatatatttgatttaagataaacaaaaacgagaagtaatttgaacatagccttatctgtcgcatctaattaaagataattaagatcatagacaaagcggacataagaggagcatctgctctgcgcagatcttaagttctcaactagataagtccatatgattccttgccattatctgaaaaaaatatatatatgcatgattgcttgcgtctgctaactgtctacttgatccatgttggtgtttactgtgcacagcattttcagcgtatattaatcagtttattaattgacaaactcactattgagaacttaagatgacgctggagtagtttgttatagttaaagaatgttatagtcgctcttcaataatggctcttaaaaatatgtgtgaaaaggtcatatatatgcagtgtttgaaattttgggaacgaaatttctggaaatttcggaaattttgccccccaccaaaatgctaacatctcgcccaaatttcggttttttgcaatttttttatgaatttggtcaaattttatttaaatttattcaaaatccgtcaaaaaataaaaaaaattcgtacgaaatttatccgaaattccagaaatttcggttctatcactcagcagcggcagaactgctgcttccgaaatttaaaaccctgtatatatgttcaaacaaagttgaatcgactgccacactttattgatttaaccggtgtagtttaaaagcatatatttgacaaaccattactttttttactgatagaataggcatgatgcacatgagcaggttaatttatgcaattaaccgtgctatcacgaaccacctaataccatgataaattactgtctccatcgctccatggaaaataaaaagaaatgaccaaaggttgatccggagatcaatccagctttataggaaagccaaagacggttcacacaaaatttcaatctcccaaaaacggtgactgattatataattgttccaatagaacatatattctattataagacgctttaacttttttaatcaaatatttttaagtttgattaaatttataggaaaacatagtaacattctcaacgtaaaacaaatattattaatatgtattcaatattatatttaataaaattaatttggtgttgtagctagtgctaaatttttctataactttaatcaaacctataaaagtttgaaaagaaatcatgatgtcttgtaatataaaagaaacaaagaatttactagcaacattcagtagacattagaccatatgaaacatgagacacagaaaggcagtgaaaaaaggaagaagattctacctgtcgatgatcagttgccaactctgatgactgactgaccagtgaccacagccccggttagctggcgatgctgcaagactaatcaagcaaaagtcttgaataatcttttctctggtcctgcttcatgcttgtgtgcatagataaataggtaaaggctggcagaacccagacagaaagcacaagatccgaggagcagatcgaccaaaagtttctgatcccctcttcttctcgcttgcttctctcctactcgatcaatctcgctagagcttcttgcttgctttgatctctcgagcctctagcctagcttagctagctaagctagctactcatcagtgtcctaagtagagttgctagctagctaagcatggcgagcaatggcgaggcgacgacggggagcgagacggcggcgccggcgccggtgccggagccgaccccgccgccgtgccaggggaggctcatcaccgtgctgagcatcgacggcggcggcatccgcggcctcatcccggccaccatcctcgcctgcctcgaggccaagctccaggtatatacgtagcaagaacacacacacactgctgctagctcatcagctgatcagctcagctatggtgaaatcaaatgctgatctgcaaggaacggaacaatcgtgtgttcaacagcgaaaacatagtcgctacaatagagaagagtcaagggatcgatgatatcaaaggggatcgcagaccgtccatcagagatgcattgatgatagtgaatccaataagatgtcgtcccttgactgatcttgatccctattgctacacctaaactatttggaacatctaaatccctggttttaatataaatgatacaaggttttccgtattcggaaaaaaaatatgatgattaatttggtgatgattaattcaggagctggacgggccggaggcgaggatcgcggactacttcgacgtgatcgccgggacgagcaccggggcgctgatcacgtccatgctggcggcgccggacgacgaccggcggccgctcttcgccgccggcgacctcaccaacttctacctcgagaacgggcccaagatcttcccgcagcggaggtgcgtgtcgaatatcgatcgatctctgtctttttttcagagaatcgattcgcgatcgcatcacatgtcgatgatcatatcgctgcatttttgttgaatgctaatgttgattcgttcgtgacgggcatatgcacatgcaggttaattaattc

SEQ ID NO: 1235 - DNA, 550 bp, Oryza sativa
tattcccttgccgcagtcttctaaactcgttcttcttcatgcgcatcactgcagcaggtacgaagttctcgcgaaatgctgcagtgaactcctcccaggtgggttctccagcaccgtcttctcgggcttccttgtaggtatcccaccagtctccggctggtccttccaattggtttgccgcaaagatcactttatcggcctcacgtactcgaacaagagttagctttttctcaatgaccctcaaacaatcttcagcatccataggttcttcagctgtggcgaatgtgggtggcttggtcctcatgaactctccaaagcttgaccctccgcggttgccttagttgttcgcgatagcttgcagaagttgagtttgggtggccataactcccgccagagtggttaggtcaggtgtctgagtttcgtcgttgctggttgttgcccgacgacggcttgccatctgtgtagggtgatggggtaagtatcctaattttctaactagctcctatggctttatcctattaaaggagttgtgttgatatgaactttgttt

SEQ ID NO: 1236 - DNA, 958 bp, Oryza sativa
tatactttgataaattgcagggtctttcagtaagacgcagaagctgaaaatatatgataattagaggacaaacatctagagatttatatcttgtttgcgtagacaattagggaactccatatggttttgttgcctttaatttagttcttaaacaactgctagatggtcttcacggatggcctgctgattttccaccttcattcctttgtactgattcagtatagtattctctttctgtgtcatttgattccaaattattctcatggagcagggaaaactgtctctgtcgatgagaaaacaaatattgttgtccctgaggatagatatggactatacgctattgacactctggaccccgacatggtaaaacattatttcatatatttggttaaagctctaccttttactgttattaatttccaaaggttcctttaaccatcgattatattcaattctgtttaacttctgtctattaccttccactccgcgactgccatatcagtattgtttctatttagtgattccttgccggaaacattcacagaccatcctattcttgttaaaatagccactagtgatgattttgtgtattgtctttctgatggctgaacaataacttgcaagtgcttacactctttaaagccaatttattgtgaacctgtaccttcacagctcaacaaacgcaaatcatatactgcagttgcatacctgatctgcaccacttatattacaatttgaattagcagatcattggcgatgatagtgtttgctactatcacgacatgatagtgcaaatgatcaaatggggataccaagaggggaaaacattatttggatttggttatgatttccgccagagtaacaggtgaattgtgcacttctattcctgttttgcacatacagttctgtttatactttacaattctttagtgtttgctcaactgtgggggatcataat

SEQ ID NO: 1237 - DNA, 737 bp, Oryza sativa
gtcgcccgtgcgcgacgaccaagacgctccgaggagcatcaccaacctgaacaacccctccgaggaagaactcgccatgtcgctccatctgggtgaccgagagcccaagcggctccgttcggactccggatcaagccttgacctggagaaatgaagtgcaaaaagtgctggttctgaatttctgattctggttcttcagagtttattgtcattgtggacagccaaaagtagtagtagatcaaaagacctcatatgcagttcagaaaaattgaacctgcagtaagcttcggtgagcttgaatggctttggcaagcatatcatgtaacatgatgtattattattactacaattgattcagccccttgtaggatgttaggtgctagtcctgcagttttgctgtgctcatgatcgtgagacctgatatacaccattgccggatcccttcctctttgtagaagaagaagaacaatgtgcagggaattatgataatgatgatctttgatctatttccccctattattatttaccaattatcaggtttcaattatcaatcagtctgaaatcttgcatttgcatttgcattttgtcaaccagtctttatcttattaactcgggatgatctgttgcactgtcactgacatgtggggcccctaccccgcgccgcgtcgcgacatacctaaccgtattaaactagatcacctccgagtcttttgttacaaaaggaccagctaccctca

SEQ ID NO: 1238 - DNA, 3122 bp, Oryza sativa
gtcagcaagcaaatagcttgcttgacttgatgactataagagctttccatagcaagatattgcggcgttttagcctcgggacagcagtgggattccgcatcaggaaaggggatctaacagatatccctgcaatccttgtctttgttgctcgcaaggttcataagaagtggcttaatccagcacaatgtcttcctgctattcttgaggtgcggaaacttaatctccattgttgtttgaatttggtttgggacggtctaagtttttctgctaaatctttcacttagttggatcattaacagggtccaggaggtgtttggtgtgtaggaataagtcttggctggttggtcttggtcttgtggtgcctttttcctgcttttcagctttctaggacagcatctctactttcagtttggatgctctaggacagttaggacagcagtttgttgagatgctctaggacagtttgttgggatgctctgctctaggacagtttgttgggatgctgacagcaccctcttagactagcatggctgcatggctgctacaagcagctataaatatgtatccaatcctctttgggaggacatggcttttgtgtttagtgaatgaagaaaaccagaaaattgccccatctcgagtgccatcctcttctcaatgagagtaaccattgaaattctaacatctggtatcagagccacactttcctgtaggctaaacatctcttgttccaccccttcccaagctcggttgagctctcagccagcagcagcaccagcagcaccggttgcccctccttcccctttcccttccccctctccacacagcagccccccggaggtgcgccatgtccgacgctcggtctcggcgttcggtcgcctcgagcactcggcgtcagcaggacgccgagctcgccgcagcagaagagcgcaggcgagcatcggctcagaccgctgcagcagcagcgagggcggccagactggcggcagcggagttggcagcagccagggcggagccgtaggcggaggcggcggaacatgcggcacgtgcggcggaggtagaggttgagaccttgcgcagcagcatcaacggctccatcgccggcgacatcaccgctgacagggagcttgaggagctggcaagaggaagggcacgggagcgagcagagcggtgggcagcagcccacctccacggcggcggcggcggcccaagggaccgtgcgcccgccgacgggaacccagacgggcgcgggcgtgccggcggcagcccggagcccgcacgcggccctcgcaggcggcacggctccctctcccctgaccggcgccatggtcaccacggcgtccagacggtggtcagggattttggtcccggcggtgggtggcctaccctcaccaaaaccaactacatcgagtgggccgcggtgatgagggtgaggctccaggtgcggcacatgtgggaggcagtccggtacggtgacgtcgactacgacgaggatcggcgggcactggatgccctcatcgctgcagttccgcccgagatgcagttctcgctttcccagaagcggactgccaaggaggcctgggacgccatcgctgcggcacgcatcggcagcgaccgcgcccgcaagtccacactgcaggcactccgcaaggagtgggagaacctggccttcaagccaggtgaggatgttgatgactttgctctccgtctcaacactctcttgcagaaaatggtgcagtacggcgacgacacctacgacgaggagagagctgtcgagaagctcttccgctgcgtccctgagaagtacaggcagatcgctcgctcgattgaatctctgctggacctctccacgatgtcgatcgaggaggcgttaggtcgcctcaaggtcgtcgatggtgatgagccacggcctctctcggggcccatcaccatcggcgggaagctccatctcactcgggagcagtgggaggcctctcagggtgacgggaggaagggggagtcatcttccccgacaggcggccataagccgcgcaaggcgcggggaggtgtccagctacggtgggcgcgaagacgtgccgagggtggcgcccgcagaggcgcccagggcgttgccaccggcaaccacaagccggcacgagacgacacctgccgcaactgtggcaagcttggccattgggccaaagactgtcgacagccacgacgcggccaggcccacgtcgcacaggtggaggaggaagagccggctctgctcctagctcacgcaagcatcgagctacctccagcggcaccggccgcagcggctttcctccaccttgatgagccgaaggtactcgtctccctctgtgacggctccagcaacgacaaggctgatgggtggtacctcgacaccggcgccacccatcacatgaccggccgacgggagttcttcaccgagttcgactccagcgtccgaggcaccgtcaagttcggggacgcctccggcgtggagatcaagggtgttggctccgtcaccttcaccgccaagtccggtgagcacaggctgctcaccggagtctactacatccccgcgttgaggaattctatcatcagcgtgggacagctggatgagaacggctcacgcgtgttggtcgaggacggactcatgaggatttgggatcgccgtcgtcgccttcttgccaaggtaaccagaggcactaatcgactttacatcctcagcgcgcaggtcgcacatccagtttgcctcgccgctcgtcgggacgacgaggcgtggcagtggcacgagcgcttcgggcacctccacttcgaggccctgaagcagctcagtgccaaggagatggtgcgaggcatgccgtgccttgaccacgtggagcagctctgcgacgtctgcgtggtgacaaagcagcggcggctcccctttccccagcagacgagcttccgagccaaggagcggctcgggctcgtgcacggggacttgtgtggcccagtgacaccggccacaccaggaggacgacgttatttcctgctgctcgtcgacgacctctcccgctacatgtgggtgatggtcctcggcagcaagggagaggctgcggacgccatcaggcatgcgcaggctgctgcagaggcgg

SEQ ID NO: 1239 - DNA, 660 bp, Oryza sativa
ccgttcttggtctgctgctggttcatgtccttggggaacagcctggtgtggtgccgcttcttggccacgatcacggtgatcgtcggggagtagtccttggtcttgatcgccttctccatgtccgccagctcctcgttcagcaccatgtcgaactgaccgtcgctgacgccgtcgcggaagtagatgatcctctggggcttcacgcggttccgcttctcgaacacgccgatgagctccttgcacatgtcgccgaggtgctggatcacctcgcagcggtgaggctgagcgcggattcttggcacgtacttgctggcgccttgatccaccgaggccaccactgctgcaatcgacgggctctcgacgttccccggcgatgggtgattcacgtcggcgccgatgaacatgtatggcgcgccggagatccgcgggagcgattcaccaaacagttggatgttgcttcctccaatcttgccgttgatcttcagagcaaggttggacatgtactggtcctgtccctgttgtttgttcgcgaggaagctcaagaagcactgggtctggatccccagctgcgtctcgcagataagcttcagcgtcttgtacccaggatgctgatcagacattgggcagaagaggagctgcagcttctgtttcttactggct

SEQ ID NO: 1240 - DNA, 2083 bp, Oryza sativa
ctaaacatctcttgttccacccctttccaatgtcttcctgctattcttgaggtgcggaaacttaatctccattggtgtttgaatttggtttgggacggtctaagtttttctgctaaatctttcacttagttggatcattaacagggtccaggaggtgtttggtgtgatgttgatgttgttgaattttcgtactacggtgcaccggctcaaacacctaaagagcaaatgttcagtgagcttgttgataagttatgtggcagtgacgaatgtattggttcaggctctcaggtactcgtgttctttccctctctgtgtgtgtgtgtatgtgtgtgtgtttgcaaaaataccatgtgcattaagcacagcatgccatcatctgcacaataattgtacaggacaataccatgtactagcaattgtacccttcatgttgtaaggggaccgttcaaatttgtcaagattcatcgcaagatttgctagtacaaagtggataaattttcatggcactctgaagattatgccaaaaactgaccgttggtttgttggttagtcctaacatctaagtttgaccagttgagcggtggccacagctagtttgaatgctaccaatgttcattacatcaaagcagatgatctgatcggagattggaaggagtttctccttctaaatcatatcatatcatttgagatactgcatactatatgttggttcttgtgcagattaaagcttctggattttacacaatcctcctaccgtttaccagtcaaacctttaacatgttgctgtgctctttttgtgaaatttcaacttagtaataatattttgtgacatgcactcaaactacatactccctccatcccaaaaaaatccaacctaggataggacaccaattctggacaaacactttgtccagttttgctgtgacctatcctaggttgttcttttttgggacggatggagtacttctgaagcgttcgtccttatagttctgtttcattgtttcaggttgcaagccatgaaacttttggtactttgggtgcaattgtgaaacggcgcactggcaacaagcagggtggtttcctcactaaccatcatgtcgcggttgacttggactaccctaatcagaagatgtttcatccattaccacccaatcttgggcctggcgtttatcttggagctgttgaaagagcaacttctttcatcacagatgacgtttggtatggaatctatgctggaacaaacccaggtagagcagttacaaattagctggtcagggctttatctacaattgtttgtctatttaaaaacaatgtcttaagtaacattaaaagacacttcaactcactgtataaatataaaaaataagtttcctgcttcctagttcccatcattcatattaatgccggattgcattttttactagttagaaacaaatcaacatttagttttgattgtaaaaaaaacatactatgtttgtgcttttctggtcatttaacacatttaccattttattgattattccaaatgatgtatataccagtctaattcccaaacatatatgccgccccattatggatttgcagagacatttgtacgagctgacggtgcatttatcccatttgctgatgactttgacatttccaccgtcacgactgtagttaggggagtcggtgacattggggatgtcaaggttatagatctgcagtgtccgctcaatagcctcatagggaggcaagtatgcaaagttggcagaagctctggtcacacaactgggactgtgatggcctatgcccttgagtacaatgacgagaaaggaatatgcttcttcacagacatccttgttgttggtgagaaccgccaaacatttgatttggaaggtgatagcggaagccttattatcctgactagccaagatggtgagaagccgcgtccaattggaattatatggggtggcacagcaaatcgtgggaggttgaagcttacaagtgatcatggccctgaaaactggactagtggggttgatcttggccgtctactcgaccgtctggaacttgatattatcattaccaatgaatcactcca

SEQ ID NO: 1241 - DNA, 994 bp, Oryza sativa
cagaggccgagaaacacgcggcatggcgtgccgcgatgcagtcggagatggacgcggttcaggagaaccgcacctgggagcttgctgacctccctcgtggtcaccgcgcgatcacccttaagtgggtgttcaagctgaagagggatgaagccggagccatcgtcaagcacaaggctcgcttggtggcacgcggtttcgtgcagcaggaggggatcgactacgacgatgccttcgctcccgtggcacggatggagtccgtgcgactccttcttgcgctggctgctcaggaaggctggggcgtccatcacatggacgtcaagtcggcgtttctaaacggcgacttgaaggaggaggtctacgtgcaccagccgccgggatttgtgatccccggcaaggagggcaaggtgctacgcctgcacaaggccctctacggcttgcggcaggcaccgagggcgtggaatgccaagttggattccacgctcaaggggatgggcttcgagcaaagcccgcacgaggcggccatctaccggcggggcaatggaggaaatgccttgctggtgggtgtctacgtcgacgacttagtgatcaccggcaccaaggatgcagaggtcgcggcgttcaaggaggagatgaaggccaccttccagatgagtgatctggggcctctctccttctacctggggatcgaagtgcaccaggacaactccgggatcacgcttcgacagaccgcctacgccaagcgcgtcgttgagctggctgggctcaccgattgcaacccagctctcactccgatggaggagagactgaagctgagccgcgacagcacagcggaggaggtggatgctacacagtaccgacgtcttgtggggagccttcgctacctcacccacacacgggcggacttggccttctccgtcggctacgtcagtcggttcatgcagcgaccgacgacggagcaccagcaggttgtgaagaggatcatccgctacgttgc

SEQ ID NO: 1242 - DNA, 3962 bp, Oryza sativa
gtgtgatagtgcattgtgcatataattctagtttttgccaaaatatagacgttcttgatttactattcccatcaggacttacttcgttagaggatttctacatagtccagttggtgtttacagaatcaccatcatatttcatagtggctataacttaaaaaggttcagcaacgcctttttgtgtttttctcttttttcagagtgtttctttgtgaagcgctctgctgtacatattttctcttcttcttaatgaaatgaaacgcgtggctcttgcattttcgagaaaaaaaaaacttgaaaaggtgttatggaacttacaactcaaccaatcatctatactcaaaactcatctctttcagaaattcaacaaaacatgttgtaaatatctgatttggtcaagtttcaggaatttatcacaaaatgttttggcagggcctataccgtcattcattggggagttgactaatatgcaatacatgtgagatatataactcaaaacataattacattaaatgcatttgttttgcaataagtctcacatttttctcccttcaacacactaggacttttggcatcaatgcattatctggacctattccaaaggagctcggtaaccttacaaatctcatatcactgtaagaactgtatttacattatttcgtggacgtaattcatcatacaactctactatcatgaaatgcttataatgtaaaaatcattaaagaagcagtgaagcacagcataattgtgaatatatgccaatttcctcatgtttatgctattcaattaaggattccaaaatattgagccggagagcaaatagcatattcatttttgcaacattcttttatttgggtattgcagttggactcagttggaagaatagctatgctgacagtgttatttcttcatagaatataaattccaatacaactttatgtggctgacatggaatttttttgaggtttatcttcaggggttgtggttgttcacgagcaagagcggctgccttaaagagttgggaaccctgttcaaccttgaggaattgcgcgtttaactaattattagtcgctatgtttttttttatcgaaccattttattttcttggactactgagcctaacgtgttctgctatttgcatctctcaattgcaggtatattgacagttctggcttaagtggagcactaccatcatcgtttgccaatcttacaagaatgaaaatattgtatagacctttcaaaagacatgttcttgttgacattaatgtcagattccatgatatctgtgtatcctttcacttgttcaggtgggcatcggataataattttactggacaaataccagattacattgggagctggaatttaacagaccctgtaagtttgctgttagcctctctatattgtacagtaatttatttttttaagatgaaatcaatgaacacaaaggggagttaaaaacttttcatataattctaaagaatatgggtacagtttgctacagttttacactgagctttagtttgagagagaaagactagatttaaggtaacacaaaaagtctttactggtatttcatacttgaccttgggtgtgttgaatcgcctgagatctctttatttaataaataaatcctcaataatgcatcttgctgactcaccatccatgaagagattgatgctagttttgaataaggcactagtgttagtaagcattgattctgtttatatcatttctatttacactggaaaagaagttgtgctttagctacgtaagtttgcccttttttcttagcactactagtttaatttgccactgaataaatgataatttaaattaacaaactactctttctacatctatgaatctctaggcggttgcaagggaattcttttcaaggtccacttccagccactctttctaatcttgtccaattaacaaacttgtaagtgcctactgctggcaagaatgtttatacatcgttcttaaatatcaaaggtttcatcaagggaaacattaacaacctatttctgtggtgcagacgaattggcgacatagcaagcggaatctcctcttcactggcattcatcagtagcatgacatctttgaatacactgtatgcaaaaattttgttcactttcacgattcaaactacggttcagattttaatgtagttcaaaccaaattgttaaatactataattaaatagcatcattgtttgcaggattttgaggaactgtatgatatctaatagtcttgaatctatagacttctcaaaatatgcaagtttaaccttactgtaagtattttatatttatagtaaacaataggcaagtgtattttgtccaagatattagacgaattgctgtggatcaagcactgacctctggccattctcaatattttttaatattacagggatttcagttttaacaatatcactggcccaataccgcaagccctgttgaatctgaattcactcaactatttgtacggattatctttctttccaagcttatttcttggaatagaagggttatttgtttatctagctaatgcttgcaaattttgtatgatcagatttcttgggaataatagtcttacaggaaaacttccaacatcaataggacgttcgttcagagttttgtatgttcatatgattcatttattgtaacaacaaaatgtgtttgatttatttctaatgatgatttggcattttattttctgcagagatttttcttacaaccagctttcaggatatctcccttcttgggttagtgggaaagatttacaattgtaagtaccaacttctgaaacctccattaactaactaacttcagccaaattgagggcatgtttggcctattattaggcttttgaactggcgtattaggattacttttgatgcatttgcttataggtcttcacaaagttgttggatctataatgtcatctgtgattcagattcttctgttaagggtatactttcagattataagttattttgacttcgttcaaagtcaaactactttaaatttaaccaagtttaaagacaaatagtgatatttacaacaccaaattagtttcattaaatctataattgaatacattttttataatatatttatcttggttgaaaatgttactactttttttataaacttgatcaaacatagaggagtttgactttgaccaaagtcaaaacgacttataatctaaaacaaagggagttgatactaactattactccctccattctaagatataacaacttttactcctcaggatttgtcccaaaatataactacttctccaccaacattttcttcccaacaaatcacaaccctatattattcacttttcctacctacctccactacttatccaatcacaaccctgcactattcacttctacctacttttttaataaccatatccaactctaaaacttgttatattcaagaacagagggagtaagaggtattttggggattttctcatctctgttatacagagtacaacacatatttgccttttaggtttatgtgaatgcaaaagttaaattctcaatttaactcttcttcactaaacttagattaaatttcactttgggtcatcagatgttcagatttggtctaccctttaaccaatgtttttactttggatcagataatcttacctttgctgtaatagttcaattcccaattaactcttcttcactaaatttaaagtaaatttcactttaggccaccttttattaccaagtgttttattttatactaccctttaaccaatgttttcatttttgcctagataatcttatctttgttgtactttggactactctaactctcttcatatgaacatccgttacgccggctctgatttgtcactaaactcccaccgctttatatagataatttatttgacatatcatgatgtgcataaacaaaagggtgatt

SEQ ID NO: 1243 - DNA, 2872 bp, Oryza sativa
catcgaagtcattcctggcaatcaccatcatcttcatcaccttatcatcatcaattccgggatcatcgctaactccctgtcggagttggtatatcacgtcaccagcttcccgtcgaagttggtatcatcatcattcagtgaaggtccgaagaacagtttgtgaatggccttcatcatcatcgtcattgtctctgaatcaatgaagagccaaagaacaatttgtgagggctttttgtactgagggctgaagaatagtttgtgaaggcgcaagatccacttcacatcatcaatgcaatagtttgttaagggtatagatgttaaggggtattttggggattttccaatctcttctgtacaacatacatttgccttttgggcctaggtcaatgcaatagttcaatccccaatttatgcttgtttcttgcgaaagaattcctttttcccaaatttgggggcggtaaaaaaaaaaacgagaataaccttacaacttagcacagaaacaaatcattttgtagcttaagtttatgtttgttcaagctagactagacaatatctaaatattgctatggaaacatgaagtataagaacccttttaattttgatactgttcattctacctaggaatttggtggcaaacaattttgtggacaatgaattaaatataggtgcgtccattttctcctcaatatcgcaagtataatcaatagattctcacagcttctagtttggattcaaaatgttgatcttttgcatctgcagtatcttaccttcaatgcagtacctgaactgccttcagagaagtacaccctgttttcttggttctccaaagagtgagcctttcaaccctcaatatcaagaatatgcttacttgagaaacaccatttacttagaacattagtaaatgctaatactaattgatgtaacttgcctgcagctgcctccttcgctgtgaactgtggtggccctctcacctcaggctcagataatttgcggtatcaaagtgatgaagtcaatcttggagatgcatcatattatattacaggagaaccaacatggggtgttagcactgttggaaggttcatggatgcatcaaatggaggttacacaatccgcagctcgcgccagtttcagaacacattagattcagaaatgttccaaaatacaaggacgtcagcatcatctttaagatactacggtattggacttgagaatggaaactatacagtcactcttcaatttgcagagtttgggtttgaagacacacagtcttggaaaagcctagggaagagggtttttgatatatatctccaggttggttcttgcgtagctagctgataagctataccttttgatttaacttgtaatcaagttgagattttcttttgtcttgtttttgttggagggtgaacgtaaggagcagaattttgacatcaggaaggcagcaggtgataaatcttacactgttgttaagaggtcatataaagttcctgtgaccaaaaacttcgttgagattcatctattctgggctggcaagggtacttgctgcattcctactcaagacaattatgggccctctatctcggctctgagtttaatccctgcaggtactcctctgaacaacaattcatggttccattttgaaaacaatgtattttcagtgatcaactattgagtttcattgtaggccttcattgtaagataacattttattctaacaaatggacttcttttcagatttcaccccgacggttagtactagcatttcaccagaaggaaacaataatactagtaaagcaggtgtgagtactagtaaagcaggtgtaattgttggagttgtagttggtgtaacaattttaggtttgatagcacttgctgcaattttgatatggaggcagaacaggagaaagagaaagttatcattggagcaacaaggtacaggaccactaggttcaaccgagtaaatgggaagctcataaagtgatgtatctttttatgtttgcagagttgtacagtattgttggaagacccaatgtaatcagttatggtgagctaaggtccgcaactgaaaattttagttccagcaaccttcttggtgaaggaggatacggggcagtctataaggtaatttcatctatagcatatagattgtgagttatgacattttttcaatgaagttattaacttataaacatctagacgagtagtatattgcaaaaaagctgcatatgactgtgtcagttccttttcttttatgtattattactgattatattcgttttccattctatttattcacataaatgatgcatattcataaaatgggaatgcatataccaccgtatccattacaaaagatgttcttttagaaacattacaaaagacgtttgacattgcagtacctgaaacttgcatttttggtgaatgccaccttgcagggtaagttaactgatggaagggtagtggcagtgaagcagctatctcaaacatctcatcaagggaaagtgcaatttgcagctgaaatacaaactatatcccgagtgcaacaccgtaatcttgtgaagttgtatggttgttgccttgaaagcaataacccacttttggtttatgagtacatggataatggaagccttgataaagcactgtttggtacaagttatttcaatttgatgcaactggtattctgagaacttggatttatcgtagtctatagagacctaaaagttcaatcctacatttgcaggaactgggaagttgaacatagattggccagcacgctttgggatatgcttaggcattgcaagaggtctggcctatcttcatgaagagtccagtatccgtgttgtgcacagggacatcaaggccagtaatgtct

SEQ ID NO: 1244 - DNA, 1993 bp, Oryza sativa
tgcaggtttccttcagctttgtcctttttctttcctggtcaaagttggttgcctgtgaaccgtgtcgttggtgttcataatcttcagtagtgcttcaccaaccatagtccaataggcaattttgggcgatattttggtaagctgaaagatattttaaattgagctagaacgattttgggcgcattgagaaaacaaaaggatttttttttcaaactggttgatatatttgtgcaactactatatttatttcaaaatatagtaacctagagccagataaaattcatctattactacgaatctggacactgaaaaatcattttggcatgtggccattagccaataattctggctggtttccttcagtgtgtccggggtccctcttctttcctggtcaaagttgatagcttgtgcatgtcaatatcgttttggtattcgtaagctttagtgctacttcaccaacaaataaccctaggccagctgatatcagattaaaagacatatagtacaccttttagttgagcttgaaagataattttggtgcgtagctagagaaaataagggcgctttgatttgtaggaaaaatataagaattttggaggatttcaatcctatgaaaaaaaatccattgaaggcctttgaaacaaaggattgaatcctatccaatcctttaaaattcctatggaatgggtaatcctatgcacattttggaggaaaattagtaagaggtctaacctcttggaacatttcctctaagtctatctctctcatctgattcctgcgttttttcctgtggtccaatcaaacggtcattcctgtgtttttcttgtgtttttcaatcctttgttttacaattatattcctgtcagaatgtgtttttcctattcctctgttttttcattcctacgatttaaaggagccctaaaagggagaagaaattttacctgaaaaaaaaaacactcgtggcttcagtttgcaggcatccagctatcgatccagattgtctcatctttcttttcttttcatttttatataaaatcctttttgagaagaagatcgcccttctttgatcttgaattcctgactgctaatgcacaatatacatgagtgtgtagtagtggcggtgtactacgtatgttttttaatagatgatctagtgatcttttaagaaaacgttagatcatttatctcattaaaaaataatataaatatactaaaatataagtcatatttcaagtttctttaataataaaataaataacatttatgacaaacgatcaaacgccgtgcaagtcaacaacgtcatctattaatataagtctggatgggcccaaatcgtttttaatgggtgagcccaaaagtttgaggatgaatgtcataccatcaagctaaatgggccagaatttactttaaaaaaaggaataagtttatctaaggtcccttaacttgtcgacgaatccgattttcgtcattcaactgcaaaaccagatacagcgggtccatcaactgtcaaaaccagtgcagtagaggtcccttagcgatttagacagtgattttggctgacgtggcgcctacttggctaatttgatttggtcttcatctgacgtgacaatgacgtgtcgcttacgtggcaatttgatccagaaaaataataaacctcgtgggacccacatgtcagtgccacatacaaattaataaaaaatttagtggggcccacatgttattctcagcccccttcttcctcctctctccccatctccctcactttcaactctctctcccctctcctctctcgcgacggagagacagcggctcgcggcggcggaggcaaggctctggcggctgtgggcggaagagccgcaccacgtcggggagtccaggcacgaggaacggctcgtcgtccgacgcgacgcagtcctgtggggcgtggagcagcagtgctcgctgcaccgagagcgcgaagcaccccatccccgtgaacgcgtaccgcgggatg

SEQ ID NO: 1245 - DNA, 979 bp, Oryza sativa
ttcaagaagccgtcgccgcggctctgcgagtcctgcggcggcggcggcggctgctgctgctgatacccgccgtagtcggcggcgactggcggcggcgcgccgtacgccggcggtgggtaccccgtccccggtggcgggtacgctgcaacagtagataatcacacatgcatcagctgatgaatttgtccatcaaaacgaactcagaaaaaaaaaataaaaaatgtcgggatgcatgtattttctcctaatcttaataaaatttgtcgcgtttcttcccgaccaggcaaaaaaaaaaagaaacaaagaaaaaaaaaggagacctgacacacaactctcacaattattttctctgtgctaaatcacaaaccagggagttctccaatcagatcaagaaaccaagagatttcaatacctgcagtgccgggaggaggaccttggtagctcatgatcactactactcaatagtagtaaatcctccaaagagcaagaagagatgcaaaccaagaacaagaatgcaagataatggagatgagaaatccaagctctcctcagtttatttaacgctggactctctatctcctagctatatatactcctacatatatagtgctactaaactttatttatttccttagccgcgttaataattaattaatgacaagaagaaaaagaacgccgaatggctgctgcttatcccactcttctgaaaaacgcgttgttttacgtcgtttacgctacatttatttagacgtacgggatcgggttctccatctcttctacatgcctttttcatttttcaaattgaaaaatattgaaaaggcgtcgtttttagattgtttgaacatgcactatgtgtctatatgtactgccttttcagttttcaaatgttgatcagagatggcggggaactgaagaaggctcgtttgtcaatttgacagaatcttcttctaagcaatgcagggataagctagctaactta

SEQ ID NO: 1246 - DNA, 569 bp, Oryza sativa
cgagctcggtacccccagccgagcttcctcctatgttcaacacgctatcggcgtcccgcgagggtgaagacggctcgctggaagaggcgcaggcgacgatctttgttcatccagagagcaaagggaggcagcatgtggaagttagggcagttggagtcacccatgacggctagtcaagccagtcatacgaaaacacacggttgtcaactagctagtctgcacactccaaagcaaagtggacaatgtaaatataagacgtccctagctatgaactacgtgtaattttgctgccttgtaaataccagaactgaaaatatactgccactggatgatgatacgaatagaaaggagaaagaaaaggatgaacttgatatgttaaaattgtatcaggtgcttgaaatgttgttactggaaactgatcatcctgactcggttgatcaagcgatgagacctccgagttatcattgtcttatgcatctttctagtccttgtttaattcatcttaagcttgttggctatgtcaaatctttgtttgggcattgcagtttcttgctgcgctcgtcatctct

SEQ ID NO: 1247 - DNA, 1364 bp, Oryza sativa
cttttcttttatctagtggttatcttgcacctgagtatgctatgagaggtcgtttgaccgagaaagttgatgtctttgcatttggcgtggtcttattgaagactttagctggccgaccaaactatgatgatgctcttgaagaagacaagatttatattttcgaatgggtaagctcagtacagtagctcatgattaaatcttaaccaatgtaaagaagatataataatggtctctctgcttttttcaattgatatttgtgctattgacagaatatacttcgatattttctactaaagattggcaatactcccaccgtctcaaaatatagcaatttatagcatctaaatttatcctaaaatataatcaattctccacctacattcttttcccaaccaaaaacaacatttcactatttagtttccctacttacattgttactctcaaccaatcatatttttttcctatttaatttcaccaacttccttaatacatgcgtccaattctaaattttcttatattttaggactgaggtagcaagcattgaacacacttctcatcatatggttttatcgaaacaagcaacatttatctgattttgtccccacgatctgaatactgaccgtctcaatactttcaggcttgggagctgtacgagaacaactaccctctgggcgtcgtagacccaaggctcacagaatacgacggtgaggaggcgctccgggccatccgcgtcgccctcctctgcacccagggctcacctcaccagcggccgtccatgtcgagggtcgtaacgatgctcgccggcgacgtcgaggtgcccgaggtggtgacgaagccgagctacatcacggagtggcagatcaagggcggcaacaccagcttcatgggcagcgacgtcagctggcggtcgagctcggcgccgagggagatcatctcgccgcaggattcgtcgccgttcttgagctccgtggagtagggagaggtatggtgatttcgcgctgcgctcaggtgcttcattcatcggatttaacttgtcctgagagtggcacacgatcttattgtgtgtgcatgttcttccaaactgtgtcgcgtaaggtgcatattcgaagtactccctttattctcttttgatcatcatatttggtccatgcagcaagaccaaagagagagaaacacatatttaacttgcatgcgagaaacacatcaccatatttaactattgtatgaataagcgattagattgtctatagatgatttggagctagtagttggcagcttgcatcggcatcgaggaaagggagagagatgaggaagggagaaaagatgagagggggacaatgtgggtcccattgtaatattttttt

SEQ ID NO: 1248 - DNA, 1140 bp, Oryza sativa
tctgtcaagcctttaacagtgtacttctcctcagtcttcctgtgacttacagtaacacacaggcctttgagcgcattgttcaattttttcaattggtcttccaagagcgggtattccatgaacttcatagtcttaacaaggtccaacacagatccagctttccaacatggcaaaaccgaatagtccacacacaggatcagccctttctgagtgcatttaaggctctgctgggttcctttgagagctacaatattgctatcactgatggcctcactgccgctctgcgggtaaaatccctgaccaaggacaatcttgccgaagctagatgcctcacgcacaatgacatcaaggccctgcatgacatctctaggcccaggccgctgctccaagagttggcttaaaggcagcggcttcttcaacttcactgatacaatgtaggtccgtgaactgtccttcacacggaatttgctcacagggactatgcagtcttctggtagttcagcacaagtgtataaatttctctctccatcataagcaacagctgacgaaagctcctgaaggctctcgtgctcgaagagctcattcttgactgtaagaagctctgcctttgagagctttctgttgggaccgtcaccaagcttgattcgtatttcatagtgaaaaaaggttgattcctttgggtagtcgactgaaaaatggttcaccaacaatttgacctcgcctttagataatggacctccaccaccaggtggtcttgccattggcctatgtttggtaggtggttcttctcttttattcttgttactggaagcaattggggttgccggtggttcttctttttcatcctcaccgtagggaatgcgctctaaaggaaacggaagagtggttagaaacagagaatgtcaagtttacacaagcaaacccaccaactcaacgtgtagttaaacttaaaactagaacagaagggatcaccaatctgtagatcgatattccccctaaagtaatatgattcacattcaagcaaggaattactcttcctatgaattttctgaaatctaaatgcagccctgcctctagaaaaaaaaatgttgatggtacgtgacgtcaacaaaaaaaaattgatcgtatattcagattcac

SEQ ID NO: 1249 - DNA, 2673 bp, Oryza sativa
cggggaggcgcgatggcggccgggcggaggggaaagaatgcggccgagcggcggagaggattttatagggggcgctaggtcagttcggccggggggagagagaggtggtgcggcagagaggcggtggagcgcggcgaggggaccgcgctggcgctccggcgctagcggccaagcgcggcagcggtgacgccggccagtcgggaaaaaggaaaaaggggagaaaaaggaggcttgcctcctagccgatttgggtaagggcgcgcgcggggagagagagagggaggcgcgcgctcggctcctaggcggcacgcgggcgcgcgagcgtcagggccgggaacggcggcaggacggaacggcgccgacgggaaccgttggggagaagagagagagagaaggacgggcaagggggactgggccgaggcggcccgagaagggagagagagagaaaaaggaggccgaagggggaaaaggtggccgcgcgggcggctgggccgagggggggaacgacttgggccgaaaggggaccggcccgagggggagagggaaaaggccgggaagaagtcggcccgagagcagagggaggtaaagtggactttaccagagaaaatgaaagagggagtttgagggctcggattcgaaatccgatttcgcggttttctccgggattgaactgaaggggagacacgagaccttggcacacgacaagactcaaccgaagagcaaactttcgcaaatagggtttttagtaattaggttttcccgctaacgccgcgacaaaacgggcgttacaattttccatgtactcaatacgtcctaaagcatcttacaatttcatctcattcaaaaaacactttgagcaattttgagaaatcaaaacatccttgtgttgtttaatctttttcgcacacaaaacattgaacaaagaacttgcacataaagcagttttatattttttcaaaatattctttgtcaacattaattcatcaacaacacgagcatgcaaagcaaatccaagagcaagagaagatttaaatctcaaattatgatcaaaattgatatctctaatttttgaaatttcatgcattaaaacttcataatttttacaattatcatcatcaggaataagtgattttaatctagcaatttcagaattaagagattcaatgataaactcttgttttttaatcatcttctcacatcttttatttttggagctaaaagtggaaattacttcttcaaaaaattctatggaaggacttacctcattatcttcaatttctgactcagattcaccatgagccatgaagcaaaaatcagagatgtactcttccttgtccttatcttcatcacttttaatatcaccattgcttgccggttcaaaagcagcatagacttgatttagcaccttcttgagagcctccttggatcttcttcccttgaatgttgtaacgggcttgttgtccttggtcttgactccattgtcatctttcttgtctctccccaacttgggacaatgtgagcgaatgtgatcaagctccccacattcaaaacatcgaattcgacctcctcttttcttcaacctaacattgttcatagctcgagacaacttgttaatagccaaagccaaatcctcctcctcgaatgattcgagttgatcatcggacaaggcattaatggaataaagagagacagagttcgatgaagaagcaccaagatccaatgaagaaaccaaagcacttgacttagaatcaaccttttgagaaagaatattcatctcatgggttttgagttttgtgtaaagagaatccaaagtcaagcaaaacatatcaactgattcttgaatcgaagttactttcatctcccaaattgacatatcaagtccattcaaaaagtggcgagaaacttcaaattgagagtaattaacatcataagaagaatccacagatcgaagattactcaaaatcttattgaatctagcaagataatcatctaaagcttcttcagatttcttctctaattttatgtaatcctttttgaaaatatctttacgtaattctttaatgttggaagtacgttgatgaaaattacgcaaagcgttccagatctcattgccatttttagatgtgacactcgatcaaaatccgagcgagaaattccactcaataaaatatttctagctttgcaattattttcaaacttagttttcaaagcagtagtgttaatttgatctggaatttcatagggttgagcaaccttaggccaaatgtcataatcttgagccataatataagattgcatcttgtcacaccaataaggaaaatcgacaccattgaaaacatgtggtttggttgaaaacttgtcagccatggcttaaaaactttagattggtaaaaatccaaagaagaagaacaaggctctgataccacttgtaagatcgaatcccaaataccaagccaaccagaggggaggtgaatggttgtaacaccaaaaaccaaaaactttaaggggaaattaaagttaccttcttttcgatgtagatcgccgccgtcgccgttgctgtcaaaacgccgccgccggtctgaccgcccgagctccccggtctgaccgcccagtcgccgccggtctgatcggtgtatattcgccggttggaccgtcgcctctcgccggttaacc

SEQ ID NO: 1250 - DNA, 10864 bp, Oryza sativa
ttgccaccaccctacctaggtgcgccgcactcgcgaacaccattcaccgtcggcgtctccacctcccaaccacgggcgcccctcctctgtctcctcttgtttgctcggcagaaggaggaagagggaggaagacgagaggaagaagaaaagaaagaaaaataaaaagaaaagaatattccttgataggtgggcccttacacagatgctatttaattcaagggttaattggatccataccattatagattctttagttttgaaatatgtcattactattcaactatttagaacgatgtcattataatttttcaggtaatgaaaatatatcactacataccctttaccctttcaatgtgtttaacaaaattcttagaccaaaatgccatcttcttcttccttggtctgcttccatctatcctgttcatcttattcctctcgattcatgttgcgggttcagtgcaaggggttgccgatcaggacgggctagctcaagtcggctttaccaaagatcgttcaccatcgctatctttactgcactcaaggatctcctgcagtcagcctttagttttattttgattttgtggcaacaaatcagaaaccaattagcagaggggaagcgtgttggattcatccgttgggctgttgctgctcctgcttccatcttcgcagctgctgcagccagtcagagctacccgacctgcctcctgttcatcttcttcctcccatttctcgcacatggttggttttcagctgctggaggacgtactcgtagttggttgcctgctgctcggcagaagctagtggaacggattttgggatgtttgaccaactcaattaggcacatagaaaagatcgatgttcagtttgagattacacaagaaaaaagccactctgtcagatcatgcacgtgtggtgaagccgccgaggcgaacaacaccagctgcaccttccacaacgacgcgtcgacgacgagctccactccttggttggccagtgaagggaagaagaggaactagatggcgcagcatgacgctggcatcatggctgagagaggaaataggaaggaagaagacagcttgccagattcggatccagaaggggaaaaataggaggaagaagatgaacaggagatgggatgagaaagatgagggcaatttggtctaaaaattttgttaaacacatccaagaggtatgtagtggcatatgtctaatacctgaaaaattgtaatgacatggctctgaatagttgaatagtaatggcttatgtcaaaattgaaaaatttataatggtatggatccaattaacccttaattcaaatcctatttttagaagcccatatctcctaaaccgtagatcccatctcagtgaaacttggacccaaattcatctaagttcaaaccctacattttgatactaaatttgctaatttaagattttatttgaattttcttaatttatttaaataccatttgaattatatatatttgatttaaacttatatttgaattttcaatttaaacttatatttgattttcaaatatttccttttatcccaaaatacctattagccactaaaaagccgtcagttggaactttacgccttccatagggacgttcgtgtggtctatgggcctcgacgtcataccgttggttgtaaatcctggtagaaccaaatccaaggtcaaagtgttgctcctcgcaccccacgcctcgatgcatacagtggtcggagcttcactattccctcgacctccacaacacgctgcacagtaagctctcgggctctgtgtgatcctagccgctccgtcgccactcacagctgtcgaactaacacttccgccccgctaaacctgcaccagcctcctattcctctagccgatatgttgtctgttgacaccggctagagaagatacaaaacctagtcattatgctgcccaactctagcaacgactagcaaacaaccaaaccctagccaatatattaccctaccttaataacagcacaaatagttaaaccctaattgccatattatcgaaaatccacacccgttacaatatcacccatttaccatttcccatattctacctcacctgaaccatacactctccaactacctagaatctatacatacaatataaatcctagccgatatgctatcctactccacaattggctcaaatataaccaaaccctagccattatactacccaaacctaccaccagctaatattagccacatatctgcttaaccagttctattatccagtatattccctactctccaagcaaccaaagcccacacatgaaatttaagcgacattagttgcttaattccctctccaccttacacccctaaccttccaaacctatatatgatatataagcctagtaatccctataccttacaaaggaggtagattataccctaaacctagcctttctcaccattcatcattttcttgttattttatggcttttattgaatttggctcttcctcttctttagtagagtttattatattttggaggcaacctgtggcatttcaaggatcgggtaatcaagttgcttatctcgaatttatttgcattggagcaaggcaagttattattcctccccttcgaacaaaattatcctatattctatatctccattatcttatgcattagtcatacatgattttgaatgcataacctgaacatagaaaactagatatatgctagctttgcttagccctacctagttagactatgcataaaatataatgaacttagattggaacggtacgctagaaaagaaatatttcctcgtggctagtactgtttcaatcgacataggccttgccaagtacgtgtgaagaatgaacgagtacgaccacaattctcgagtgggtatggacctagcggattaagttatctagcaaaggtggtacctctgtatagtggttctatatttaagtcctcgagcagggtaattgtgatatttaccgaggtgcaggtaaatatattgattatcttgcgagctatacttttgtgaaaccctgattgcgatgacgtggtgtcatacaatcagttctctctaaagaccccaagaacgccagaactcatctcgctgctgataacgcacgttcagagcgtatgaggattagagtttatggaacaggtaccactgatgttagtaaccgaaaagctgggccatgacaagactaatgtgtttggcacgtcatggattgcgggtaaagcgtacatctactgcagtatgaatattcttaaaactattcgaatagccatgctcgtggttatcaagcatcgggactcacaatggcatcttggctataaacttaattccagattttattaaataatgttgcatttcaaacattctaggttcaatacttctacattctcggccttctgcaagtaaacctagccttactcaaatataattattacatgtattcattacttgatataatagcttgatgagtacattgtattcacccttgctttaacccttctagagttgatttgaagttcttacttaagccgggagttcaatcatataagttagtcccatttaaacttagtttccaagtctagcatagttagatggtttaattttatagcaaaatagtagagttggttcattctatagcttctgctgtaatagttagcaacaatcttgtaaataacctattatattttgtaataaaatatcctttgaaaccttcttcaaatgtatgcaacgaagatccagattgttgaacttgtatcaatctattgatccagggcttgatacaaaacatgtcggttaccgaatcttaaattttgagacccgacagtgtgatgtgtcatgaggtcaaatccacgtacaaatctaatgaaattacactaagaacaacgagaaactgcacgcacgaacctctcccctacaagaataaagagtgatcagcaagaaacaagcacacgagccgcacgcactaatctcgacgcaaaatcataggctgaaaattcgacagatttggcaaaaaaaatatctatcgacgcatatatagcaaaaccgctgttttgcccttaaaaatatcccaaagagatggcaattcacttggtcattggttcttttcacatctaacttgtgcttaatgttgattagctgatccatctttgttaagtatgattcgctcgtagacctctactcctgtcgtaaaaacatgcctggcgtcttgcatgttgggaatatatgatatgcacacacacatacacaccaactaataaatatgatcaaaattttttgaagaatatatacgtacattttcaatagtattatatatacatgtaaagtctcatcgtcaaatttagtatacatacataaaaaaaagataaaattctgacaaactcaaaattgccataatttttgtttctttacagctaaaatataataaatttgaggttaaaattttacacataggcataatacttttgaaagtatatgcataaatttttttagattttttcacgatatttgttagttggtgcacatgaagcgtgcacgtgaaatttatgtccagatgatatattcccgtcttgcctatcaatatataggtacggtcttttaatttcaaacacaactaccgccaccactttcttttgagaatatttcaaaaccaaaaaagatttatataatatgcttgattttcatatatcaaaatctaagtatttaaaaacattaaaagtatagtaatattcaaaccttgtaaagtgtaagatcgaatcccaaataccaagccaaccagagggaaggtgaatggttgtaacaccaaaaaccaaaaactttaagcggaaattaaagttaccctcttttcgatgtagatcgccgccatcgccgctgctgtcaaaacgccgccgccggtctgaccgctcgagctccccggtctgactgcccagtcgccgccagtctgaccggtgtatattcgccggttggaccgtcgcctctcgccggttagaccgcccgtagtacttcggtctgaccgtcgagatccagaacaacaccggtaaaaacacttgaagatatagatcaaatcacacgactttattgcataaactagtgtttacaaagtgcaaccacagcactcctctccacaatttcgactaatatcaaaaccctaactcaaagctctaaaagcttgatctaaaactccatataactcacaccaagagacaacaccctgcccctctatttataccctcatcacggctgcccctagccacgaatcctactcatacaagaagtcctaatctcataggaaacctcccatacaagcaacaaactcaacactatccaaatttggactcctaccaaatttgactccgctttccatacacatacaacaccacgtgtacgccatatggaaaccttcacctctacatgcattgttctctagcctgagcatcccgcatgatatcctcgaccgtctagacctcaacttctcccaagcctagtcttgatccatcaccggctatactcccatagcctcaagcaacacttgcacgtgaacaacaaagaaactccatatccgagtgcaagttatccccaacttgactcatattagcataacaccagtatccacacgtatagaaaccaacttaaagtcaaatccacaaaggaaacatccaaatccaaatccaacaagaagtcggctcactctgtcaactctgcctgtcagaccacgtgccggtcggtctgacacctccggtctgaccggccgccttagcccggtctgaccggtacacaaccgtcagcacaaacactattcaccgtctgaaaacatatctccgtattttcacaaacacttacctttgacaattgttcatcaccaagatcatcacatgatccaacaatctcccccttgatgaatacattggcaacgtctccaaaatgcaatttagtgtttttgaaaaacgaaaacaaaaacgaatcaaaaagctcagacggctcaaaaatcacaaacgtgacgaaaagaaaactctcccctttttaaaagaaagaatttcccatatttgaaagaatttcccatatttgaaatccaaaacttcaaaatcaactatttttaaaatggaagcaaatcaattctccccctttcaagaagcatgcattttgtatgtttctccccctttgacaatgatttcatcaagaatgcaaaagagaaataataacaaatatatcacaaatgcaatatttttattttctaagttttttatcatcgagagctttaaagtataccaaaagcaattcatgatcatgttttgcaataacaaggagataaatttattaactagttaacaagcatacactatagtataaacatgaatcaaaaatattacaattaagctcaacttagcaataaagattcatgatttcaaacgatttataatgcaacgtattcacaagcatataggttgaaaaaataaacatctatacatatacacctgctgcatttatcactctttctcaaataagctttagcacaaaacaatcaagagaatttttaacttttatttgagcttctttttgctcatattttttctctcaagactgtttccaaggattcggcacccattatttttgctcacatcgaatacgtcctcaagactgtttccaaggattcggtattcattattttctctcatagatattttttattctcttgtccaatgaatatttaaaagctatttgaggaataacaaatccataaagcatatatatataaacattcatcattcaatcaatatgctagcatcaatattgcatattttcttaattcaagtaaaataattagtgtcatgcattatctcacttaaaagcaatatttaagcttcatgaaaagactaaaatgcatacaagctaacatagcaataaataaatctcaactattttgctagcatgcacaagaatatactagaggtataaaacaaagctctctttttatcattatatttattttcatatttctaaacaaatgcataaaaaataaacatgaatacatgaaaaagcacaaactccccctcaaattaacctccaatttccctcgaagaaaaatcaagaagaaataaaagatttgaaaaagacatccaattgccaatgatatcaccaaggttctcatgaattgacatatattcatttgaattaaccaaaactactatctcacaaactagcacatgaaaagctaataattgagaaagtagaacaaaattatgtcaatccaaaattaccttgatgttacctttaaaagcaaccgtcatctcaacgttgaacactcatggggagtatgcccaaaaatacctacgaaagagaaaatgtcgaggcctccgtgttggggttagaaataagaaattttggaatccaacactgagtcacacgaccaatagaaccagtaggtacatatgcacgaacaaaatcagaatcagacttacctgaaaacttaccttgaggcttcacaaaagtccgatttaaattacacgcaaaatagccctgaggccggtctgaccgtcgctgtccctgcggtctgaccggacctggctgccagtctgaccgtcggtacacttgcagtctgaccgctggccgtgaccggtctgaccaactggtcagtgtcgatctaaccgagctcctcgatccaaaacccgatttttgccaccgttgtttagcaaaagcaatttctctttcttttttctgtttatgagcaagtctaaaacaaaacccaaccaaatgtccatcttttccaaaaaaagaacaagtatacttctcacgacaagaaatttttgcagtagatggttttgaaattgatggttttgcaaaagactttttctcttgaatcattgaagaaagagaagccaaaatttcaccgaatttaaaaatcgttttcttttgttcgggttttgtcaaaacagcacctttttcagttatgctcaaaacagcaggttggtgatttgtaaaataggcattagtattaaaacctacaccacgattgaaagtgctcacttttgattgatccaaaatcatgttaagtttctttttaccatctgaaaacttttccaaagaacttttcaaataaaaaacttcttttttcaaattaacgcaattttcacaatcaaccaaaacacctttatttttgcgacacttagaacaagaaagtacttcatcttgttttacaatatttttgtcacgccccaaactagccccgagcagaggccagtataaggcgatccaaattaacctgtatgcctgtaccagtcccaggaaatagcgctggtacaacaggaagacagaatatcacaacaacagcggtctctttattaagagtaggattacaaccaaggttggaactgcggacagaacccgagttcgcaacaacattacaaaaaggcggaagcggaaagcggagactagccctaagccacaagcaaagccttggggaaaggccgaaaccctactactgctcgaagtctgcttgctcctggaagaactcttcatcagccgggtccacctcttcgtcttcaagaactgggggggtttaattatatagagcaagggtgagtatgggagtactcagcaagtcaggggaattaagtgtttaatgcaagcttcaagggaaagccagttgtttttcacaattgattttagtttaagactttcagaaacatctaagtgagtgcttctcaacggcgcggacgagaaagtgcgtctcatccggccggagcagtgaaaatgtgtcgattgattcttgtcggcacgagaggctcccagccaatcgtttaccgacccggctgctccaacagccacacgcgagaggctccctgccaatcgctcaccagcaccggtgcaccaacagccacgaatcaaacacgtcggaacaagaggctccctgccaatcgttcaccgacaccggctgctccaacagcctcgaatcaaacacgtcggaacgagaggctccctgccaatcgttcaccgacaccggctgctccaacagcctcaaaccaatcacaaaagggaaaaactcacacaccaacagcaatttccaaagtgttcactaaaactacgctaaggaatcacctcacatcctcccatgaccgtgggcacggctgttcgaatagttattaacctctgcagaaggggtacactttacccacacgacgttactaaccccgaatcacccagcccgcgactctcggtcacgtctggcgaccttgaggctttcacgacaaggcatttcgaaagccgactcagggtcatcttatgccaactggaggggtcccacggaccaacaccaggttaggtcccagaccatactgtgccaggaagcccaggggtcctccccgacaccaccccagcgaatccacttgtcccttggcagcaagatttccctggcctagctaattactcagccaggggcgtcccatatcacccatgtggtcgtacttgacatatgctcggatgtaattcccaaggaatcggtccttagagcgagaacggacagaccgtacctccagtacgtcttccgtaccgcgagttttagaaactcactttattttcaaggcaccaacccaagtgtcgggttttccaagcattttgtaaactcaagttttacccaggtgatcaattttagagtttgaggggagtctcgatattcgtacgcgaggtgcgaataccgagatttcacctgacgggtgtcaagggtgttagggtattcaaatatcaaggaaggtgaatgcagcaaatgggtagggcctgccggttgtattgcaaaccgaggccaagtgccaagtgtaacctagttaatgcatagtttgcggaaatcaaaatacttaatttaaactataggttcaattgatcaaaggtgacttgccttgctcgagatcttgagcttcttcctcgaaatccgcgcactgcgggtcttcgggctccgagactacacgcagaacgagacgactcaacaaagcgataaaaagaagccctattaaagaccattaagcatgccattggatagatctcgatttttgagaaattttggaagtggaacggagtcaatcggacgatcggttgagaagatatgaatttccgaagattaaaggattttctggaaaaagaaaaggaattattaattccctggaaaaagaaaagaaggagggatgcaatttagatttcattttgggcggctaagggcagcccaatagaatggaatgtacgcggccgaaataatgggccgacggtccgaaggagtcggcccacagccgagtggcgcggcctggtccggcctcccgagtgactcggggccgtccggcctcccgagtgactcggggccgactgggccggaccgagtgactcgggccgactggacacggaggccgagtgggccaaggaggggtgggaggccgagtggcccgaggccaactgggccgagcgggaaagaggccgagtggccgagtggagaggagggggccgatgggccgcggcaggccgcgacctacgcgggcggctggtccggtggaccgtgtccaccgcgcgggcgctagggcggggcccgcccggtagcggcacagtctacgcggaccgagcgcacggaggggaaaagagggagtgtgccggctggcgcttgcgtggcgcctgcgtggcggccacgtgggccggccgggcgaatgaggggagaaggcccgggcgacggcggcgacggcagaggggctcgggcgacacggtgcgaggccggagaggggaggggagcgcaccgggatggagaggagagatagagggagtgagccggcggctcggttcgccgggagaaggccgacggcgactgacgacgacgcgcaacggcg

SEQ ID NO: 1251 - DNA, 7642 bp, Oryza sativa
gctttggctgaacttcattaattaaactagctgggtggcccacgcaattgcgcggctagcatccatataaaattatatatttttttaatatgattttacttaaaatttattaaatagttatctcgttgtcttaagattttaaaagaccaaaccttatcatccttgtgtttctaattttatagtttttaaaagtcacaccagttgctaccccttacttctgtcatattattctttattagcttgcttgatctaccactatttctattcattcttctttgaacctttaaaaattggatgttaagacttatagtttttagagtttattgtcctgttggtcttcttttgtataatttctagaaatcccgtcaagcgctgtcattatactcctctacgatcgtccactgcatcttctctttattgtcattgctattttaaaaatcgaacataattattgtttaggttcatttttctactttccaaaagtttcaccaaaacgtcaacgactttgtcactgtactcctctatggctccccgttgctgctcttctttattgtcattgagatttttaaatcaaacatggttatcattagggtttatttttttactttttagaagcccgaacctttaaaaatttgaccttatagttcttagagtttattgtctcattgggttttatgtttttttatatttttttagaaatcccgtcaaatgctgccactatactcctatacgacccgtccgccgcatactctttattatcattgggattgtaaaaatcgaacataactatcattgaaattcattttttaatttctagaagacccatcaaccatcggcggctctgccattgtagtcttatatgacccacccattgcctctcatttttattgtaattgagattttaaaaattaaatatgattaccattgaggtttatttttttactttctagaagtccccgccaacccccatgaccgattgcttcacgacctgtccgtcgtacttccttttaatcgtcattaggattctatttggtgttttattaatagtttttagatgtctcattaaccaccaccactctattcctctataggcatattacttaattaatctcgtcatgtgttttagatactcttttctttcaatactcaatagtcttaatttttttatcaccaatcttagttatttataaattgtattcctagttaaaatcttatttttcttttttctaatttcagaatttattttattttttgtattgtgttcttttcatatttttatttttttattttcaattttagctgtttcaaaattgtatgcctactttaactctctttttaatttgcctaatttcggatttttattttatttttttattctgaattttaattaatctactattcggttcttatatgtactcttatttctatattacttatatttaattcgaaattttagttaattttaaattgtattcctccttgaactcttattttattttcttttttctatttcctatgttttttatttttattctgaattttaattaatctcgtaatggattcttgtatggactcttctttcaatattccttgtttttaattctgaattttagttatttttaaattttattcctacttggactctcttttttttgctaattttggattttattttatttttattccgatttttgattaatttcgtattgggtttctatatgtactcttcaatattgcttactccgtttgaatcttcagaacatgtcaatatattttgccaatcactttgcattgcttaatatatttatcatattttattcagtcatagatggacggggaattctgtaattagttttgtattctaattacctattcagctccaacacatactatatgcaggcaacgtgcatgtccgattcctcgtcaattaaaatattgtaattacttctcagtttcctattatgatagaataggcttagcttagagcagtagtttctattcatattcatattcttcaaattaatctacaccgttaaaatctagtcagtttgtgatctaaaggtttaatattttttgttttttctccgattaatgtgggaatttttagccccaacaacgaacgtggtaccttcttttaagactgttttaataatataacttgttgggtggcccacgcaattgcgcggctagcacctaaacaaaatcatatatttttcatatatttttcagtatgattttacttaaaatttattaaataactatttcgttgtcttaatactttgaaatatcaaaccttagcatccccatatttctaattatgtagtttttaaaagtcacaccagctgctacctttgtcatatcgttctttatttgcttgctcgatctactactatttatattcattttctttgaaaccttaaaaaattgtatcttatagtttttagagtttattatttcgttgggtttcgtttttataatttatagaagtcccgtcaaacgctgccattatactcctctacagcctgttcactgtcttttctctttattgtcattgggattttcaaaatcgaacataagtatcattcggggttcattttttactttctataagtcccatcaaaccgtcagtggctttgccattgtattcctttatggctcacccgctgcctccattatttattgtcattgagattttaaaatcgaacatgattatcattggggttttttttactttgcagaagttccaaatctttaaaaattggaccttgtagtttttagagtttattgtcttgttgggtttcattttttataatatttagaagtcccgtcaaacaatgccactatactcctctacggtccatccaccgcctacattttattgtcattgggattctaaaaatgaaacataactatcgttggaattcattttttgttttgtagaagtctcgcgaatcgtcggcggctctgcaactatactcctatataccccgctcgctgcttctcatttttgttgtcattgatattttaaaaataaaatatgattatcaatggggtttattttttactttttagaagtcccggcaaccgccttgcccgtttgcttcacggcccgcctgccgtccctccttttaatcgtcattaggattctatttggtgttttattaacaatttttatatatcgtatcaaccgtcgccattctactccttttataggcatgttacttaatttatctcgtcatgtgttttagatggccttttcttttaacaatctttattttttatcaccaattttagttatttataaattgtactcctaattgaaatctttttttcttttctaattttaggggaaaaaatgaaattttaattaataccgtatagtgttttttgatatttttattttttttttttgaatttaagttgtttcaaaattgtattcctacttgaactttcttttagtttttctaattttagatattattttataatttattacaaattttaattaatctcgtattgagttcttatatggattcttctttcaatattgcttattttcaattacgaattttagttaattttaaattgtattcctacttgaactcttattttctttttctaatttcagactttatttttatttttattccgaatattaattaatctcgtattgattcttatatggactcttctctcaatattccttatttttaattccaaatttcaattatttttaaattgtattcctacttggactctccttttcttttctaattttgaattttattttatttttattccgaattttgattaatctcgaattgggttcttacatggactcttctttcaatattgcttattttaattccgaatttcagctatttttaaattgtatttctacttggactctctttttctttttctccgattaatgtgagaatttctagcctccacagcgaacgtggtgccttctttcaaaactgttttaataatataatagatagatagatagatagatagatatcgtttgttcctatgtcattatctagcatgttttgagggatcaatgattaaaacgatggagaatgttagtcatcgttctgctacatcgactaatttttgtaatagaatgaacccttctccacttttataatagaatgaacccttctcttctcttacgtaccctcttcctcttcaatctaaatgtgtggattgagttgagtgtggtcaggacgtcacactcctgtttgttcctcaatagtttttatgttgtagacacgtggtatgtttttttccatgttatagcctcataaagattatggttttgtaaactttttctactgtatcaatataaaccttgtaccatcttgtgcggttttgtaaaaatatttattcattgtacaacaggacgaaaaaatatttattcattgtacaacaggacgaatttggattacagcgtagagtggaaaattctgcatattgatgattatcaattgtacctgttgcaatgccgtgtcggcatgggttatagcaagaccgactaataataaagctggccaatggaaaagataaactccctctatcctatgatacaaggcatattaaacttgacacggtctctacaacttatctttgatctataatttctcatatattataaggtttgtaataacaaaattataagcatatgaaaataaattcaaattgccaatccaatggtataatttttagcaagtaaaattcaattcatattatactaaatgtagatcaaaatgttttgaaggtagaatcttaaaatgcgtggacgctttatattatgggatggagggagtaatagattagttacacacacacacacatatatatatatatatatatatatatatatatatatatatatatatatatatatatataccatgtcaattgtcgcatcttcccttggataatagtagagctcactttctactattagctcatcttaaagccaacatatataatagattagtttataaggttggttataattttcttcttctctctccatctctcacgtatttgtttttaaacttgtgataagattagctcttacatgagagtcaacactcttaattttttactacctctatcttctatctaaacttataaacttataggaggtttatagctccctactaagtagacagcaagtggccgtataaaaagtccaacttgagttcgtcgcgattccagtagtttgaccgggcctatttggttttccctgacgccgatgcaaccttgacagattaaaattaaagttgtggtctagcagtctatggtattacataattgtttccaacattgctcactctattacacaagtgggataagagttgtaattgtgtacactaatcgatttattttatgaacaaatcatgcattagcaacttgcagattcgaaactgaaagcatatttatggatatgtacggctgataagttcttaaccgtcccggtgggggaacccttgaacaccaatccaatataagatatcttaatctttcaactattaaaatcggtgcattttagctttctcggtggttttgagggtgccttcggtgacgtgacgtctacatgacggtgtgacctagtctttatcccacatagtgcttacgtgacattagaatttaaaaaataagcaagagaattgtcgatagaattaaaaaaatacatggaacttatttgtcattaaaaaaatattataagacccactgacatatgggcccccatgtcatcacttctcttcctcctccctctctacgtatatgaagacttgattcacctaccacaaaagctaaactaggatgagagcggctgcttctttccactccccggcgaccacccataccgcttcttctttgcctggtcgtccaacgaccctgagctgccgccaatcatatcggcgccggacatggacgcaatcctcggtggcgcgctcatcatcttgtgactggtgttggtgctgtagtgctgcatgtaaggccggatgcggcgcgcgcctgcttggctcggctcggtttagctcgttaggataacgagccgaacgctaagttgttagctcggctcgtcttgttggtaagctcgagccagctcgttggtaaaattgcaaggctgcacttcagtaagcagctagcacatatcaagccagccagcaagatggcagaaacgcataaagcaaatgcatatccataatacgatgttccaatccatagcctatcagcaattcacccaagaagtacaaaaatatcaaatagtaactatgcaaaattgcaaatgtaacaagccaataaagcaaaaagaaaaaagcaacaacagatcaagtcctcagtattgacgccaatgaaagaaggaacaaaacagcaggaatacaggcttgctcgacgttgacggtctcagtactgacgccgacggcagcgaggaaattaaggaggcttagggtcttcgatcaaccatttgccgatgcaccttgattagaaacttggtggcgccgatcccaatacctccaggatgctagggatgttcgctcgtcgcgcggtgcaatgggcattatcaccaccaaagcagtctattcctcttcccaaaattcgccggctctgtgccacaatggcaagtttatttgggacaacagagctccgcctcgagtttaattctttgcctggcttattgccaaggatcgcctccccacgaaggttaatctccataaaaagaacattgtgcaatcccccaaatgcaagctttgcagcgatgaagacgaaacggtgagtcatctttttcttcactgtccgttcgctgatgaattctagagatctctcaacattcaccccggcatctcacgcgtgcaagatctctcaggtctagtcgctcctaggcagctccccgctaaacacttccaagttttatatctactctgtttctggggtttatgaattcatagacatgatgttgtttttcgtgatctgcctaaatcactcctaagaatggtagcaaaatgtatggaagacgctaatctttgggctgagtgttttcgtagagaagacagggtagttgtgtcaatttggaaggatcttctctcttcctccgtacacgtcactcgtcatgctaaggtggttgatgatggcgctagctgcgcgtgtgtcgcagttgcgcaggcatggtgcgcatggctggtgtagaccgggagtggttacacagcatggcacatgcgctggcactggacacatggacgtggccaagagaggacgttcctggcctagggttgatcgacgggggcgtcgatctctcttaaggggggacgtggccaagagaggacgttcctggcctagggttgatcgacgggggcgtcgatctctcttaagggggtgagggtgtaacatcccggtctagggcttaataggattaatagaatactcatatcaacaagttgcaacttcttttccggaagccaatctccaaagaacttcagggttaagcgtgcttggcctggagcaatttgggatgggtgaccgactgggaaattcttcccgggtgcacacgagtgaggacaaagtgtgcagaacagacatgtgttggtttgtgagggcagtctatgacctatgaaagctatca

SEQ ID NO: 1252 - DNA, 636 bp, Oryza sativa
ttctcctcaccggcgtcatcctcctgccgccgctttggctgcaagcgccgagcgccagctcgcgccttgaccgttcaatgccggttcccctctcccaaaccgacattgccgtccatttaagcccaagccccccctccaaactccctcatttttcgcctccgcgccattgccgccctctgtttcgccgtcgccgatcgtcgttgcgcgtgtgggaggagccggcacgagcaaggacgcggaagaggactccggccgcaccctctccttcctcttccccggcccgaggccggagagattactcccgcgccgtcggcctctcatcacagcgcccctcctcttctcggtgatgtctctctccgttcttcctcctcgctccatctccttcccctagctttcggtagtagcttgagtagccttcccgtagttagccggcgccgccccgaccgttgccgtcgctcgccgcgtgctcgccgccgtcgccgcccgagctccgtagcacccgcttgtcgccggcctcgcttggcgtagttccgcccaatccgacgctagcatcgagttcccgaagccgcgtagatgctctcaccggcgggaatcgacctctcgtggcctcgtcgccgtttccctcttctcccgccg

SEQ ID NO: 1253 - DNA, 500 bp, Oryza sativa
attcctcgagcaatttcctcgtcactggcgctccaatcgcctcgatgggcttctcctccagatacagctgcagatcctgggcgggcacaccgttgagcgtcacctcgtagtgcagattgcactcgttgtcaatggacatccaggccatgccgacggcatgtggattctgtgcatccgtgtgctcctgtcgcttcagcagaatgggtccgccgagtcccgagcatcggccactggacggggcactaggcggccacggatcaggctcgtctcatgctcggtggccacattaacgcccagttcgccggcatacagcgactcgaggaccttgggacccaacttctccacactaccaatggcctggttgaagttgaagctcggcgtcagatcctccagcttggccttccgcttgccctgctcctcaatcaaactgatgttgggcctatcccgggtgttcacgtgctccgtttcgatgttgtaggccagagatccatcggtgttca

SEQ ID NO: 1254 - DNA, 4691 bp, Oryza sativa
acatcaatgccacgtaggcgaaaaaccagttgaaaaaccattcgagggtgtaaagtgaatggtattgaaagttcgagggtgtattatactcggttttgtagtttgggggtgtaatttgtaccagcataagagttcgagggtgtaaaatggacttatcccaaaaaaaaaaaaaatctcttctcgtcgtcctcttctccaaccacgcgctcacgccgccagccggccaccgcttatccccttctccagccgagcgcgccgtctctctcctcgccgcgccgccgcgctctcgtcgtcgccgccggtggcttccggaccttcctgggtgggtgaggagatcccccacctcctccgccgccgctcatcctgctgcttccgccgcatccgttacgcacatcctctttcccatctctctctctctctctctctttacccacgcatttttcttctcgaatttgcgttaaccctagcttctgttctagaaatttgccttaaccttaatactaataacagtttgatggctcccaaaaaggtttgggggttcaactgagcagattctgttcttgttttggcgtgtatgcatgcatgtgcggcgtttttaccagttttcaatctctgaaatggatatgtgacctttatttcttctgaaaacagatagctaaaactgtccgtacgcattgtccgtgagggtaatagatgatttgctagtttggtgaacaggaatttgcagtgatttttttcatggagatacttcacaataacggtatgttcattattgtttcaaatagccttgctttctttgtagtttcatttgtatagctggtttcttatattcaactttggatccttaattcaggtttttgcgttagcttgatagacatcaacagaatcagaatgaacaagttagtgaaggtactgattctattctatatttaaagttaattttctttcagttacaacagggtggtactttggcttgaaaacaattatgaaatcatgtgtaggttagccatattaagttcttgagtatcctccactttgtaaaggaagttactgatcctactaattggtaaccatcagaagtgcagttataacctgtagcataacatgtaggattgtgtaatttccaaaaaatggcatattcttaaaaatcatgaaaatgttagatatctcattattgatatgtctgctgaagaatcaaggatcttgattgacctaatgaaatggtagcatcagttaacacatgctttattttaacttgaaagctctttgtcctgcatccacccaaatatgaagataaatgatgcatccttgtcattttccattgctgatgtctcaggcagttgggcctgttattattgttccccttcagcctgcacattattgttaactgttttattagcagataatctcacagaactaattgaaactatgttcaagaagctagtattctcataaacaatcctattactatggtggcactcaatactgaatatcacataatggagaaattcctagcagttgttcattattctttcttgtttgcagtaaatcactgttgcaatggaaaatgtttaagcgtattctctttgttcaaatgctgtgatcagttataaattcatcctttattttcttgtctcaggtaggatcccgtcctcgtcaaattgcttggggaatgtcaagaatatgctgtgagcagtctcctggtacttccagcaagagatatgagaggtatcaaagacaaccacagaatgttgatctcccagaattgctcccaaagaagaaaaagaagccatttcctgttccaattaagaagatgttgcaagcttctcgacaagataaaaggcttgcgcgaatgcgaatagagaagcctcttgagcccccaaagaatggtttgcttgttccagagcttattcctgtagcttatgaggtccttgataactggaaggtgctcatcagaggtctctctcaactgttgaatgttggtacagtttatggttgcaggtaactaaggaatgctagcctgttccatcagttgtttacatgtgcaatgatatttgtattttcttgtacataggcatgctttaatatccctgtatgatggtatattttgccaagtatcctgaacttatgtcatctggctggtggtttgtagaaaatgcccccaagtccatgttggtccagttggccaccagatccaagattgctatggaacaggaagccaacgtcggaatagccatcactcttgggtcagaggatccgtcaacgatgttctcatcccgattgaatcttatcatcaatttgacccatttgggtggagagtcaagcatgaaaccaggttttgactatgacaggattccagccatcgttgagctatgcattcaagctggtgttgagttgccacaatacccctcaaggcgacgaactgctcctgtccggatgataggcaagaaagtgatcgaccgtggtgggtttgttgacgggcctaagccacaccgttcagaagactgcatatctctgcttgctgaacttgacacattcagcaaccagcaaggccagtcatcgacgccatcaaatgtggaagagctcgcggagaaaacactgaaagcatacttaaatgtccagcgaggtgttgcacggttgatgaggaaatacacagtaaaaacatgcgggtattgctctgaggttcacgttggtccatggggccacaatgtgaagctctgtggggctttcaagcaccagtggagggacggcaagcatggatggcaggatgcagtggtggacgatgtcatcccgccaaattatgtgtggcatgtccgtgaccccactggccctcctctcagatcctctctaaggagtttctacggcaaagctccagccgtggttgagttgtgcgtgcaggcaggagctgaaatacctgaagagtaccggccgatgatgagagctgatgtcgtcatcccagactcagaagaagctaggttggctgcatgactacatttttctaccctctgcacctcttcagctgtccagagtccacatagaaccaaagggctgtataatataatggtatgactgaaccattatcaatcagagttgcaatagatccatatatgtggtaaaataatcacaccaaaaggtgatcctcgaatatcctgtcttttgtccgccttttcagcgatactgttcaatcatatatttcttatgagccattggttcgtcactttgcaggttaaacgcatgaaccgaggatgcgcggcgacaatgctgaaagtgagaaaggatggccaatggaacatgtatgatgtacatacccattttgtttaatggttgaagctgctttattctttgcctatgctagactgtgaggcacttccgatggctccatacttggccatacagatggcctcccctttgtctgctggtactatgcttaattgtcagctgattccttggattaaactaatcacggcgatttgttcgggtatttgtgcgcttggctgtaattaatcatggactgaaaaaagcaatgcacttgtgcccgtccccagatcaatccggagtatggctacagcctgcatgtaggagtacatcaggttatcagtttagtgtgctgctacttgctatgtgtactactatgtataaaaacaagtcaggagctacttgtactgttgtactgttgctactcagtttgaaacagatcatttaccagagagtaaatttcactttggaccatctttattgaccaaaatttcacattgggctagggctaggctcatgtttttacttaacaccatgtataattaccattgtttgcactttggacctggttttatagttaccattacacgaattgttgtctaggtgcttagcattttacaagaaacaatgatatggaaatttttgccatacaaatatgcttagcgcaagaacaatgattgtaacatgttaaaggatatgctatcagattaatgggacttcattactactacatatgaacattcacaacccttatactagagacaattggagaaatattgagtttaagaactatttttctagaaaagatattacatgttttacaatacccaactgtagtgttagtacaaattgttgaattataagttttctaacacaaaatagaaatgagatcagatctacaatcattatactatgtgtaatttgtgaaacccggtccaaagtgcaaatgatggtaactatatatggtgttaagtgaaaatataagtctaactctagtccaatgtgaaaatttggtaaataaaggttgaccaaagtgaattttactctttaccagattattgtcgttgattatctacttgattataaggattacttaaatattttgagaaatagcttagaacaaaacaatccgtggtaataatccggtgaataagctcatgttcatgctatgttgagctacatgtatcaattggatggtgaagaagcgatgcaaaagatcgatggtatccctgaataacacttttttttctctaaataagttaagtactgcttccatgttcttcctagaagtaaattgcatgaaccctaaaaccatttgcaattacagcttgtgcaaaccagtttgccaactgcccaactaggtctgcttccaacttataactagaggagcaaataggcattgtgatgaaagaacaaccttctgttgcaaacccctt

SEQ ID NO: 1255 - DNA, 673 bp, Oryza sativa
taagtgcctagtgctgccaataaatatggtattcgtaatacataaatgtaggagggtaaaagtgaataattggtttatatggtgcagacgaatcggtgatattgaaaatggaagctcttcttcactggcattcatcagtaacatgacatcattgagcatcctgtatgcataacttttcatccacttaattaaccaaattaatgctcagaatattgatgtaatttgaaccaagctggttagatcttataacacataacattttatttttttgcaggattttgaggaactgtaggatatctgataatcttgcatcattagacttttcaaagtttgcgagtttaagcttactgtaagcattttgtttctactataaattgtagtcaagcatcttttgtgcaatatattttaaatgtattgcgatggaccatacattgtctaatgactgctttaccatttttttttcttttggctattacagggatttgagttttaacaatatcacggggatcctctagagtcgctgttgggtctgaattcttctgaacttcttgtatggattatcttgacttaaaaaacctatttctttgagccaaagatgaaagacctatatttatgtgtcttgctaatgtttgcaagttttacatgaccagatttcttgggaataatagtcttt

SEQ ID NO: 1256 - DNA, 2641 bp, Oryza sativa
ttttcttgtcttgctttcaacaccaatcctacattctttttccttgaaaatcaacagtactgtgggcatcaatgcgttgtctggacctatccccaaggagcttggcaatcttacaaatcttgtatcgctgtaagcttcaatcttgctgttctgaacttctgataagcagtaagcttttttaatagggtaacactccaacatagttggcgaatgtagcaatgaattttatttttgttaatgtgtctttccattcgtgaaaaaaattgaaatctatatcgtggaagagggagcctgacacaataatatgcctttctcatcatatattaaccaaccttttttttaaaaaaaaaaatcagcacttccttgtgaatattttcctggagctaacctatttaaaatcttatactctcagggcattgggctcaaataattttaatggatcacttcccgatgagctgggtaaattgacaaaacttcaacagctgtaagttatccgtttggtcttgttttcattttattttatatgatcatcagtttttgtttgttgtttagaggtgataatcatctgcttgaatgaagttgtatgtctgaattgtaggtacattgatagtaacgacttcagtggtcctctaccaacgactttatcacaacttacgaacctgtccaccttataatttcgcaaagcagtgtttgggattttattgtttctcatgaaatttcaacaaataattatggacaccattgtcattgtgcatccaggtgggcattggataataatttcactgggcaaatacctgattatcttgggagtttgaccaacttaacccaactgtaagatctatctttggccaattaccgatatttaaccccttttttttctaactgttctcttggcacaaatagcaaggaaatgctgtgcatgttttgctagcatgaaatgtttatgtgaaatgcatcttgtttctcaagaagagctagaatagtccgcgttgcttatttatgaccaaacatatgtctatttttaggaggctccaagggaactcttttcaaggtcctattcctagaagcttatataatcttgtcaagttgagaagcttgtaagttcctagtgtttcagtgacaatgactgtgtttttgttgcaaacataagcttatggcagtgatagaagcattgattgtcccaatttaacagaagaataggggatatagtaaatggaagctcttcactggcgttcattggaagcatgacatctttgggtgatctgtacggcactttcacaccactttacttctcgtaacagtttaagatcttaagaatttaactttttgtctttcagtgtcttgagaaacagcaggatttctgattcacttgcatcagtggacttctccaagtttggaagtttaaatctactgtaagaattttcacctatcacaaaaatctccgacaagttttccatgccgttgtctaactcattattgttggtgcagggatttgagttttaacaatatcacaggtcaaattcctccgtcaatcgtgaatcttccttctcttacttttctgtaagtgctggtgcagggattctaccttgtttttgcaacaatgtttttctttttgctgtgtgctgatgtttgcaaatatcttattccaaaacatgtttgagtcagatttcttgggaataatagcctttcaggaagtctgccagccatgaaaagtcctctgctttcaaatttgtatgttcatattttccttgtatgttcccattttgtttcaatgatcaaaatatgtatcgatctaattctaaaatatcccatgttacttttcagagatttttcatacaaccacctctcaggaaactttccttcttggactgcccagaaagatttacaactgtatgtttcatggcttgaaacttctgtatatacctctttacgattgaatatacaaattacaaagacagaaaaatctaaaagtgatatctgatgtgcattttctaaggaatttggtggcaaatgactttgtgattgatggcactgatatgaggtacttgccagttgctaccatttttttttcttattaagaccattagctcctttaggtaaaacactatattcatttcagcttgtaagttgtaaatataatttaaaatagtgatgtattctatctgtagtggtctgccatggggattgaattgtcttcagcggaataccccctgttttctcggttctccgaagtgtaagccttcatctctgtaactttgtgcatatgcctacttcagagaattcaaaactataaaatcgtagttgcagattactaagacttttgatttgatatttttcctccagctgcctctttcgcggtggactgtggtggtagtagaaccatatcaggctcagataatgccatgtatcaggctgataacgccaatcttggtgctgcatcatactatgtggcaggcacacctacgtggggtgttagcaccactggaagattcatggatccacccaatggaagttacataatctacagttcacgccagttcgataaaacactagattctggactgttccaaacagcaaggatgtcacatcatctttgagatactatggcattggactcgagaatggaaactacactgtaaca

SEQ ID NO: 1257 - DNA, 2419 bp, Oryza sativa
tgtagctgttttggcctattttttctagcttggatccgtgacaggccatatctatgaggtcgggctcatctagcatagcaacatcattctttagatagctaatatccactggatatctaaagctcaaatgcaagtatgatatttattatcactcctaaaacctatatgcaaatatgtcacatcaatccattaaacacataaaaacatgcaagcatatagtaattatatctacaatttatttcattttagaactaacatatacatgataaatcatcattcttaagtcattttcataatattttaatccaaattatttcattatttctcctatatctaacatatatcctgtaacaaagcacggtgcatcatctagttctttagataagaacaagcttgacttagctgataatggcctgcgacatatccacgtcgaaagaaatgagccgaatcaactactggtgggtagggttttgcaacaaaataagagtgatggtttatgtaattatgtcttttaagaaaaattgcatggtgacccgcgcatattgcacggctagcatcgttatattttttatacatatatatttacattttattataaaaatatgttaaaacggtaacataattctaaattttgtactatcttgatcaaactgaccaatgtgtaattgtatatacgtgagagttattaattatttttaattctaaattttagttatttctaaattgtattctgatatggaatttttttacaaaatgtatggcatgagtattaaaaaagtattgtgtgataatgatcagaggaattgtgtgattggttgagaagagtatatgaaggagaatagttgtgtcccaaaatataagtgagaatgatcgaagaaagtgtgtgatcgattgagaagataaagtatctgaaggaaaatagttatgtcccaaaatgtaagattttttaggttagcacgagtattatgaaagttcgatgatgcattatacccggttttgtagttcgggggtgtattttggacaagcataagagttcgagggtgtaaaatggacttctccctttttttttccttccacggccaaaataggcctcgttttacgggtccaaattccagcccatgtatatctctttttttaaggaataagttcatctgtggtcccttaacttgttgatgaatccgattttcatccttcaaccgcaaaaccagatatagtgggtccctcaactgtcaaaaccagtgcagaagaggtccattagcggtttggacagcggttttgtctgacgtggcgcctgcatggctaatttgacttggttttcagctgatgtggcaatgacgtttcgcttatgtggcaatttgttccagaaaaataataaacctcatgggacccacaggccagtgccacacacaaattaataaaaaaaattggtggggccatgtgggccccacaagccattttccctctcttcaattctctctcccttctcatctactgcgacggtggcacgggtgaggaggggcggtggcggggcggagcaaaggggctccgggcggagccctcacgacggccacgccctctccggcggggcgtcggcggtggcggcctcctccggcgagggtaaattcccggctccgacgtctgaccccgcatccgccgatcagcgcaccaccaagctctcctcccccttcgccgaaagccacggccacctcaggcccacccctccctcctccccgccgcgtcgcatccccgtctcaccgccactcgacgatgttcgccgcagcctctacctcttccgcaacccccagccctcatccggcgcgacctccgccaccgcctcctggaaccccagcccctccttcgtcgacatcttccacgccaggccggcccctccgaccggccgcgctgcgaccaaagatctgaagacgaacaactgtaatgatacatctgattttgctgttcttgtttcttgtttagtcgacattggtgaatgcctgatgaaactaatggataacctttggttactgatgatgccgtggttgcatttggtttgctagtggctgcagcacagagtgtgtcggttttgatggcctttggctctcaggccataacgacgtacttgctgggaaaaccgcaacagcagttggtggagagggtgagctgggagtgttgtacatttgatgcattttgttgtttagatgaaatcgcagtgaacagcagattggttggctcgcggggcccttcgccgtcgccgtcgacctcctcgcgccgctattcaccgctgcggcatagacctgccaacgccgtggtgttcgacggcgtcctcccgtgggctgccaccgcggcggctgggctccgcatcccgcggtacgcgttcacggggatggggtgcttcgcgctctcggtgcagcgagcactgctg

SEQ ID NO: 1258 - DNA, 3996 bp, Oryza sativa
gatccccatttgttgataattacttcatacttcgtattggggatttaggacttgcaaaatacttgaacaacattacgttctctcagttgacatcactttgtagttcgtcatatataggagtatgcctatgtaatgttatagtttatgtaaagtatagcaagatttgtcttggttcacacacactaaacaaacttcatgtcagcctcttgtacgactttgttctaagctatccgttaagtttatttttttaaaaaaatatttaatttattcatataataaagttgaaaatccatgtcaataatctatttcaatatgaccattcttcacaaaacaaaaatcacaactgcaatcagtgcaattctagcaattactttgttcatcagacaaggagaacaagcaatacatactatcattgcctgaactcttttaaggcaatacatgtttttttgacacggattaaggcaatacaccgtgtcaaaaaagagcagtttagtacttgttaacacagatacaaaagagcagtttttgagtattatacaactttctgcatggaggacacctcaagaaatccgcaggaacacaggaagtgctacaatggaatgtgcatgtatgcttaattacacagaccaaaatttgccataggtgtaatatttcagttcccagatccctgttttgggatgcatgactgggtccatttacatagtgatattgaggatggccagcttaaattataatgatctatttacaaatctctggcaatttgttgtttacgtctatgaaagaacaacgattatcttccaacagttacatacttcctgaaaataagtggcgtgaaatagacattgttagtccatcagaacatgaaatgccgccttaacagagaaatcagaattcgggagtaaaacaacctgcttgtttaagagacaaaaatagactgaagcctgtgacaagcattcaagaatggttgcggttaagcatattctggaaagaaatgtacaaatctttatgttctgttccaaaaatctcttctgcctttgagagagtgtcctgcgcaaattcatcaagtacaacaagaaaatcatgtttacatattttcgcagaaaataaccaactgaaaagtcaacaattataaacgggcaatatgctacctctcgtgattgtttctgagcattgaactccttgatgttagctaaaaatgccccaaattgctcatacgaaagtcgtgtcctgggatttgtgtccagaagtgttaggatggaatcgaaatattaattttcacataaggtgaacagcataataaccaaccgtgcttgccggaaaaattcctttccgtctatacggggccgccctggaaacataaaagattttgtattatcagcatatgcatgttcaacaaatctccccaaatgaaaataagattcaacaactcccaaacctgcgaacgaacgatgctgaggaggggaggtgggtgctgaatactgatggcttgacgatccatgccatgatgaaaatgttgagtggacttctgacagagattttgtaggtgatgttggaccagataagaacttaggtgttgaaccaggagttaatttaggagctgtgtatggtgtgactgagaactgatgttctgtaaatgtttcatagcaagtatatgctgatataagatgtgataagttgataatattcaggtgttcgataagagtaagttattataaccaccttgggctgattcagtcattgtggatctgctggaactatctgcagaagtgcgactacttgaaacttcatctgccaagtaaaaaatagtgaaaccaaggaagatgcatgcaattctggctattacttgaagaaaagacaatattataggatttccgatgaggttgaacaatacctttccaagagggaactcgagcagtcaaattgttgtttgcatcaaaatcacggtcatcacctatttctgacaattgctgcaagattatgcaaataaaattatttacgcacatgagcaacttcagaaaagcacagcatgaaatattcaacatatagaagcattttcataagtaatactcactaataaattgtcttcactcagtgacttcatcaactgcttcttaaatgcttccaactgcatagaaagagtgatcttcaacaagcagccaactaacatacaaattttttaatgctgataaaaaaaaacttgacaaacttcatgtcgattagcattctgacaaaatcataccaacaaatatgaccatttagggcaagaattcgagaataatttgaaagccacaaagggtgggtaaacttagcagttatagcttccacaccacagtgagtcagtgacaacaaagcattagttagtcgttgatcctgttcttgtttcttttgaagtataatatctggcaaaaaagggtgaccttctagaaacttcttttttcataattgtggactctttaacaccaagtcattctgctattccattgtaatgcacaccaaagattatacatttgaacaaaattcctgactcactattaatctacaactaacaattaaaagatattccatctgatcccataaaacttcggtacacggttgaccaacctatgcaaactgcctactactatgattctaggaacacctgcaagaaaatcacatatctagcaagctagcaaactaacactgaaagtacatgggttgagacatgattccagcaagttttgcacgaaataaacaggcgagctatcaatcagagcacggataaaaacccactagctccctagtataagcagcaattgaaacttgaaaccgaacaccatgttgagaaatcacagaattctcactaaaattgggataattgagtcaccttcgccaagttcctcgccatcttcttggccgtggaggcgagcgagtccctctccttcgccagcttcgcctgcacaccacgaatcgaacacaaaccaaactgagtacgcatcccaattctgctgccgaaagcatcccagcgacgcgaggtcccaggggctcacgttctcgtcgagggcggcgaggaggcgggcgtcggagtccgcgaggcgggcgcggaggtcggcctcggcgcggtcccggtcggcgaggtcgcggcggaggcgcgccgcgtcggcctcgaggcgggagacgcgggaggcgatggccatggaggtgatcttccgcgccacgtccagctgctcgtacgggtcggtggggatcacagccaggatctcgtcgggcaggtggaagtccaccaccccggccgccgcctcgtgcctcgccatcgccgccacgcgcgccccacgagacggagcagctcggccggtcagttcctggacggcggcggcggcggcggaggttgctgcggtggtcgccggcggcggcgcagagcaagactggaaattaaagttttttttttctgatttttaattctttttggggatttgatggggataggatggctgtatatacctgtatactgcggggtcgttgagttgggacttccaagtcattttctcacacatatatgctcttcatttcctcttattaattctccattttctaattttatttttttttgttcatcaatgtgatagttgagggttggtacttggtaggagtgacctgtataaaaaaaatatagagagagagtatatgctttgatggctcttgtctggaattgtgttaaattaaaggtgtactagtaagagatactcttataaaatagttatatctttttaaaaaatgaaatgcacatgagaataccagaatattttgtcttttcatacatgatatggtagtataccttttttttttttttggcgagaggtagatacaggcatactaacctgactgaaaagaaaaatagaaagaaagagagaagaatgggctacatcatttctcgttgcaaaccacatttctgggctagggcccagtatggttggtgggcctaacacattcggcccggtgcgtcagagtgaatgcccaggt

SEQ ID NO: 1259 - DNA, 2161 bp, Oryza sativa
aatatttgccggttatatggcaaggcccaattttcccgatcttcatacaacttagttaaccattcctctcctttgaggctgtacttcttgattatcacattccatatctcatcaaactcctggtcatcctcgatatcaaacatgcagtggtgaaaatcatgtgtgaattcctcaagagtattaaaaacatgttctaaggacttaaaagcattctggtatatttgccacacacaagaacggtgaattgtaccaggccaggtgagactcagggcttccttcaaagcagcagatcgatctgtcaatatcgtctttggctgtttcccacacatggcactcttaaaggtctcgagaagccacttgaaagattcaacagtttcatcatacagaaaagcagagccaaatatgattgtttgcctatgatggttcatacccaaaaacaaagctaagggttttctgcagtcatttgatctgtgtgttgtgtcaaagcagatcacatcacagaaataatgatagtctactattgatcttgcatcagcccagaagacatttgttgctttatcattttcatccacctgaatggcatagtaaaaagagggattatcactcttcattcttcgaaaataatccattagagctccaaggtcctctgaattcatgtgtgttgaagacttggcccgaatgtaattcttgcatcctggaggaatgttactagcatttcggtttcctggttgaaccttggtcaacactctctctgacttcagcatatctatatcaaatggtgcagcaagctggtgattgtgatcttccacaaattctgctacccggtacttgccattggataccaattttatagctatccgtgcaggacaacctgtcctagtctctgggcgaggtcttttggcctcattctttgagcgaaatccctccctagagcatacaaagacccttgacctagcaacatttttcaccgttttatcccacaatccttttcgaacactgaatcctacatttccagcataactagcataatactcatatgctttctcttcattctcgaaaaccattccaactatgggcactcctccagcgttagcaataacttctggcggcacctctggatcttcttctggtttatctacagtctgggaggaaacgataacgtaagtgcagacaaatacacaatgtcatacatctaccacagcatcaaagtgcttcttggtcatttgtaccaagaatgtttttccctaccggtattctgtaaaaatcctaaaatcagactccatttgacatgattgtgcaccaatgctactaactccaagacatgctgaactcaatgcgcatctacattagcctacttgacacttgcaatatccaaccatgaaagccgggttttcagaagccgttggtgttggtgtagaagccgggttatataaattcccattatctaaaaaacaaccatgaaatgcgccacatggaacacacgaaatctctcaaacaattctctgagaaatcaatcagaaaccatggatccccggtctatataccttggcgccctccttgccgaggaactgccctctcgcaccccgccgcctccgctccgcgagagcctgcctcgatggggcctgcagccaacaatggcgccatcaaaaaataatactaataatgatcaaatttctatccatctttaacctaaactcaaacgcgaattcttccttcttggcgatgatatggatcgaggagctcaccttggcggtggcgcgcttgacgcccttttggccgctccgcttctgcatgtagcggaggacgatgtcgcggcgctcctcgtgcgtgtagcgggagacccggacgccgagctcgcggaggagccgcgtggtcgtgggctgcgccgccgacgatggggtcgccgccgccttcccgccgccgtccttcccgtctccggcatcgggggcgccttggccggcggcggcggcggcgggcttggggtggctcttgggagcggcgcggcgcttcttggggttggaggagaggtcgaggtaggtgcgcacgatgtgggatatgcgggacgccggctgccgtggctgcgcggatgctgaggacgacggcgtgggctcgccggcggcggcggtggggtcgccggaggtggaggcggtggccatggtgg

SEQ ID NO: 1260 - DNA, 771 bp, Oryza sativa
gaggatccccggctacatagaatctgcagcatggttgcactcttagctttgaccttaggctattacttcattagtggacaagaatgtcaaatgctgaaaaaaaaggcataaaacttctcgacaacgtcgatagtatataactcacttgggttaattgattgtttccgggaaatgcctgctgttgcatggttggaagtgaggaagcctacagtaagccacaagaagctgatgaatacgatacttcaatagaatgagatatattttttaaagtaatagatgatcacatacctgaccaaactgattcaaattgttatgaagattctctgaggtaccaagcccatagctctgaccaagtatataatgcccctgaacaaggaaatcaacacctgtaataaataactgttccacagtgatgaaaggaacatctaaaaaaaatactgtcttgaagaaaaatcaacctgcattaattgatctgggaggaactgatttggagaattccttgcttctgactgcctgttgtctggtgtcatattcagttctccatctcttgttccagtggctgcttcatcagggtgccttgtgtctagcaacaaaagaaaatttacaaatttaattttgcaattataaacagttagaacttgaaatccacaaaaaaattggagtcccaccttttcttgttttctgcattttattagttaccacagcacttttatggcgataaacttcagtcttcttctttccagtagatttctcaacttcattgctactatt

SEQ ID NO: 1261 - DNA, 3333 bp, Oryza sativa
ttcacttctcctgtgttcttgttgttgttcgtcagagacgctgatcgaatttgtgtttcgtcagagatgcttaattttgtgttcgtgtgcatggattttgtgtttcgtcagagatgctgaattttgtgtttgtgtgcatgggatgttgcaggcgtgctgaggacagagatcaacccgtcgctcgacaaggtgaccgtcgtcggcgacgtggacagcagggtgctcgtcaagaagctctccaaggtcggcaagatcgccgaggtgatggcgccgccgccgtcgtcaacggcggcgccttcggaagaaggcaagaagagcgacggcaatggcggcgagaagccgacctcgccggcggacgagaagagcgccgcgcgcaaggacgaaggcaaggacggcaaaggcgacaagtcgtcgtcggcggcggcgtgcaagcaggaatgcagcaagtgcacggccgggaaggaagccgccgacgaggctggccgcgccggtgggaagacggcgtcgtccaaggacacggtcacagccaagaacagcgacgacgtcgacggcgacaaatccgaaccggcggcggtggcggtggagtaccagtaccaccaccactacagccggccggagccggccatggtggtgccggttcacctcccgtactacgccgcgaacgcgacgccgtactatgccggaggatactacccgatcccgccgccgatgccggcgatgctccgtcaccctcctcagctccggccgcagccgtcacgcttcgacgaggactacttcaacgaggacaacaccgtcggctgccacgtcatgtgaaaccgcaaaacacgccaagctcctcctggctcccgccatgtacaaccgatcgatcaccaagaaatcagcgaccaccattcgtttcttcaatctcaacacacacacacacactcttcagaatgcatttgccgtttaatcaaatcaaccaaacaaacaaaacagcaattaactcgaattcgatcatccgtcatcttcttcctccctctctttctactccttaaaaaaaaagaaagaagaagaaagagaggagggcgtctcgggtgtgttcgctgctgatgcatggaaatatatcatctaaccatggaaaacagagcagttcattagcgtgtgattaattaagtattagctatttttttaaaaaaaatcaatatgattttttaattaaattttgtacaatttttttttataaaaaacgtaccatttagcaatttaaaaaacgtgcacccttgagtccgaacacacccgaatcaatcaaccaaccggcaaccgaccgacgaaagaacaagccagaaagccggctgttgcacgattccgtcactgctgctggcgtcctggcctactctgtacccggattcgtgcatgcgatccaggccagcaaaggacgaacggccggcgacgagcgaacgccatatggtatatgaaaaagatcgccgaatatatgatgccgcgctcgcccgcccgcacgcacgcgccgagccttttgtttattcgggggacggcgtcgccaccggctttgcgcttgcttgcgcgcggatgagactggagagttgatacgagccaaatttcgcacctcagattatcaatagcgacaaccaaaatttcaacttaaaaacagtaaatttcataaaactgtaactatagtgataaaacttgcgacctatttcagtttactgcaacgatagcgcaaaaaaatatcataaaactgtaacttttatgtgacccaaacttaaagttgacacatacatgtcttgtagtagcactggcacaccacataaaagctacaaatttgcttatcgttgcagtaaactgaaatatgttattaatgctgcagtaaactgatagtcttatacaggtttctgcaatttactcgtttaaaaacctaattttataattgatatgattttatgattttttttagcttttaagacgaaaaaaactcgtatgtggagtatattttatctataaattaattttaattgttaataagcgttacggcttatgagtgaaattataggcgaggcgagcgataaagttgggcgagggggggatcaggggtaggtagcccgctgctgccgccgcgctgctttttgccgaattctctctgttggctcattctacgctcgtactagctcgggattcctccactgaaactggccatgagcttagctgcaaaattcgacgatctctgcactccaaattcgatgatctctcgctcgcacgaatgattgaattgacccgtcgattttgctgttgcaacgaccggaataaagcgtgtggggggcggcggcaaaaaccgggaccgcacgtacgttggtacacaacacctatagcataagtctctcccagatgtactaaattttctttgagagggactaaagtcgctccttcccaaacaccacataagtttaagtatgttttagtttccaactttttcttcaaacttttaacttttccatcacatcaaaactttcttactcacaccaacttccaatttttttattcaaatttttaattttggtgtggaactaaacacaaccttaagctaagtgggcggttttctgaatttacaatgggggtggtgctctgtggagggaatgatgatgataggtttaggtaaatttaatcgggatactagcagatttgcagggagtcaaggcgtgatcgcatcaaattcgatccaaaagctggggacttgttagtgaaaaaaagagattcaaatcagagcatggaattttcgcataagaaattgcatggtgttccaggaatttctgtagtgcgattgtttaggtgaacaaaataaacgcttaagttaagtctacgcgttttataattaaaaaaaaacagtctaaggtttttcttttccaggtttggtactccttccggatggagggaattttaacagaattgttcgctgtaatggaacagattcttgtaaatgttttttgaaatttttgtattcttaaagatcccttgtttgacatacagtaatgtttgtttaaaaagacagaaattacgtaaaccatctcaattgtcatccttattttgaaatttcacctcataatccattttattttttttaagaaaacaccctccacattgcgaagctgaaattactctccacccccagctacccctgcacatgtgtagctgttttggcctattttttctagcttggatccgtgacaggccatatctatgaggtcgggctcatcgagcatagcaacatcattctttaaatagctaatatccactggatatgtaaagctcaaatgcaagtatgatatttattatcactcctaa

SEQ ID NO: 1262 - DNA, 874 bp, Oryza sativa
tggcatattcagttaaatctttaaaacatgatggaagtacctctagcaccaaacatggtggatcattgcccaaagtttttttttagaaaatatcaaagcatgcatcagcatgtcacagtgatgattttttttttcaaccagaagaggtataccgatatatcttagatgactcccaaatggcgttgtgaacagttagtataacagaaatatagaacgaaaaaaaattctagtttagatcagtacttggagtagcgctcaaagctgatattgcaggcccatagtagccttgatgaggaatgcagcaagtacccttgccagcccagaagagatgaatctcaaggaaattttttgtcacagggacaacatactgcttcttaacaacagtgaaagatttccctcctgctgcctttcttatgtcaaagttctgctccttacgctccccctatacaagatacaaaaatgaagaaaaatagttttgatcagagctaatgagctaaaagcatcaaataccagagaaattgtaagtttgcaggccacctgaatgtagatgtcaaaaatcctcctccctctgctcctccaagactgcacatcagggaaatccacctcggcaaattgaaagtggggaatgtagttcccattctcgagtccaatgccatagtatctcaaagatgatggtgacatccttgctgtttggaacagtccagaatctagtgttttatcgaactggcgtgaactgtagattatgtaacttccattgggtggatccatgaatcttccagtggtgctaacaccccacgtaggtgtgcctgccacatagtatgatgcagcaccaagattggcgttatcagccctgatacatggcattatctgagcc

SEQ ID NO: 1263 - DNA, 1545 bp, Oryza sativa
ctgggcaaagtaaagtcgaccaatgcaagttagaacatatccgtcaatagcacagtaacatagaacagtcaggtgatagatcacttacaatgtgccagcaacttttatgcctgcacgtgagttttcttgttatcatagagcttggcaagcccaaaatctgaaatcttagggttgagaccggcatctagcaagacattactggcctttatgtccctgtgcacgatgcggacggtagaatcctcgtgaagataagctatacctcttgctaggcctaagcatatctcaaatcttgttggccaatccaggttcaagcttccctttcctgaagataaagtttgatgttttaaaattttggcatttaagtaaaattccaagtcatgtaaaaccaaataaacttataccaaacagtgcttggtcaaggcttccattctccagatactcataaaccaacagcggcgtattgctctcaaggcagcaaccatacaatgtcacgaggttacagtgttgtactcgagatatagtttcgatttctgtagcaaattgctttttcccctgattagatgactgagagagctgcttcactgccaccgcccttccatcacttaatctaccctgcaagaaagttgcacttgtcaactatgcagggcatttcataattcagggagttaaacaagttatgccgatgaatgcacttgaaaaggcactagtttacaataaaaggcatatctcttgagttttgactttcctgtgtactaatatttaaattaccacgaacttgctttcggcaaccaaattcaaacatgggatgcaaatccagaaatttactacacaaacagaccttgtgaaccaatccatatcctccttcaccaagtaggttactagaactaaaattttccgtagctgaccttagctcattataactgaagacatttggtcttccaactatgttgtacagctctggagattaaatcacaacaaaacttgttagcataacctccacgtcaagttgaagcacacaacgtgacactggtatatgaaataccttctagctccaataatatctttctcttcttctgtctccatataaagtgtccagcaagtgcagccaatgcaaaaactgcaacaccaaccataactacaatgatcacagcaattttgctcctgctcttgttgtctgcagggctacggaccgttgggatgaagtctggagaaagctaactaagtcagagcatgaaaaggttcaaataaaacttaaaaaaaataatatgtacaactacaaaacattgatcatgtgtgttttgatatttatatgcgtttgaaacatattcattcaacttaattcatccataaatttaagagggatatttatatattggtcttatagccaaatattttgctggcacagactgctaacttcattacagaggcttttgatcattcactttagaattgcatattcagttaaatctttaaaacatgatggaagtacctctagcaccaaacatggtggatcattgcccaaagtttttttttagaaaatatcaa

SEQ ID NO: 1264 - DNA, 4491 bp, Oryza sativa
agcaaactaaatatagccatttttttagcaacattaccaaaatttagtaaggttaaccctggcatcaaagtgaacagaccctaagtttcactttgaactactcctaactcaaagttttcacataaaactaggtatgtttacctcttttgcactttgtaccaccctctctatctctttctgctcccgccccagccacccccatttttaccactacctgaagcttgatcgataaggcaccgctgagttccttttctcccacgctggtgagcttctcccagtccggtttctctctcgtgtccacgtgccttagccacatatgccgctggaccagaatgaagcaggggcaacaaggcagcgaacaatttcaccatcgggtcagaatttaatgaagcaggggcactccagcgattctgatgacaactgaaggtggagatggtggtgggagctagagatggataagacaaagatactcccttcgtactctaatataatagattttggttaaatatatcatatcctagtataattattcttcttaacagaaccgctataggatacggggttaaataaaaatgaccatatacagtctttgatatgcacatgctctacccttagagagtcactctagccaaaactccctaagttattagcatcctgacctttagttcttattgagctgtagaaaattattttgaggtgtagatgtcacatatgagagtgacacgtactgtatagccgtaccaaaataatcatctgataccgcggaatttaacagcaccttatccctaacgagttatgctgtaagcctgtaatcaacggagttatcaaaatcaatattcttttgtcctaaaatcatcttagcacacacaccaaggacaactaattctacttatcatccatttaaacaagtgattcattactccctccattccaaattgatctacatatttcataggtacaccaagaccaagaaaaactaataactctctcatactatatttactctagcaacaaactcgatacatgcaccatccccaacattttctagccaatagcaaatcaagatattacatatgtgctataaatacttgtgtgcatggatacatgcatcaatatccatttactccaatgcacaaataacgaatagacttaataaataaacacaaatatgtagatcatttaggaataaccccagaaaaactagatgtagatcaatttagaatggagggagtactatttacatttctcgatgctcatggagccaaacttgtgtgaaagaatgaagagtcacgcattaaattccataaagtcattaagatgatatgttgttggattgaaatatacctatcaaagatagatttttcagatttggaaatatgactatcaaaaatagatgaagagagtaagatctattccatcatagtggagcaaatttcgagattaattcataatacttcctctatttcatattataagattagacatagatccattaacatctatataaatattgataatgctaaaaagtgaaagtaggatttttctttctggagaacctgtccaccacaactccacaagttacaagctactacacaagaccatttcccattcagcaatcaagtgtcaaaagctacttacccccatccatgaccatgaacacgcacgcgcccgcgcacgagcttatcttttgccaacgcttgactctttccccagtttcccctcctcttcaacagccgcaacccgcatcctcatgtggacagagagacccctgacccatcatccccgttccaaacaaaacccaaaatacggattaatcattagtttaatattgcaacaaccgcgcacatgtttagtttagccacttctcgttggccgtgcgttgcatctgggacaagctggggcttcttgcttcttgctcgctcgctgctgttttacactattcacgtttaacatttgaccgtttatcttatttgaagattagtatttttattgctattagatgataaaatatgaatagtacttaatgtttgactaaatatttttaatttttttataaattttttaaataagacggatggtcaaacgttagacacggatatccacggctgcacttaatttgagagggagggaggcagtagaatctctcttttttttttatacagttgacagcagcgtcgccgtttgatgagcagtacaacaattttggtcaattcagaatagctgactgtgtattgtgtgctgcgtgcgtatatattgtctccagtattcgtcgcagcgcgcgtccctttctacgcccgacgatatcatccatctcacccgtcgtcaccgcctcggctcacagcttctcttctcccagaaacggagaagagggggaggaggcgagcagaaggctcaaggagggagacgatgagggtgatgagccatctcctcctccatggcggtgtgctcctgctgcttcttgcagcggcggctgttcaggctcagcgggtagcaaccaagactgatccgactgaaggtgagcacgcgtgcccgcctgcttcgattctgatttctgaatgaaacgagagttcttttttttgggtttgtttgagaagcggttcgtcctgatggagctagttatgagaatctgtgactgtaaggattccgccttcaaattcgactggaaaaatccgccttttcgggagttcttgccttgagattcttgtttttttttgggataatcacttgatgataatccatctctgctttgctccgttttggcttgtgctgaagattttccgttgttgagcttggattgaagcttgccatgagaacacctgcatcctaattttgaagcctgcaactccgcaagcatgatgatcctgttcttgagttgtccttccaaaaaatttcagttcacgacgccgtcgtcactcgtcacccaccgatcgacatgaactttttttaattattggccgttgaccttcgttttttaagtctgaaaccatggcatgtttgttcaagctcgagccatttcggcgtcttgaccgattgctggccgtccgatcgtcgcgacccaggccatcggacggtggagaagttccaaggatatgctcatagttatagcgtggttggttggtgttttgcatttgcagcggcggcgctgaacgcggtgttcgcgaagctcgggcagcaggcgtcgttgtcgacggcgacatggaacatcagcggcgacccctgcaccggcgccgccacggacggcacccctatcgacgacaaccccaacttcaacccggccatcaagtgcgactgcaccttccagaacaacaccgtctgccggatcaccaagctgtaggtgtcgccgtccctctcttggcgcgcgcgcgccaggtgttcgacgaattgcctgcctgagctccgaggcgcccgatgcgctaaatgggatttttttttttgctgtgatgcaggaaaatatatgccttagatgtgcctggcacgataccacaagagctgcggaacctcacgcgcttgacccatctgtacgaatgaactctctctctcaacttccttatgttggattgtctatggtccagaaactattgcatttgaagcacaccatacggctgattgatagatgcaatggcaaagttttccatttgccgtcccgcaatgccattcaccttccagtatttctgttgtcatcacagtacctcttttgcattcctatagaatttggtcggtcacttatcattatctaacatagtggctactatttcttataagctgcattgtagtagtaagttaaaacttaaaagggtacttctattatttacttttctgaaagaaaaaaaggctaccttctcttatttcagctatgaaatgatgaatataactggaaataaatctattttagtatttcacaatattaatgttgctgatatctggtgtggtcttatttcaggaatttagggcaaaatacattaacagggcctttgccatcattcattggggagttgactaatatgcagaacatgtgagatttagaactcacaaacatcattttagtaaatgttttgctttgcattgaatctcaccttttctctcttgaacacacaaggacatttcgcatcaattcattatctggacctattccaaaggagctcggtaaccttacgaatcttgtatcactgtaagaactatattccatgatttcgtgacccttattcttcatacaactctaccatacttatgaccgtgagaaataatagatatatttatgctttgaactcgcaccttgaattgatcatctgcataaaaatcatgagatgaagcacactttaaattgagaacatatggcaacatcctcagaattgcactattcaatgatgaaggactccaaattgtgatgaatgcacaaatagcatcttcatttgttgtggtattcttgtgtactactaagacttggatttaaactcaattgaaggcaaacttttccgttgatagtgttcgttg

SEQ ID NO: 1265 - DNA, 4186 bp, Oryza sativa
atacaactctaccatacttatgaccgtgagaaataatagatatatttatgctttgaactcgcaccttgaattgatcatctgcataaaaatcatgagatgaagcacactttaaattgagaacatatggcaacatcctcagaattgcactattcaatgatgaaggactccaaattgtgatgaatgcacaaatagcatcttcatttgttgtggtattcttgtgtactactaagacttggatttaaactcaattgaaggcaaacttttccgttgatagtgttcgttgcaattgacaatttttatgtgactaaaatcatcttttgggttgaattttcaggggtttaggctcaaacaggtttaatggctcccttccttcagaactggggaacctggacaagcttcaggaattgtacgtttctagttgggacttcgtttttcttttttttggtctacctaaccattctgattcttggactactcagctcaatgtttgctgctactcttatctctcaattgcaggtacattgacagtgctggcttaagtggtccactaccatcatcattttccaagcttacaagaatgcaaacattgtaggattacaaaaggatgtgtttcttgttgacattaattcttccgtgccattaaacattgtttcttatcctcctatttcttcaggtgggcatcagataatgattttactggacaaataccagattatatcgggaactggaatttgacagacctgtaagaatcctatatcctccgttcattaagccataataatttttgtaacagataattatttagacaataggaatgttgtgttttcatattgttttaaataatatggtcatatgggtacaattttcaataactttattcaagtcaggctttaaatcgaggaaaattgtaggtgtgaacatgagatgcattctaaagctacttggctcatgtgatttgtgaaagatagtttgtttttctcgtttctagagtatctttttacttgactgtgctgaatcaccctataggggtctctttatttaagtttggatgattgttgagcgttggtaaatgatgcatctttcttctgtcactattcatgatgagatggcttccaatcttgaaaagcattattcagctttgaatatattttacaatatttatgtattcaccgtgaaagaatctgtactttagcttcattagtttagtttcctttttttaatcaaagagttcttcctgctatcatttctagtttgatgtttcagtaaaaaagatgatttgaatgactagttacagctatgatctgtaggcggtttcaaggcaattcttttcaaggtccaattccttctgctctttctaatcttgtccaactatcaagcttgtaagtgcctaacactaccaataaatatggtattcttaatataaagaatgtagaagggaaaagtcgaataattgttttatatggtgcagacgaatcggtgatattgaaaacggaagctcttcttcactggcattcatcggtaacatgacatcgttgagcatcctgtatgcataacttttaatccacttaattactcatacggccgtactactgctcagaatattaatgtaattcaaaccaagttgattgatcttataatgcataacatatttctttgcaggattttgaggaactgtaagatatctgataatcttgcatcaatagacttttcgaagtttgcaagtttaaacttactgtaaggattttatttctacaataaattgtaatcaggcgccttttgtgaaatatatttctatgaaccgtacaatgtctgatgacctctttgccacccttttttttacttttacagggatttgagttttaacaatatcactggtcaagtaccaacagccctgttgggtctgaatttgctgaactccttgtatggattatcttgacttcaaaagcctatttcttggagccaaagacccatttatgtgtcttactaatgtttgcaagttttgcctgaccagatttcttgggaataatagtctttcaggaagccttccaagctcaaaaggaccttcactttcaactttgtatgttcatatgatccaagtttgtttgaataacatgatgaatatttgtttaatttatttctaacgatgatctggcatctccctgatctcagagatttttcttacaaccagctctcaggaaattttcctccatgggctagtgggaaaaatttacaattgtaagtaccaacttctgaaacatctatccattagctccaatgaaagggcacgtttcattccctgaaatataagggcatgtctgacctatgttaggccagcatttatgcgtgtagcatacacatgtgacgacctagcacatttggtaaatatgaaagctgtatttgatgcatctagtttatatgtcttaacaaatttttggatctatcatctatagggcacttataattaagattttttgtggaaatgagacttaccttacaacttagctcaaaattgaatatttttatagcttttttttcaagctagaccaaacaagctctaaatatgctatggaaatatgaagtgtggaaagccttttaattttagttctgctaattctacttaggaatttggtggcaaacaatttcgtgattgatagctccaataacaggtgcgtccacatttgtaatttctcatcaagtactcaagcataattattaggttctccaagcttctaattggatgcaaaatgttggtgttttgcatctgcagtatcttaccttcagggcttgcatgccttcaaagaaatacgccatgttttcttggttctccacagtgtgagtctttcaccctttgcaataccatgaatgtgcttagttgataaacaccaaatctgcaaccgcagatttacttagtcaatactaatactaattgatctaatttgtttgcagcttcctcctttgctgtggactgtggtagcaatagactcatatcagcctcagataatttgaggtatcaaactgatgatgccagccttggacctgcatcatattctgtcacaggagcaccaacctggggtgttagcaatgttggaaagtttgtggatgcaccaaatggaagttacataatctacagctcgcgccagtttcagaacaccctagattcagaactgttccagacttcaaggatgtcaccatcatctttaagatactatggtattggacttgagaatggaaactatacagtcactcttcaatttgctgagtttgggatcgaagacacgcagacttggaagagcctagggagaagggtttttgatatatatctccaggttggttcttgtctagcttataaacttttttttttgtttagcttacaaccaagtcaacattttcttattttatttttttgcagggtgaacgcaaggagaagaactttgacatcaggaagacagcaggcgataaatcttacactgttgttaagaagcaatacaaagttcctgtgaccaaaaacttccttgagattcatctcttctgggctggcaagggcacttgctgcattcctactcaaggatactatgggcccactatctcagctctgagtgtaatccctgcaggtaccccccttaactacaaatcatggtcccaagatggattttctaggatcaatttttgcatacctctgtaagatcccattttctcttttcaatctaacaagtggcctctgttcagatttcacccctacagtgggtaatacagcacataaaaacaagagtactagtaaaacaggtgtaattgttggagttgtagttggtgtgacggttttaggtttggtagcacttgttggaatctttatgtggagacagaaaaggagaaaattatcactggagcaacaaggtacatggcacactaggctcacaatatatccttgactaggcaaactagaagttaataaattgatgtatatttttatgtttgcagagctatacagtattgtcggaagacctaatgtattcagttatagtgaactaaggtctgcaactgaaaattttagttccagcaaccgccttggtgaaggaggatatgggacagtttataaggttagttcatctgtaagtacatatatatattcgaagtttcgaacttgttatggaattttacctacgaattaacttattaacgtctagacaag

SEQ ID NO: 1266 - DNA, 7045 bp, Oryza sativa
tttttctgcagcgtgaacgtcaggagaagatctttgacatcagtaaggcagcaggcgataaatcttacactgttgttaagaagtcatataaagttcctgtgaccaaaaacttccctaacattcatctcttctggcctggcaagggcacttcctgcattcctggtcaaggctactatgggcccactatctcggctttgagtgtaacccctgcaggtactcaccttaactatagataatggttccaatatgaaaatgatgtattttctagggtcagttgtaccattctgcctaagatcacattttttttctaacaagtgaacttcttgtcagatttcacccccacggtgggtatcgtggcagaacaaaacaagagtactagtaaaacaggtgttattgttggcgttgtggttggtgtggcagttttaggtttggtagcacttgttggaatttttatgtggagacagaaaaggagaaaactgacactggagcaacaaggtacatggcacactatgctcacattgtatccttgaccaggcaaacaagaagttaataaattgatgttcctttttatgttcgcagagctatacagtattgttggaagacctaatgtattcagttatagtgaactaaggtctgcaactgaaaattttagttccagcaaccgtcttggtgaaggaggatatggggcagtttataaggttagtcatctgtaaccttttcctgtgaattaacttgttaaaatctagataagtagtgattatataatttgttgttcgttatggataattaattggttacactctttgtgctttctagcttttgtacaaatgatgcatatgaataaaccagaaaaaaatatatgccaatgtatccattacagaagatgtccggcattgcaatacttgaatcttgcattttggtgaattccactttgcagggtaagttaaatgatggaagggtagtggcagtgaagcagctatctcaaacatctcatcaaggaaaaaagcaatttgcaacggaaatagaaactatatcccgagtgcaacaccgtaatcttgtgaagttatatggttgctgccttgaaggcaataatccactgctggtttatgagtacatggaaaatggaagccttgataaagcactctttggtacaagctatttcagtttgatgcaattgggattttataatttaggtttatcatagtctgtaacctaaaatctaaaccctccatttgcaggaattgagaaattgaacatagattggccagcacgttttgacatatgcttaggcattgcaagaggtctggcttatcttcatgaagagtccagcatccgtgtcgtgcacagggacatcaaggccagcaatgtcttacttgacgccaatctcaatcctaagatctcagattttgggctagccaaactttatgatgacaagaagacgcatgtcagcacgaaagttgctggtacattgtaagtacattccatctgttccacctttatgtttacaatcatatttatgttaatggtatttttgggtatcctttgtccagcggttatcttgcacctgagtatgccatgagaggtcatatgactgagaaagttgatgtctttgcatttggcgtggtcttattggagactttagctggacggccgaactacgatgatacacttgaagaagataagatttacattttcgaatgggtaagctcagtagctcagtgatgaactcttaacccaaggaaattcaaattataatttagtcgtgttattggcagaatatacccgaaagttctactttaacattgataacattaacacacatgccatcatatgatttacagttagaccctctaatttaccccttttaaatcaaaatcaaaacaagcataatttatctgattttgcccctatggtctgaatgcttccatatcaaattctcaataccttcaggcctgggagctgtacgagaacaacaaccctctgggcattgtagacccaaatctcagagaattcaacagggcggaggtgctccgggccatccacgtcgccctcctctgcacccagggctcacctcaccagcggccgcccatgtcgagggtcgtgtcaatgctcaccggcgacaccgaggtcaccgatgtgttgatgaagccgagctacatcaccgagtggcagatcaagggcggcaacaccagcttcgccaacagcgccgtccgcgggcagtcgagctcggcgccaggatcgacgtcgcagcaagcctcgtcggtgttcttgaactccatcatccaggaaggccggtgattttcacgccggtgcttgatcggatcaacttttcctcaagtggcagatgataatctcgtcttgtggagctgtgattgtgaatacacgttgcgaagggcaaatggtgtcaagactgtcagttttgcagtgcaggtcgtcgtctcgtttttcttttttttttctttacagtttgccggttgcgtttttaaaaattatgttcagtttgtttcatacctgtacagtgtaagtttgagtatatatatttttgatcgaatagcttatgtgctttgccctatttgaatgtgaataagattttgggccttttactgtggttcatttagtttggtcctgaaatcatgccgaaagagtccgtcctctcgcatccctccaattcattttttaaaattttgaaatcattcacactaaatttatatgaaggatgcttccaaaggtatatacagtggatagatatgaaatcatccctccaattcctggatgctgttttatacctacctaccttaagcccctcgactttgtgcacggttcgtgagtcaaaacgcatgtggttcagacgtgttgctcaattgactcttaactcattggtcagagctaaatctcaacacgtaagcacagtgattcaaagctgctgacgtctgtcattgaaattattcctctgttcccccccccccccacccccttttccatatatacaagtcgtccatggaaaaaaatattactgctcctaaagaaaaggatatttcaccatagagtcatgactaaatcttggaaagatttgatcaagacattgatatacattgtgaagtacttaggaggctgtttagattgtagccaaaataagccttaccaaatgttgataatgccaaaatcatcttggaaagatttgatcaagacattgatatacattgtgaagtacttaggaggctgtttagattgtagccaaaataagccttaccaaatgttgacaatgccaaaattttggtaagttgacaatattatcgagttttgtaggattccttatatatttatcaaagtttggttaaaaaaaaactaaatgtatgcacatttttagcaaatttaccaaaaaaaaatgactggtttgaaacatcaatctaaacaaccccttaattattctatccatccctaaggaatgtcttatcagcttcaagatttatcatataaaaacgatttttcagagtggagtccattaaatctgttaatactaatttatcattttcttcaattttaaaatagtacccctccttatttactcactacattaatgaaggacatattagtcttttaatcttttacttaatttgtctttgactaggcagaacaattgctttttaaggaacagaggaagtagctagtaattcattttctgttttatgtatagttcaattctcacaaaaaaaaaacacgataagcaaaccactttcacaactttggctgcacattctgaagaaaaaaaaagtctgaggctgttagttatgtgtagtgacgtttaattatttttttagggtacacgaccttatgcttgaacaagcatcttggcatatgtgaaatgtgctgaaaatgcaactgccagggacgatttttcatttcgttcatggcatttgggcaagatgttggacagatgttgcatcggcttaataaaactacctttgtttattttcttttccaactcccactaatgcgtggagaattagttattcccttgtcctaattaataatgggacaagttagggcaagccccagcatctccttgtgctagttattttgcagttaggatatcttttttgaataaaaataatatcaaaaccaaagtgtaatcctatgcatataatctcattgacgtgccaagattttactttgatatttatgtggctaatgacgtttgctttctctttctctgtcttgattcttggaggtaaatgtccgtcgcaaaaccaaattaaccaaccaaaccacccatatgacgacgttgaagtccaagttggcacactccaacagtacaaccaagaggggacaacgtcatcaaaccatacatcatgtagtactatcagttaagagacctccttaataaatatctaatccaagacactactaagtacaaatgtacacctcatgaaatgtatactagatcacatatgtagaaatctagcacaacaatttagaaattactacaagttcaaagagaaatgtgaaaaaagaaaaaaaaaagaacagtttcattaatcattgggtgtatttagatcccaaaattttttggctaaaaatgtcacatcaaatgtttggacacatgcatgtagcattaaatgtgaaaaaaaaaaccaattacacagtttgcatgtaaattgcgagacgaatcttttgagcctaattacgtcatgatttaacaatataatgctatagtaaacatttgctattgacggattaattaggcttaataaattcgtctcgtagtttacaggcgaaatttataatttattttgttattagtccacgtttaatactacaaatgtctgtccatatacttaaaaaaattttagccaaagaactaaacacggccaggccattgattagaaaatctctttcacgaaaacactggacgaagaaaagtcttctggcttcatcagagcacagtataaaatgtcattccaagctagccatctgctgaatcatatgtactatgtgatggcaacaacacgacgcatgcatgtttagctgctttaacacacactccatcggctacattagttggtcatcagaacagttgttgctagcagctttgggatgccactttgggaattttttttgaaaataatattattttaatggaaaatcgcaaaattataggtcggctagacgaaatcgcaagtttagcgccctgtcgaactgggacagttcgataggtacccctgtcgaactggggcagttcgacagggttctgtcgaacccctgtcgaactgccctagttcgacaggctagttgtagagtcgaaaaaaaataaaaaagtacttgctacagtgcccgatagggacgtatcgaacagggggagttcgatagggcgcgtggcatggacgtatcgaacagcgggagttcgataggcagtgtcgctacagtgtttttccttttttatgttattttattacctgtcgaactggggcagttcgacgggcagttcgacaggtaccctatcgaactggggaagttcgacaggtaccctttcgaactgcctccgttcgacagggtgctaaacttgcgatttcgtctaactgacctataattttgcgattttccattaaaataatattatttccaaaaaaactcccactttggtatagcataaacaaaaacagaagtggtactactagtacgtgctgcgatgcagcatcaccatgcatgattgcatctttgtttccatttgcctaggcactatttgattcagcttagtattattataatctgaattattagaagtaagctgaaacaaacaagtagattattatgctagattattataatctataagccagattattataatccaataatctcctttagaggagctttttccagattattgagtggctaaaaaacaactacccttagatgtctctaataatctagagaaacaaacaactcgtagcttattttatattagtttattataatccagtttagagtaatctgatttaataatctaaattacaataatcttaaactgaaacaaacactacgtaatactctcattactctccctcatctgattgcatccttgtgtgcattcgcctagctaattaatgctccacatcatctgtcagccactctgatccatcatcttcttcggagcaaaatccaagaagaaggggagagagagagagatggatcctaggttgagctactgttgctacctccatggctgtctctgcgagcttgtgctgctgctgtgttcttggacagcaacagatgctcaggctcagcaaccaccacctcacactgatccaaccgaaggtacacaaccacgcaatctaatggcgtttgattagcgaggagatcgaggtgaggtgaggctgatctgtcagttagtttaatttcttgtgttggttttgggtggcggcggcgtgcgtgagtgcagcggcggcgctgaacgcgatgatggcgaggctggggctgagcgcgccgccgtcgtggaacatcagcagcgacccgtgcagcggcgccgcgacggacgacacgccgctggacgacaacccggccttcaacccggccatcaagtgcgactgctccgatcacaacaacacgctctgccacatcaccagactgtatgtatgaaactgatgaaatttcttcttcttccttactctctccgtcctaaaaaagacctaacttaaataggatggtttaccatatagaacaacaaatctaatctagatgtacagatttcgttgttctaagtggtgtcccattttcatctagattagtttttcgtgggatggagagagtattgaggaattttcatatgttcatcgtgttcgtctcgttgatttgtttgatggatcaggaaaatcaacacgctggatgtggtcggcccgatcccagaagagctcaggaacctcactcacctcatcaagctgtaagccgcctgtaacctaattatttcagcttgagcaacaattgcaattttttttatttttgcgcattttctcggctcagcttgatcattgtgcataatgtggtcttg

SEQ ID NO: 1267 - DNA, 570 bp, Oryza sativa
tccctgatgaaaattactcaaaccaatccaaatctcatggcacgtttgaagatggacaacacgatcataatcagaacgaagaatcccactcaaaagaatattgcgagctttgcaattttgttcaactcaatttttgcagcatcagtattaataactttaggaatcacataaggatgagaaacttttctccaaatatcataattctcacccataatgtaagattgcatcctactacaccaaaaaaaaaaatccgttccatcaaaaacatgaggcttagttgaaaacctaacagaagtagccatggcaaaaactttagatcgataaaaatccaaagaagaaaacgaggctctgataccacttgtaggatcgaacacaagcaaccaagcctaccagaggggggtgaatggtagggaaaaccaaaaacccaaaaacttttagcagaaataaaagttaccctcaaatcgatggaaatctcgacgtagtcctgtcgccgccggtcggaccgctcgcacgccgccggttagaccgccggtatgtcgtcggttagaccgccgaacccgatgaaacaca

SEQ ID NO: 1268 - DNA, 598 bp, Oryza sativa
agagaaggcgctacccttatttaagctcctcaaacgctccgggccgtttacttggacggaggaagctgagcgtgccctcactcagttgaaggcgtatctcagctctcccccggttctggtcgccccggagccaaatgaacccttactactctacttagcggcgaccccgcaagtggttagtgcggcgttggtcgtggagcgcgatgaggacaatcctcattccgcgcacccccaccctgtatagacttggcccgggagagagcagggaggagaggcccccgagccgaacggtggcccaaggcccccgacgaccggagttggccctctgcccgcttgtcagacggtgctaggagcccccgacccccaggaaggccctgaggccactgtgggaaggccgcacctatcgccctttgaccccgaggctaaccctgtgctgactcgacccgggaaagagcagggagaagaggcccccgagccgaacggaggtataaggcccctgacgaccggagttggccctttgaccgcttgtccgacgatgccaggagcccccgacccccaggacggccccgaagccactgtgggaaggccgcccatgtta

SEQ ID NO: 1269 - DNA, 582 bp, Oryza sativa
gccgttcccgcgaccgccgctcaccatttcctccgcgcccaccttctatcccggcggcctcccgcctcagcgtcgcgcccgtcgcaacctaccggttgccccccgcgcggaggggcgggcggcggacggtgacgcccgggggcgcacagtggacgacggcgcgtgggagcaggcggtgggcgcctgatggcgatgcacgggggcaggcgatggacggtggccctgtcgcactcattggggtggggcgaggctgcggcggctgcgacaactgcggtggaagcggcgctcaaggtcctgcaggcgtacgagctgcggtacaacgccacggtggccggggtcatcaactacgcgtcgacggcggggcagcaactgctgtggacagcggcgcgtggggaagggggcgtccaccgcactgccgatgtgtcggagctccacatctcgccgcggacgcacgtcgccgccgctgccgctgccaccggagccggccgagctcgtcgacccgccgccgccgcccaccaccggcccccgcacggcgccatgcgcgccgaccgccctgagcccggcgacccgagagagaggggg

SEQ ID NO: 1270 - DNA, 1814 bp, Oryza sativa
  unsure (1)..(1814): unsure at all n locations
gtttccttcctctcccggccgccctctcccccatccaacactatttaaaccctccntgcgcctccctcgcccttttccgccccttgccgcaccgtctcctcgccggaatcgagctcgcgccgtcgccctctctctcctccgtcgccgacgacctccggccggccttctccgctcgccgggactgtctcccgccctagcgtcacctcctccggcttcgccgcaccgccgtcgaccccgtccaccccctcgccgagctcgccgaccgccggaacgccgtcgaccccgtcgacctgagccgcgccgccgccttcctccgctccggccgccttcttcgtcgtcgctgttgacctagggtgagccgtggaccgccacctcttttcccccttcccttcccctctctcggccaccgctccgccgtgccgatggccgccgccggcgaccataggggcgcgggtgccgcctcccgccggctgcgccgtcgtggccgcctttgggcgcgccgagtggccgccgcgtggggcccggccgtcagccgcccgcgccctcgggtgtggctgacgcgtggggcccacggcgccggccggtgcaagcccgggtgcgcccggtccaccgtggaccatgaggctgccgcgtgggccccactcccgtggacccggtccggcgccccctcccctcggctgacgcaataaacacttttttttaaattaaaatttaaatgaagaaatgtcacgcccagaaattcccgaatagaatttcaagcagaatgtgcattaaaatccccgtccaggaccagccggggtacacaaacgacaatgttgacattcagatccacgtcttacaaacatcataaaagtcttacataaatgcagcggaaaaacgaaagacaacaggtgctaagccttgactagaactgcagtgggaacaccactccacaggcatcctcgacggcacggacgaagcctactcctcagagacacctccatctgacacatactcgaactctggggttgggaaaaatagagcaagactgagtactacctactgtactcagcaagtcataccggaataggggtgtgatgcagggaatcatcaaagaagagctgaagtggttcatttgcataaacagaagttgaaagatttaaacagttgtaataattaaacaatatcaactatccactgtccaacgctaacccacgttgcgacaggcccaaccatccacctaaactatccaaattcaaaagattacactagggtgagcctaatcacggtgaatctggttgaccgcccataaccgcgggcacggctattcgaatagtttttactctgatcagaggtgtacaactgtacccacaagacacagcccctcgacacgtttccgtgcgccgacatgccaccacgacacaccggaaagaggccgtgacaggacccttcgcataaccccctctagccaagcacaccacacctcaggtttcacccccgtccccagcgggcaacgggcagtcccctctcgtgcctaggtgaatccggaagcgacagaggccgtcgcagggcccgccccgctccatcacgcccacccttgcctggatgcgtcgactagaggaaagctacactacaagcccagccgttgcccacgctggcttgtggtaagtacgataagttcttccagggcatcccgcgaaccggtccttaactgccatgggtgcgacctgctaaaccatgcacccacagcccaccatgtggtttattttaattaaccaacaccaaagcggtgtcactaatccaacaaagccattagaaccaatgggctgcaggaa

SEQ ID NO: 1271 - DNA, 12587 bp, Oryza sativa
ctcaccgataacggtcgacgacggtgggcgacggaggacgatggtgacggcgggacgagctccggaacctccagcgcacgacggggatggggctccggcggcgaatctctatggaggaggggtggacgaggtggacctcggccgcgcgaacccaacggcggtgacggcgcggtgcggcggcgggtgtagcggcggctagaggcgaccggagtagcggaaacggcggcggcggatgggcgcacggcgcgggagcgatggggagctcgggagagggaggcgaaatgggaaaaaagcgagagggagcgacgggggagcttaaatagggagagagagggccggacgtggccgggagaggcgggaatcgccggccgacgtgggggagtgggggaggcgagagaggcgggattcgaaaatcgaatcccggccatctcgggcgcgggcgcgagcgggagagagaggggagtgggcgcggggaacgcggcgcacgcgcgggcgtggtcgacgtggcccggaggaggcggaggcgtggacgcggcggcggtttcgggcgcggcggttgctggcgcggcgtcggccggaggtgggggaaggacccgacaggtgggccccacctgtcggcgaccccgggagaggagggcggcgggcggcctggctgggcctcggcctgcagccggcccagcagggagggggggaaaggaagggaaaaaatgggctgacggcccatttgaaaaaaaagaggaaaaagagaggaaaaagaaaaagaaaaaggaaaaaggattttccttggaattaaaatattgcttgctcaattttaattggttaaaattatttctagagctctgaaaattccactaaaaatcctgttaatgaatttcgacatgtagaactcaagaaaaattccacatgcccaatccgattattatttgcattactttcttagggttttctcttgatttgcacctgcattttcttggggttgtttacaaattaaatttggcttgggaggagaacttcggggtgtgacaaacctaccccccttaaacggaatctcggccccgagattcggaggagctggtgaagaggtgcggatgggcggctttcaactcatcttccctttcccaggttgcttcctcttctgaatgatgactccactgaactcggcaaaacctggtgatcttgtttctggttcttctttcgctggtatcaagtatacgaaccggcttctccacgtatgttaggtcctcctggatatcaatgtgttccgaatcagcctgttcttcaggtacccttatgcacttctttaattgggacacgtggaacacgtcatggatgccgatcatattggatggaagttctagctgataagcaacttccccccttcgttccaggattttgtatggccccacgaagcgtggtgccaacttgcctttcgtctgaaagcggtgtactccccggagcggagtgacacgaagatacacgtaatcccctgcctcaaaagtgagctcccttcgacggttatccgcgtagctcttctgtcgagactgggcaatcctcaacctttccctgatgattctgactttctcttccgcttccgctaatacctctgtcccgaacaattgacgctcgcctgtctgatcccagaagagaggtgtgcggcacttccggccgtataaagcttcaaacggtgccatctgtagactggcctggtagctgttgttgtacgagaattccgcatatggtaagcttttgtcccaagctccaccaaaatcaagagcgcaagctctcaacatatcttccaagatttgattgactcgctcggtctgaccatcagtttgcgggtgataggccgtgctgaaatttaaacgggtccccaattcttcctgcagcttctgccagaattttgaggtgaactgactcccttggtcagatacaatctttttgggtactccatgtaggcacatgattctcgaaaggtaaagctccgccaaccttttgcccgtatatgtggtatgtactggtatgaagtgagaaaccttagtgagtcgatccacgactacctagattgaatcgtgacccgatgatgtccggggcagtcctgttataaagtccattccaatctcttcccatttccattccgggatttgaagaggttggagtaaacctgctggtctttggtgctctgccttcactcgctggcaaacatcgcagagtgcgacgaattcagctatttctctcctcatgctgacccaccaaaacttttctttgaggtcttgatacattttagtgctgcctggatgaatggagtactgggtctgatgagcctcggtgagtatcagatccttcagttccttgtcgtcaggtacacacaatctttctcccaaccagattgtgccatgctcatcttcgtggaaatcccgggcttttccgactctcatgttctttttcaactctgctatttcagaatcgtttacttgagctgctctgacttgatccacgagcgtaggccgtgcctccagagcggccacaaacccgtgttcaacaattcccacgttgagatgctcaaactcctgccgcaattcctcacacatgccctcgatgcacagggcagtgcagtaacttttccggcttaaagcgtctgccaccacattggctttacccgggtggtagtgaatacccatgtcatagtctttgattagttccaaccatcttcattgtcggaggtttaggtccggttgggtgaagatgtatttcagactcttatggtccgtatatacttcgcagcggttgccaatcagatagtgcctccagatcttcaaagcatgaaccactgctgccaattccaggtcatgagttggataattcccttcgtgtggacgtaactgtcgcgaggcatacgcaaccactctgccctcttgcattaggacacatccaagtccgtgacgggatgcatcgcaatagacttggaagtctttcatctggtcaggcagaatcaaaactggtgcggatactaatttctttttgagctcctcaaaactcttatcgcactcagctgtccatttgaacttctcatctttcttaagtaactgagtcatgggtcgagcgattctggagaagttttcgatgaattggtggtaataacctgcaagtccaagaaaacttcgaatctgcgacacggtcttcggcggggtctatttggtaaccgactccacgttcgatggatcaactgccacaccctgagctgtaatgacatggcccagaaatttgacttccgtcgaccagaagtcacacttgctgaacttggcgtatagctggtgctccttcaacttctcgagtactagacggagatgttgttcatgttcttcttcggactttgaatagataagaatgtcatcgatgaacaccacaacaaacttgtccaaaaattccatgaacactttgttcatcagattcatgaagaatgcgggtgcgttggtaagtccgaacgacataaccgtgcactcatatagcccgtaccgagtggtgaaggccgtcttcggaatatcctcttcccgaattctcaactggtggtagcctgatcgcaggtctatcttagaaaacactttagctcctttcagttgatcaaacaaatcatcgattcgcggcaaaggatatttgttcttgattgtgacctcgttgagtgcgcgataatcaacgcacatcctcttcgtcttatcctttttctccacaaaaatgaccggagcaccccaaggtgaagtacttggtcgaatgtaccctttctgtagctgctcatcaacctgcttcttgacctcggctaattcgttggccgccattctgtacggtctcttgtaaattggagcggttcccggtgccaagtcaatccggaattcaatctctctcttgggtggcatggtagtgaggtcttcggggaacacttccggatactcgcagactatgggtatatcttcccatttcctcaagttcttctccacggtgtccactgggatttccgtctcaatctgattcaaaaagacccctcgctttgatgagtctagtgatttgtacaccacggtttctcccttctcgttggtcaaggtgactgtgcgattcgcacaatcgatgacccccttaaacttggtcagccaatccatcccaagaatgacatctaggtctttggattcgagaagaatgaggttggctagaaatggtgatctttgaatttctattgttatagaagggctgaattgaaccgaagtggagctattccttggggtatgaacccgcattggtgtgctaagttcctctcttattaacccatgcatcccaacaaatttctttgaaatgaaagaatgcgttgcaccagaatcaaaaagtactgttgcagggattgagttaacagggaacgtacccagtacgacctctggtgctgcttgtgcctcctccgcagatgcgtggttgacacgagcccggataaaccttggcccggcacgcctaggcttcgagcatttgtcagcgaagtggccaagctcgccacagttgaagcaggaccctggttttgctccagtctccttcttggcttgcgcgggcgggcctgactgtgccggtgccattggtgggcgtggagctgcaccgcggttggactgacctctatggtgggtctgactgccaccggcgccatggggaaagttgctagggttgaacgggcggtactggcggacgatcatggtggtaggtccaccctgttgcccgggagcgaagcgcggcctttggtgacttccctgaggtgccctgaactgtgcggccttcctcttcctgtccatcttgttgcgttgatcctcctgacggattgccttgtcaaccagcctctcgaaatcggcgtaatctccagatatcaactggttggttagctcgtcatccagacctgccatgaacttttcctgcttctcggcgtcggtacggacatcctctggtgcatatcgcgcgaggcgattgaactcatggaggtactccatcacagtcctgttgccctgatggagtgcccgaaattccctcttcttttgtgccacgaccccatctggcacctgtgccttcctgaaactacggcagaactctgcccaagtgacttcagtacctggtgggcgggtggccatgtgattgtcccaccaagctgacgcaggaccttgaagctggtgtgtggcgaaagcaaccttctcctgatcattgcactgcaggagattcagcttcttctctatggcatggagccagtcattcgcctccatagggttggtggtgctggagaaggtgggtggcctgacacgtagaaactctggcaacttggactgagggggagggggaccaaactgctggtgctgctgttcggcgtgctgcagcatcctctggtgcatctgctggtgctgctgctgcatctgctgcatcatggctgccatcatctgtgtctgatgtgccatcacttgggctagcgtcggattctcgggaagtggtggcggaccattgccggagttgctgttgggatgcacaccctcagtgcgctcttcgccgttgctgccctcgcctgttgcgcggctaccattcctggtgtagaccatctggagggaaaagcagacgggggaaaagaagaaaaacagatgctcaggaactaagctttattacataggaatttaaactgcaattgttctgatctgaattaaaacacttaaagagcaagcaaaaatccttattaagacagccatatcataggcacatgatatcgaccgtcgactaaccccaaacaagcaacctaaacacacaaactaacaagcagaagctagacagtctgtaaactaatggaaaacgagcctaatgctcggaacggctcctgcggtcggtggagtcgaaggcgtcctcctgctcgtcaccaggtccctctgagcgacttccggaccctggcagataagtctcgccgctgcccgactctgagccactggagctgctgctgctgagatcgtggctgccactgggagtagcagacaaccaacctccgttgcctctggctgggcccctggcggctgatgctggagcgaaggagagagcggacgcgggagctggagctggagctgcaggaactgcgggcggaactggaggtgctgcgggagctgctgatggaggtgggttcctgggcgcaagctggatgcgcacgggtgcagtcatcgtcttgcggggcgtggtgcggatccggactcctcctggcgcgggaagaccctttaactgagcgttctccctcttcaggcgcgctatctcgtccttcagagcgacgatcctcatgagcttcccatcattcaaggccttggtcgccttgtccaggtccgagtgcatcctatccaatcccctcatcacagcacacatgtgaccaaaggtggtgtcgttctcgccggctgtcggacggaaagtactgacatcatcactgctggctcgccgagggtgaaaccggtacaccgtgtcgtggaatatgtagttgtggcgctcccgtagtctagccatcatcaggtatgctgcctcctgacaggcgtgatctgctgggcctccagatgcctccaccaccatgttagctaggcaggtacccacgtagccgtggacctccaggcgaacacggtgaggaagctcctcgacacgtttccgtgcgccgacatgccaccacgacacaccggaaagaggccgtgacaggacccttcgcataaccccctctagccaagcacaccacacctcaggtttcacccccgtccccagcgggcaacgggcagtcccctctcgtgcctaggtgaatccgaaagcgacagaggccgtcgctgggcccgccccgctccatcacgcccacccttgcctggatgcgtcgactagaggaaagctacactacaagcctagccgttgcccacgctggcttgtgataagtacgataagttcttccagggcatcccgcgaactggtccttaactgccataggtgcgacctgctaaaccatgcacccacagcccaccatgtggtttattttaattaaccaacaccaaagcggtgtcactaatccaacaaagccattagaaccaacagtctaaacattaatgtgattttccccattgtgaactagttgaactaagcatggctaagcaattcctagtccaaagtctattcatgttataacccaagctaacaaaggagcatggtatcaaaatagcatggctgtaacaataggtaaacatcccatagtaacattataaaacaatgcaatatttgaaagaaaacaatagagcatttgcaatataggatcaacatgttcaagtgacaagcatgacttgccttgctctgctgctggagaaacctcagcgactatttcgaagtacaccggagcgtcggaggaatcggaatctagcgacatacaaagcaaacattgcaaacaggctataagactactgaaacagggaacaaaaccatttttaatggattctacacatttttcttgatttactgagacttgaatgggcttaaacggagctcggatgaattagttatgaattttagaagattcactgtgtttattactatacaagaaaaaccttaaatcatttattgcacaatatattccagggctgacgtcatcaaggcggggcgcggcgccgacatgcgggccccaccggtcagcggctcgggagagggaggaaggtgcgccggcaagcgggccccaccggtcagcggctcggggagggcggtccacggcggatcgggtccacggaccggggaggagcggcgcgccacgcggcggccgaaccgatggccctccccgagacgtggccgggagaggcgggcaacgccggccgacgtgggggagtgggggaggcgagagaggcgggattcgaaaatcgaatcccggccatctcgggcgcgggcgcgagctggagagagaggggagtgggcgcggggaacgcggcgcacgcgcgggcgtggtcgacgtggcccggaggaggcggaggcgtggacgcggcggcggtttcgggcgcgtcggttgctggcgcagcgtcggccggaggtgggggaaggacccgacaggtgggccccacctgtcggcgaccccgggagaggagggcggcgggcggcctggctgggcttcggcctgcagccggcccagcagggagggggggaaaggaagggaaaaaatgggccgacggcccatttgaaaaaaaagaggaaaaagagaggaaaaagaaaaagaaaaaggaaaaaggattttccctggaattaaaatattgcttgctcaattttaattggttaaaattatttctagagctctgaaaattccactaaaaatcctgttaatgaatttcgacatgtagaactcaagaaaaattccacatgcccaatccgattattatttgcattactttcttagggttttctcttgatttgcacctgcattttcttggggttgtttacaaattaaatttggcttgggaggagaacttcggggtgtgacaagaaattcgcaaatattcacttaaaagagcatataaacttcaaatggccataacttggccatttgaactcggaattggaccattcaagtctctaatttttccttaagaagtcaagaacctatttttgtgctttgttcctgcttgttatatggagtttattagagtaaaagcttttttccttttcattggtcgtgtagacgctgcagcttcggaagatccgctctacgtggaggttgaagctgacgtttgggaaagcgagcaaggcaagtcatatcatccttgaacatattgagtcccagtttataaaattattttgatttaaattattgcattatcgctttatttaaattcctgcgttatcactgttttatttagccatgcctatttacctttgttatgaccttattattattgctattgttattattaccttgttcaccctaggaaaataaaaccccaactagtgggtactctatttatggttccactagtatgaacttaggtagatgcttcgctggttaattaggcaacattaggtggttttacaactctagactttgggaatattcatatcacctggacactatggaatggttggattattgtggaatcggattcacacctccccctctattcaaaatcctcaaaatggttttaggctgggctcggggtgcatggttttgatagtagcacctcggccacataaggaccggtcttcgggcctctgttgcaaagcactaccgtacttccacatgtctagtgggtaaggcttagtttgtggctcagtctggttataaacaaaagtacacggatggagatggacgaagtcggggttgatggacatctctagggcaaatgaaggctacatgagctgcggcccggtagtcgagatgtcatggcacagggctggtgtcctgctgctaggggctcagacctgcctacctgtcccggaggttccggccgtaggtggggttgggtcggtattcttgtctatggctaggatgggttggaaactatgtcacgtcttccgtccgtataccgtggtgatatgtggcacgtggttacacgtgacgaagatgtgtcttgtgggtaaagatgtacacctctgatcagagtataacctattcgaatagccgcgccctcggttatgggcaagccgagcaatgtacccaagttagtgttttaattcttaaaacctgcttaacaactaaaatgtggaatggttggcctgggttggcttgggacgagctgggacccagggtcgggttgccagttcggtccaaatcatcgtaggccttgggttaaggcaggttcgtgtgggttcacggccttgattaataatattgtatagctctaggatcgtatttacaaaatagctttgagcaactaagtgtcttttggtgctgtttactgcaaaccctaaccccttacattataactcccttgtactcccttgcatttattctgcactggtgggtgtgtcttgttgagtacgttggttgtactcaatcttgctcaatttttcccaaacccagaagaggagatcctggatgatgaaggctttggtgtctagctcgtgcctgccgtcaagcgcctgtgacacgtggcgccgacacggtgccaacgcgacagagccactggcggtcacggtgggcaccacgcggacaacccagatcggccgagcggcgcggccacgtgggtgggcacaggacagccagccggcagggagtggcagcgatgcctggggccaagaggccaccaacggcgagtggcgacggcgggaaaagcggcggagggtagtgggaaaggagagggggagctcaccgagcagcaccgacgagtggcaactgccggaagggcttgttggcggaacccggagagagctcggtggcagcgctcgtctggacggaggcggaacggtgctccgacagcggtccacgggagggaggcggtggacggagacggcaatgtcctacggaaagagcggacggggtgaggagagcgcgaggggacagggaacggcgaggaattgaggccggtgatggagggtgagaagggagtgctcatcggtgcacgggaaaacggggttcgggtggcgatttgcagaggagaagtggtggccgtgcttgccttcgagacagtgaagccggtggaggttgtcgtgtggcgcgccgacggctaggacggcggcgaggtgcggctggaggtggtacaggcagcggtggctcggccttggaggtgggaatggtgctgcagggtggaagggaaggacggagtaggggccggggtgcggcgtggagcgacagagccgatggtagcagcggcgcagcgcgggtgtagctagagcagtggtggcgggcggctggagggcggcgatggcgggagcggcgacagtggctggtggaagagagccgacgagtagcggagctcgggctcgcggcgtggggcggctagagagcgtgacagctggtggaaaatgggggaaacggaagagggtcgcatggggagggtttttgtgggcgcgagaaggcggaaccgcgatcgggagtagcggagttgtcggccggagtagggtggggacgtggaggtattgatagctagtttttgcgaggaggattgggggagaagtgcgggaacgtggggcgacgcggtctcacgggcgagagcgaacgcgtggggctgaggaggtgggcggggtggcgcggaatcggcgacgacgtgggcagctcgggtggccatggcggtggttggaggcgggctagaggttggggatgacctcgacaggtaggccccacctgtcggcggctcgggagagaggaggccggattagggagacgaaatagactttgtgtgggagaaggaaaatgggccaacagcccaagagaggagtggggaggccggattgagagtaggagggggcgcgcgggccgcgagagggtagaaagcttatgccggaaacggcccaaggacaaggaaggaaatttaattggtttcctttttattttaattgattaaatgaactttgtgcttgtaaaattattccttgagctttgaaaattcgtgggaaatttcagagagttcattagggcacaatggatattacaaaataccctcggccatgatttttaagggaaaattttaactctcccattatttcacttgattaaattgctttaaattttaatataatttctagaaatgatatattaattaatttttaatcgcgaacgaaaatcggggcgttacagcagccaaggctggactgcccttctggtagatcttaccacctcaaggctttggatgcccggcaggatgcacatcatgtgcattaccggttctgggcgcggctttgcatcgagggcatcccaatgcatgcgcgcactgaggtcacgacagtcaagttgatcgggcccagatgtgccatctacttcattgaagagtactcgcgccgccacaactacaaccgcaccttcgacctctggatttggacaaacgaccccgacgccatcccaaaaatggcttggctggggttggtaaatccggacgatgagccggtccccattgatacccctgtgcctgacattgaccccatgcacaacccccatctttcggggcccaaagatgggtggtcatccccggtcattatccacttggataccatagaagatcatcaacctcggccaatgttgtataagcagtatgagtggtcctatggggcctatgatgatgtttctcattcccgctcgcgccctctgcctattccatgcaggcaggagaccagtgcggtgcagggactagatgaggacccagatggcaacggcggtcgcccacacccgcgttaccggagccgctctaggtccctctagggccgtatcacggggagatcccgcagcagcgagcgcaggggtgacgggcaagtctactacaacgaagacacgtgggggcgctagcgcaacagagatgcctacaccaccagaagccgcaaccatcgttctagggacagtgcgaaggtcacggctccaatttcactatacccctcttgtcggttacgaaagaaacctcaacttgctg

SEQ ID NO: 1272 - DNA, 760 bp, Oryza sativa
cccaagcttcggcctgtgaaaagcgttgtcgtagttctggaagattctcccaggtgacggcgacaggatcttggcgggaccaacatacctgaacttgttccaccatcttagctcctttgcgaacaagcctgtgatgcaacacctgacaaggcgaaatatcgacaacttcatcattcggcaaaacaggtcaatgaggctgcacccgttccactggagccaaagccttcttgagttgggagacgtgaaccaccggatgaattaaactggaatctagcaatgcaagacggtaagccatagtccccaccttggccaatacctgaaagggcccataaaaacgaaaagaaagcttgcgattagtgcgagtgaccaccgactgttgcacaaaaggctgaagcttcatatagacccagtcgccaacagagaaggagtgctccgatctctttaaatcagcctgatgtttcattctcatttgagctcgtagcagatgttctcgaataagagtttgcatcttatccctttcatgcagccaatcaaccaactctggtgctgtacaagcagctgaagctgtcaaaccaaaatagcgaggtttgtgcccatacaatacctcaaatggtgtggttcccaaagaagaatgaaaggaagtattgtaccaatactcagccaaggcaagccatttgctccattgagagggacaggagtgcacaaaacaacgcaaaaaggtttcaagacactgattgactcgttccgtttgtccatcgga

SEQ ID NO: 1273 - DNA, 508 bp, Oryza sativa
cccgctatgctgaacgggacactacccttagagaacatactgcattaattaaggaatattacggctatcatgaatttggtgattttccatggtctttccgcctgaagcgtctgctatatacccgggcgtggctcagtaatgagcgaccgggtctgatgtttgattttgccactgcatggttgcttcaaaataaggtattactgcccggagcaaccacactagtacgtctcatcagtgaaattcgtgaaagggcaaatcagcggctgtggaaaaagctggccgcactgccgaacaaatggcaggcagctcaagtgatggagcttctggtcattccggaaggtcagcgtgtatcagcactggaacagttgaaaaaaggccctgttacagtcagtggacctgcgtttaatgaagcgctggaacgatatatccgattacgaagtcttgagttttcccgactgaacttttccggtctgcctgccattcaactgcgtaatctggctcgttatgc

SEQ ID NO: 1274 - DNA, 676 bp, Oryza sativa
attcaaatctctccatgttctattgttgttcttccccaaatccctcttcctctgctgctcttgttccaatctcaattccgattccttcccagctaaaccctaattcttagaagtcgtgatagtgcagtcccaacccaagtgaatttcttcccctgaaggtttagctctttagcctgtaatctgtcaattgtcgcttaaaattgttgtatcattcttctgtccagcctgttgttattcttgtcctctgccttgtagattaggttgaaatctcccaagattaaccatggaggtaaagtcacttgggccacttgctacagttcttggagaaaaaggagcttggcagcatcttcctgtggaccataaaccactgtaattttccaggatacatttgcttctctcatggtcaccatggccgttagggagagcaaacgaagatcacaatgtgtcaagttaaaaaatttctcattagctgccaaaattattccacctctagttccatccgcaggcaagaaaaagaaattattctgaaaattgactccaggtgtttggataatgcaggccttatctacctcttgcaacttagtctcttgcaggcaaaccaaagtggctttgtactgttggagaagattcctgacggcttctcttttggctggcgcatttaggcctctaacattct

SEQ ID NO: 1275 - DNA, 728 bp, Oryza sativa
gggggtaaatatagtcataacgggaataatcatatctgaatggaacgatcattattttttgtggacttgtgctccgagtggcccctttctttattgtattggtgaatttccccttaatgcaatctatgcaatgatctgcgtaggaaaaatctaagtagaggagtatttcttctttaatgatacgttcaattctccccctagaaatgtggcctaaaaaatagtgccataattttgatgatgtctcagctttatcattacagacatttgtagcattcatcacagtgtcatccaaagagaagaaatagagtttgtctcgcacgaaggcaagacccataactttattatcaaactaaatgtaacatgttctctttttaaaatgacactcataatctgtctttgcaatgaaataaggtttctcttaatagagggagcaaacacagcattattcaaaattaaattgtaaccgctagggagtctaagtgtgaggtctctaacagccgtcacatcaatctctgccctatcagctactcttaggttttgctccccttttgctaccttccgcacggtactgaatccctgtaatgagttggaaacgtgcaccatggtacctgagtcaacccaccaagtattaagggaaaattcagtgtaaaaggattcatccacattagatatttcttcagaattagtattacctttcttagctaactatgctttaaccatgagcaatt

SEQ ID NO: 1276 - DNA, 665 bp, Oryza sativa
tttttaggatgcagaccatcactgcattgttgtccagtactccatgtcatttggtatgttggcatctcaggggttttttagatggctttcaatacctataggggacatggtaccaaattttatacttcaagggataatgtgtgaaggaactgtttggtttttgaagtgggatgatgaattcaccacttgatccttgatgatgttatttggtttggggaatggaatgagtttatccatcaccacctcaatcctcaaaaggcacatgataagctatcggatgaatggagtcattcttcaaattttgtgggatggtcacatgatggatcacccgtcctagatgtgttgattcctcatacctgtaactaaacagcctgtaagtagacgagcccccatacctctaggtggtaaagtagtttttttttttaaacaataccattttacattatgcatcagtagcctttgtagtttgtattgttgaaggctcgatcaatatgaccatacgggttccgtatggtcattatgtcatgtcatgtttttgttggcaggtcaaacaccactgttcatgttttcaattcatgggagagttgttggtccaagatatcattttcgatcatggttccaatcctgcgattgataaaatagtgttacctcttcatggtgctgca

SEQ ID NO: 1277 - DNA, 666 bp, Oryza sativa
gaaggtgggttcctgggcgcaagctggatgcgcacgggtgcagtcgtcgtcttgcggggcgtagtgcggatccggactcctcgtggcgcgggaagaccctttaactgagcattctccttcttcaggcgcgctatctcgtccttcagagcgacgatcctcatgagcttcccatcattcaaggccttggacgccttgtgcaggtccgagtgcatcctatccaatcccctcatcatagcacacatgtgaccaaaggtggtgtcgttctcgccggctgtcgaacggaaagtactgacatcatcaccgctggctcgacaagggtgaaatcggtacgccgtgtcgtggaagataaagttgtggcgctcccgtagtctggccatcatcaggtatgctgcctcctgacaggcgtgatctgctgtgcctccggatgcctcaaccaccatattagctaggcaggtacccacgtagccgtggacctccaggcgaacacggtgaggaagcttgccactgagtggtggaacagtcgtgtactctggcgcgttggggtagcccaccaccagcgtcatacgtgccaactctgccacaaagtcaatcatgccttctccgcggtggttgggtgggtggccggccatctagagaagacaaaggagtaggatgggctgcaggaat

SEQ ID NO: 1278 - DNA, 723 bp, Oryza sativa
gcagcccagaacaattcatttatacaggttggtgctgacatgaattttagagactccaatggcgttacttgtgtaatggttgcagcaaatcatggctcttctgtcatcatgaagtgcttactagatgctggtgctaatccaaacattccagatgaagtgagtaatattctttcctctatagcctgtgactggatgttgttgcgacaggctgtatggtcttgagagattaggataatctactcacttattctttttatcaactgtaccaatggataagtctgcatgagaagaaggcagtgcttctatgctgctctaaaggaatgcaattgttgaaatgtcatctcaaaggaaattgctcacattccactccaaagggtggatatatggtttgattttcattactgtttgatgctgcttgatatagggatgatgagaaaatactaaggtttaccaatctacgagtgggaaaatatttagtgccccagtaagtgatcattggacaaactaatgtcctgggttgtaccctttgaaccttcatcctatcctgttttgacaaatcatgatataaaaacttgtttttgtgaaccttgggttatccttactatattatttaacctgatgtttattttacaatcttagctcagacaattttacagccttatgtttctaacatgggatcctagttggtagtgctgaagttgttaaaattatttgcaatatctg

SEQ ID NO: 1279 - DNA, 5337 bp, Oryza sativa
ccgtgatttgtttacgttgcgttgagatcgatttccagaacgtgacacgacgcccaccggcccacgtaatcccccgagtttccgtctggaagtatccatggatgggcctcgttgccacccgccaccactgggctgtgtctccactctccagttttattaatttccaaagtataagcactctgctagtgtataataatatgttatagatatcaatatgctagtatggcttgtttctttatttaaatacatagtatttctcatttatttgaatcaattaaatattagactattacatactatcataaaatattgaagaatagtttatagaaaatattaaaagggagaacaccctattcacgactagtttttatagtgtggatatttcgtccgaatgtgtatgtacacaaacagcatcagcaataagaaatttcacatcacgcagcctcaagtaaaaaaatcttgcaacggctacagttcatgccaaaaacagtaggaaaaatccattaacatttctggtaacagcgtaattgcaaagaacacatctcggatgatgtcccatgtgggatgcacctcacaattgcgtcaagggtttgaccttgtgctggtttctgatgtagtttcaaagttccgccctaagcacaacattgtctgagacagagtttctactccctgtgcattttcaattttgtctaaattcagaatatgtttcctcctaagttttagttttgaatccttccaatgctatttagtttagttaaactaaaatagatcacctgttacccacgagtcgacccgcgccaatctttgtcgatagctgtgctcctctattgtgcaagcttgtaagaaaaatatattatctattataatcatactataaagataactcagaaattaaccaccacgtttgcttgaaacactataaattcttgtattaagacccccccgtgagtttggccggaggagatggcgcgatgatcaagagcgtacttccgcttaagatctaactactggatcgctcaccagtttgtgtggaagacaatggattatataggtttggactaggaagcgtaacaccctactcctgtgtgtgggattatgatgagttcttacaagaagtcttgagctcctagggaaacctagctgttcttcctctagagctcaagctatcgagagtcgtccctttttcttggtgggcgatatcctccttttatagttcaatgggataccacatgcaccgtctatacctacccctccatgggagggggacccaccctgcctcgattagaccaccattcgtgccttcaaccggaagcaaagtggtcgctcgtcctcgggtggggccagtgccgtcccccgcctgacacgggggacacccctgtcattcatttccctttaaatgtatggagactttggtggctcaccacgggcggagggcgtccctggcagtgcatcgaccgcctaacacagggcgggacatgggggacactgccgcccgtccaatcacctgtgaccacccgattgacgtgggtcaatcgagcggcgccgcacgtccacccacaccgtattaaatgcggtgagggacagggcgccgcgcatttaaggcgttgagcggcgccttccgccccacccactctccccgccaccactctccccgccacgtggtggtcgggcgagggcctcgggggagcacgccccaagagcccgaggggtgtgacgtggcaccccgaggccctctggccacttcagcgctatccaaggggcgagggaaggcgaggctgcgtggccacgtgactagacgggaagggtactttcctttactgtgcgtacccccgggccatatcaccgacagtagcagatctaaattatagtgtagattgatcgatatatttgtatttacatataactatatatataatacaattttacatttaaatctaattctaattttcatatatactctttactggtcataactgaaacagatagtaagagttctttatgaaatccaaatctatttttagttccagataaaaatcttaattgtatttggagacaaaagataagagctacatatcaaatccaatttcacttttatgtagctcagcaaaaaattatgctgtgaaatccgcttgttaagataacagcgacaaatgacgaaccatccaggaacacgacctcaatttgcaatgtgctttgaagtaagaactcacaattcctcggtgaaatatttcaccatcaaaaagtctattctaaacacgaatatttattctgaaatgctctgacatgaggcatggccgatatatatccattcttctagccacagctgctcaaagtagttaatttacataggcaagatgaggttccttggtatcctgagcctggtcttggatttgcacacttttttgtatgaactattaaatttcaaaattttgcacaaatgtaatggccttctctgatcacaaatcaaatctaacatcccatttttccatccatgtaagcattaaaggtccaattgtttttcctgagctggaaataaggcatctgcaatcgaatacttttttatcaaaaattattaccagacatgataaaatgtagtgtaaaaatgacataggtatgcaccaaaaaacagctcatgagattatatatgcaccaaaagtgccccgttgtagatatgctggtgatacaattttagatttaatacataaaatttagtttagagaacaggttttgggtctctcttggagatgctctaaggataccaagaagagggtaactgatgcatctcttgtcttcaataacagcaaaatcctctaaataataaactatgcttgtattaccctagcacaatccacacacgtctggattgaaatacaaaattaagcataattggttaagttggtcattggcaactgttacattcacggacctagcatagttactagtgaaagtaaacaccacgacaccgaaaatttaccctagtgaatcaaacattggtacataaagtctgagcgtaggattttcatgagctgatcaaaaagtccttgagcatatatcaagtagcatatatcaagtgtaacaacagtaaacaaaaatcaagaagggaaatggggagaaagtgaaataaaaactcaaccatgtataatacttatttccttacaatcagtacagatcatggtaaaatatatcatagcaaagtgttgagagacaagaaagaatataagggagttttacctagcgccacttatctcaactgcgtaggggagcagaggaggcctgaagcatctgcaccaaccacagcaagctcacatatggtacaaagctgcccttcgatggaaggaacaaaccgggatccacagtacgggcaggaaacatccttctggccacggtaaattggaacatatgtggcaccacagacgacaaatggatttctgtagtcatagttcagctcacagctatccttctttccactgcactgttgctgcacctgtcgggccctctttgcttggctctcattagggttgttctccagcagcatccttgcaaagtgctctgcagtagcaaagttcttttgcttgtagcacaaacccatagcacttccaagcacaagcctcatatgaactctctgaagcttgcagttagtgaagtaagctgccaattcttgttggcggttgacatcatctctcaattccttcctcttaagttccatcctcaggccaaggacatactccctcacaatctcgatcaactctttcacttcatccacttccctcctcgagtctaccacgataagagggatggtatgcaagatgttaaggaactgcctcagggcttctgggaacttaccttctgtggtggccttgtaggcagccttgagtctgtcttccatttgtgagaaggtgaaaacaagtgcaggagggcctctcacattaggacttgcagactcactccaacctttctcaacagcaaccggaataatgggggcagttgcaagtgcacgaagatatgagtggctgcccatgtgcagatcgagaaataggggcttgagaggagcaaagtttttgatgcccaattgacggctaagcaatctcattgcagtgtcaaagtttcctgctgctgcgtgctccccagcaagagaagatttctgagtccaaatctggctgacaggcatgcctggaggaggagcaacaaagaccactgagagtgcattaccggcgtttttaggggtctctgcttcaggcggaagttccaggtcttctaggtcccagccaccttcctcaccatcctcctcatttgcttcaccctcctcagcatcaaaaccatcaccaccattcgccatcgcttcgcttgcatcaaccatatccaggtcctcatcaccccagtcagcaccagcagcttcatcgtcttcctcaagttcagccttcccagtagcatccagtccaccctcaaagataccacgcatcaccctaagcaatggccaatcaccactggctgtgagaggtgcaggggggatcaaaagagagcgagtttttccttcaggtagagaaggaatattttcacccaattcagcagcaagcctatcagcaatttctgtgagtccatgggtggcagcagtaatataagcaagaggtagctgtccagcattctctaggatctcaactctcttcatagcatcaccaagatacagagcattgtggaattgacccatcaggttattgttctgtccagcaattttgcacatgaaccccaccttgtccatgtaaccagtaataagatataggaaagcaagcctctcaaaattctttgtacgttggtacgcatattccacaataccaacgtttccctgcctcagggcctcgattcccaaccggtaccagtgatctttgtcatcaatctctttggcagaagcaactgcaatttggatgttaccactctcaagagctaggttaaatcttgtcttctcatctttcacaaagtggagggcaacttctggaaagcctttctgttgcaaataagaaatcacagcctgcccacacagctgggaattcttaatcatactcatcacatgatcgtatcgtttccgtagaagggccagcttgaaaatgtattcagaagcatcaactgtgatcagcttgttctttccatcacgatctaggcagaaaatattattcccaatagcccttgttatgtaaataggaacgtcaagggttttaatgatcccactatctccattgggaagacaatacttgatatggttcaaagtagtgtaaataaacacaccattctcatcccaggcaccacttttcacacggatggtttcatggagcgtacaacgatgga

SEQ ID NO: 1280 - DNA, 650 bp, Oryza sativa
aacttggtcagccaatccatcccaagaatgacatctaggtctttggattcgagaagaataaggttggctagaaatggtgatctttgaatttctattgttatagaagggctgaattgaaccgaagtggagctattccctggggtatgaacccgcatcagtgtgctaagttcctctcttattaacccatgcatcccgacaaacttctttgaaatgaacgaatgcgttgcaccagaatcaaaaagtactgttgcagggattgagttaacaggaaacgtacccagtacaacctctggtgctgtttgtgcctcctccgcagatacgtggttgacacgagcttggataaaccttggcccggcacgcctaggcttcgggcatttgtcagcgaaatggccaagctcgccacagttgaagcaggaccctggttttgctccagtctccttggcttgcgcggacgggcctgactgtgccggtgtcattggtgggcgtggagatacaccgcggttgggctgacctccatggtggttctgactgccactggcgccctgggaaaattgctagggttgaacgggcggtactggcggacgatcatggtggtaggtccaccctgctgtccaggagtgaagtgcggcctctggtgacttccctgatgt

SEQ ID NO: 1281 - DNA, 5008 bp, Oryza sativa
ggcctcctcctccttccgtttccgttccgttccatttcccgttcacaccctccgtttttccattacaaaggcgacacgaggctttcttcccccaaatctcacgcggcgctttctctctctcccgcgagatggacgccgcggcggcgtcctcctcctcctcctcgtcggcgacgatggcggcggcggcggcgtcggccgcggaggcgtcgttgtccggctcgcctgcttcttcgaggaacgctcgccatcggcagcgtaagggggtccggctccggatgctgcgacggcgggggcggcagcctgtggaggccgagcgcgccccgggcgatgggggcggtggcgccgtgcaggaggatctcgcgctgcctctcggaatgtccttcgccgccgtcctcgcgcaggtgcgtcatggcgggtggatttccttataggcaaaccctgaagaaagtagtagtactagtacttttttcttccttggcgctgttcgtgatcctctctgcgatgttcgtgccatcaaatgtactagcatattgcgtgtagattctgttgctagcgtctcacgaacacggtaatctgagaggttgcgtgctctggatggtagcttagaatgggaaatggaacgttagacgcggcagcttggggccgaggaaattctttgtgctatacttccctcaatggaaatgtcattgagccaaaataaaaaaaagtcattttagttcacagctatatgctcagatttttcacaaataaggggaaaaactaggatgcaaaatgatgagaacaaggaatgattatgaataagacagcagagaaattgggcttgacaatgttgtggctttatgggttatgcaagccttgtacttttgtcaaataagtagtgtggcatttaccgtcttattgcaaaattcaacttcattgctactattattcttcatttccatacttatagtggacatgaaattaaatagtcatttcgataatactaccccgtcatcctgtcattggacattaaattagtcacagttcagcatctcttcatccgaaagcttgcactatagcagcattttgaacacagatgcatatgcatgtgcaaagtctatctaatattcacctgcgtacatctggacatttgcattagtaattataaataaacatgtttgtacaccggtttagccctatgcccttattgttcaggtaacaaggagctgctttcgttgaccgcaggttataaatacaaagaatatttcaggacaaagattacatcctgatttcctctccaaggtacgtgctttctaatttgatttatgaactctgttatccataaacccacaaattgatggtctgaaattgggtttgagtgtagatctgtacatcagcagtcaaggaatctctgacaaatgtaagcccggctaccactattattcagttctcattgtctcttagtattcattgtaatatcctttaattatcgtttctgtagatatatggtgacagttccaacagtttcatcaaaaatttcgaaaaatctttcagcagcacttttaggacgcttcatcttgttaatgaaatacctgtgaatgagagaagtcatattcctgaatgttcttttaaacatgatgattctgtggctgtggacagcttgagctcatctgatttgcaaaatcagacaaacagaatagagcatgaccttgtgaacacagtggaaagtcaactagttctctttgccagtgacaatcagcagttaacgcatcttcggcatagcagatcctctcctgaagctgataatcgcattcttaatgccattgatcgctcgaacgaactcaaggaatttgaaatagggcttaccatgagaaagttgcaactcaaacagtcacagttagctcttagttcccattcacacatgttagagaagattaagctatctttcggatttcagaaagcttccttcaaaggagagaaattcaagactcgcatgcaggagacaagagacgcagaaatccttaggacgctaatagattttcttgttagtgctgtgatagttatgtcagcgtgctttggatatggaacttatatttattcgtatcaaaggataacggatgttacgtcagcttgttctgccacatcaaaggtatgtttatgtagtacatctgttatcactgagtagttttcacttatcgtgtctctttagtaatcggaagctgtttttttcccaccctgtctctttcagggatctaagtcatggtggatgccaaattcagtgtcgaacttcagttctgggtttctttttctcaggtgtcatgtaattgccgtaacacgtatgtgctttggcatactaatgatcctggcaattgcttggttagcatttcagcgttcctcaactactgggtcaaatatgcctataacattcaatctcattttgctgggaattatctgcggctttgctggaaggttttgtaccaatacactaggtggcgatggaaacacttggctcatgtactgggaggttctttgttctatccacttacttggaaatctttttccatctcttttataccacgttctacatggacctatttcagtatctcacagagagcaagttgtctggttaccatactgggttcgccggtgcttgttttatgctgcggtggggcttattcttccagccttgactggcttgctcccgtttgcctctctttctgactggaaggatcattttgtggaagagataaaatccattgttatcggtgacaagattgaagcatgaaatttcttggatgtaaggtggcgcaatacttgtcctgttgtatcttttgaagaagtgaagtttgttcagtttgagattagcctcagagtttagcttggtattgtatgaactccaaaggagattatgctcaagttggttgcacgtagactgacctgttagctgccagcctgccactttgttgtagttggagtgttattttaaacttttttctagttttattcttactttgttgtaaatactcaatagcaagagatgctgtttatctttgttgattgattgttccacctggacatgaggacaatgagtgcagtacaagaccctccaaacggattgagatccagtgcagttgttactattacttcaactttagcagatggatcaaaaaccagcggctcaggtcatcagaaaaatactgttcacgaattactgtacgaagtagcaaatttctcctgtagcgtttactgttcacgaattactgtacgaagtagcaaatttctcctgcagcgtctagtgtgcggtagggtgggagagcaaatccaagctggtggctgcattgatccaacggttataatgtgctctcactgctaaagttaccgtcgttattatgactgcattggatctcaattccctccaaacgtccatgcccagtggcggatccatgtataatttgtagggttggctgattccacggctttttaaaaaacaaccctataaaacttgattttcatgtataaataaaaataataaagaaaggggtttgttggaaccatgccactctatatttgtaaaatttgagatatgccactcgtatctcaatgacatgtaagacccacatgagtcaatgacatgtgggtcagggtgacatatcacaaattttacaaaatttgtgtgacatggttcaaattgtcccataaagaagaaatgaccccacttaaatacaaatcactccccataaagaaataaccccacttaaatacaaataactagtaattgatctcataggtttatatttctggctccaccattgtccatgccagtgatatcacgcacccaaggctcaacccttgagcaaccttgagctcagatacattgttagaaaaatttgcggtcggtacatatacgaacacgagaacaaccgcaaattctatgctgcaattcagcagtttctctatcttggattgaatgaactatgcacagatatgctaaaaacaaatgagagtaatttgtcctagtgccataaactgccaaattaaccattgacaatttctggaactatggtgatggaagtatgatttacaacattctaaaaccagggtctacttttctcacagagaacacatttgcagttcgggatcatatcagacagaaggatgtacatggaaaatacacagtacttcattatacaacaaccgcagcaagcttacttgacatatcaattcatgaccacagcttcaagtagcctcgatcattccagaaagatttccagtcatctaactcttttgcatgagaatgaggtaatcatctcctcgtcccgtgaccgctttccgtgcccgttgatgaagctgcaggagaacttaaccggctgctgtgtttctgctccattgattgaccatgcaatgtaggagcaagttaggaaacattttgatcaatggtcatatttgaagatgagaaaatgttactatctgatagtagagagctttgtcactaacctgtgttgcattctatttgcttcatcttcttagctggattggcgtcatccaattttagtcttctcttcaaaccaagggtgatttcatcgctaagtatatcagccccagttctagacagaactccatcttcggaattcttgctcttcttaagactttttccagcatacaacccaaattttcgctttgggcagacctcggttgtacaatctgaaaccaacccaaattttctctttgggcagacctctgttgtacaatctgaagccaacccgaattttcgctttgggcagacctcggttgtaaaatctgaaaccaacccaaattttcgctttggacagatctcggttgtacaatctgaaaccaacccaaatttccgctttgggcaaacattgattgtacaatctgaagagaagcatattttgcagggttagactctattttttgaaatgaacttcaatacaatgcaaaggcattcttctagaattaagtggataagatatcactgaatattcttgtgctaagaaaaaaaatgaataag

SEQ ID NO: 1282 - DNA, 4843 bp, Oryza sativa
ctgaatttatcctcaatggaaggactcaaggagtacacagagagtgaaatggatacagcatttgtcaggctgttgtacaagatgacttaagcacaaagttgaagtaatgtagaaaattaatatggaacggattgatgatatatttctttgtgcacaagagaattattagtacgatgtgagagccatgaaagctgctggagatttcgtatgtggaagaaaaagaagggggtttcttcctcatcatcagctgcaatgcatgttcggcagcaagggattttgagagagtttgtttcgttttccacgtacacgctttccgaattactaaacgatgtgttttttttataaaaaatttatatacgaaagttgctttaaaaaatcatattaattcatttttaaagtttaaaatagttcatacttaattaattatgcgctaatagctcacctcgttttacatatcttatcaatcttctcttttccattttacaaatagagccctttacttgtatggatataccattttcaccacggaatccgaaacaaaccgccggccatggccatgggcgccgccgccgcatcgattcgcgacggagaacttccgcccggcgatcgtccacgccggcgagtcgatccacgagaaccttactcctcaaggcatccgaggcgatctcgtttccgtcccctcgcttcgcttggcggttaggtcttctgttcttcagatggtggaaaatcggaaggcaccacatccaccatgttgattccattccgcgatgtgcaattcgtgtgtattctctgatcacttctctgatttattttttaaaaaattgcaccggatattcactcggctaagtgctatcctactctgcagtgatcacgcgatgcctcgaaaataattctgaactttctgaattcgcaggaacatctcctatctgcaattaggcgtacacccaggaggagcagctgagcctgacagggtttacgattccgagatggccttccgtttcaggctctctggcagaatgacagttttcgcgaaatccggtggaaagccagtagattccgaacaaatttcataaaccaaaatttaaatacaaattccttgagtttaccaataagctcgcgaaaatcggccggctttgacgaaattctgagcgaaatcatcgaaatttcaatcagtaactagaaaaagagataaactgaaattgttttcctttttttaattcgttattcttttctttcctacttcaaatttcagtaaatacacggaatacatcaatttttttgaaaatttatatcccaatagattctatgaatatcatactatttataagattttatttgtttttttcctttttttatcaattcaaatttgaatttggatgaaactcatcgaaatcttagacaacttctactttcgagccccgtcgaaacatcaaaatttcacggaattcaaccgattttcgttggaatcgtaaaccctgagcctgagatctccactttttctgattgaatttgcagttgcctcagatcattgagatcaccatggatcgctcgctgcacgaaggcccatgacacggcgagccttccttgggctctgggcagcaaggcctgctcatctggtactgctcctatacatccttgtctctctctcttagctgcttgcatgtttagggcatgtttagatccctattaagttttttctccctatcacatcgaacatttgaacacatacatgaagtattaaatataggctacaaaaataactaattacacagatcacaactaatttgagatacgaaacttttaagtctaattgctccatgatttgataatgtgatgctacagtaaacatttactaatgatggattaattaggcttaataaattcgtctcgcaatttacagacggattctgtaatttattttgttattagaatacgtttaatacttcaaatatgtgtccatatatccgatgtgacacggcaaaaaattttacccctaaatctaaacaccgccttagtatagttcatcaccaagtcaccggaacatggaactatgccacgttccttggtcctaggaacgccgttcccgtttcgagaacgtgggaacaatctcgttcccccaccccacgttaaaacataaaaaatgtagcgtcccgcgttcctcgatctcgttccttgtcccatcgatacgggaacttttgtgacgtaggtacattgtcatttcaaatattttctacaccattgcaattgcattccacttgcagaaggtaatcgaactgatagtcttttataaccttatttttacaagaaaagtctcattaccaacttttttttggggggtaagattttgtgtatgagagcaatgagaagttgattgtcctacatgggtcagcagatctacttttgtaccgaacggtcggttttgttatagatcctcttctttttacccatccacatcgaatgcatccattttttttgatcggtttctgcggtccatggctctagaatagttgaattgattgatcgaaatttggcatctgttaatagaataccgatgcaataagaatcattaacctaggaaaataccagtgcagattgctgccttttttgtctttcaaaaaggtttgaatttcgtgtgatccacaacttccaatgattttgtgtgctgctattaatttatcagcattgacgcgaaaaaaagtcgctcgataaattatgccatattttattcagtaggtcttcagtttcgattgagccatagtataatgcaatacaccaaatgcaaattcaacagatattttgcccccaaaatccctcttggcgcctctctgattaatttaagaggttcaatgatttatatgctttcccaagtccacaagcaaactgcacacggccccatacaaaactaacggtacccggagaatgaatgagctgcagaagaagaatgcatcaaagaatcactggaacatgtcaggctaattgccgggttaatgctggcttttgttttgggttctttcctgttctctcacgctaaccccagctggtaacagtcccggattgctgcgtcctaatcatgcaggtcacgtccttgattttggtttattttacgaggacgtgacaccatggcggtgcctgccaaaaaagcctccacttcgctgcactgctgctgttgactagcactagaaaaacaattttgctgtctgaaaactgcagaggagttgagcatgcgcatgttctgtacagtcatcatgtcgtaagagcttctagtaatctcatcgctctctttctaggagttcttggagtattgttttcttaggaggttttttttgttcttattatgctaaccatttctgcaagttagtctttcgctctttcagagatactatgcatttgcattatgcctctgcttctaacagtcgccatcaggttgatagctgaatttttgcttatgctactggggcctcccacctgaaatggtacgtttcaggcaatgagatttgatatgtacattagtatgagctaactctgattaaaatattaaactaacactgtttgaagaatcaaggcactttgaaacgagatgaagcattggattcggatggtagagggttcaagcatggtaggaagtagtataggatgtactaagattaaagagtgggtgttgtgttaggtctggggtctatacatggccacataggtagcgtgccctccttttccatgtttgttcaacatgagcatatttgcaattactagtagacagctgacaaatggacctgaaaaaactgagaaacttagctggttattctctcacttgtgtgactaaatggcttttatattgatcaattatactatgatatggacaacctgttgtactaattgaaatatatatttctaccaaagtgttggttatatagtcaaatttaacaacccttcctgatgtcagagctttgtcaagactggtcataacattggttcaaatgtatttggttttcccaatatgtttcttttgcattggtgatttgtgaagccttaagataggtgcattgtctggaacctaatcccagttcgtacaaaaaagtgattagccatttctagattaatagtgcgcttttgacatcaccgaccgaaaacgaggttagttaatagatgacagatttctgcaacagtagattgcttggtcctacagcagttgctgttcccttgttaattaacttatcaggactgttaactgtgtactaactgcatgcttcaggcgccatttgccatctccttgtgtgttgacaactccaaatctgacagctcctgaggttgatgtaagctgatcttttatcaacgcaattcaggagcatggatttcaatagcttggttcttacgagttgttcatgtgagcatatcactgtgtcagtgcttagtccccttccaggcacgtacaaatgtcaggggagaaaagttgcataatcatttatccgcagtaggaataactctcctctgcatttctgaaaaatgttatcagtactcgctgacatgtctgttatcatgagttgttcctccctttctttttattctttcaggagaaaagcctgagctgaagcagttctcatcatagttttcagcttggagtactcatcttcctttttgacctccgaggagaatgaaattatgcacaataactcaattttcagcttatccatctccatttaaacatgtctctctctttgccttgccagaagcattaaaatcatattactgttctttaacatttcagggcattgttcatgaacaatcatatggtcgtgcatacagtattggctacagttttacagctcagtttctcgacaatgtcagg

SEQ ID NO: 1283 - DNA, 745 bp, Oryza sativa
tccatcaccgcgcccacggtggcgccgaagctgatggggtcgatcccctgctcgttgcacagcaggttcacgtactgcaggcattccaggtcgttcacgccgttggccgcgcccagggcccaggcggcctcgtattccaggccgccgctggcgccccagtactgcggcttgttgaccacggtgaagtgcgtctcgtcgatcttgctgatgcgcccgcaggcgatggtgcagccaaagcacgcctggttggtcaccaggtgcttcttgccgtcgctggcgcgcggcgtggccatggcctcggcggagatgtccttggcgccttcgaactgcacgtcgcggtggttgcgcgtgggcagggcgcccacctcgttgatcacgttcatcagcacctgcgtgccgtaggtgggcaggccctggccggtgacggcgttgtcgtgcaggatcttcttgcgcgcgaaggtctcggccatgaaggccttggggtcgcggatgttgcccacgcccttggtgccgcgcacggcgatggccttgaggttcttgctgcccatgaccgcgcccacgcccgagcggcccgcggcgcggtgcaggtcattgaccacggcggcgaacagtacctggttctcgcctgcgcggccgatgccggagatgcgcgtgagcgggtcctgcagcgtggtcttgaggtgctcctcggtctcccacacgctcttgccccagatgtcggcggcgtcgcgcagctcggccacgt

SEQ ID NO: 1284 - DNA, 616 bp, Oryza sativa
gccgcagcgaaaacggtttccagtcggccgcccaggcttcccagctgtccacatggcaacgcatcagctcggtcagcgggaagacggcgaacgattcgtccacaaacccgcacatcagcaggttgtcccattcgtcgtcgctgtactcaaaccgcagctcgtccaggtcaaacaggtcgcacccgccggcggcgcatccagcaccgtcacgatctggcgccagattttgtcttcgccggtgaatccgcccgccaggcgatcgtggctcaggtccagatcgatgcggtcggccttggcccgcttcttgttgatgcgactgccgctccagaaggcataggcctggtgctgcaggctgctgggcgtgctgaagtaggtcttgcgccacttcttgtgcatcgccatgccgctggccaccttgttgagctggtcgaacgactgcgtccagaagaactcgtcgaagtagaaattgccgtggtagccctgcgccgtgcgcgcgttggtccccaaaaagtacagcgtcgccccgttgggcagcacgatggggttgcccttgagctcaatgcccagcacctctttgacaaaggccaggatgtagccgcggaagatgtgcgcctgc

SEQ ID NO: 1285 - DNA, 1090 bp, Oryza sativa
aatcggctggcgaagtggggcgccaacgtggggtggtggaggggttaaccggcgccgattttcgcggggagagtggggggaaaaggtgaaggaggtggaggggatcgatttcacgcgctcgtggggcggggtggagcgcagaagccgcggcgtcgtgggacgaaaccggcggccatggtggcagtgggcgacgggaggttgggaaagaagatgacaggtggggcctcgggtcccacctatcagggagagagagagaggggaaaacgggcgagggaggtaaagcagacttgagggagagagagagccgagcgggccgagggaggaggccggcccgagggggagagaaaaggggcgcgcgggccgcgggagagaaggaagacttgggccgaaaatggcccaaagagaggaagggggattttaattgtttttctttttatttagttggttaaaatgaacttggtgcttttaaaattatttcttgagctccgaaaattcacggaaaattctagagagtacattagggcacaaagaatattacagaatattcccggccaatgatttttaaaggaaattttaatttcctccataattccacttgattaaattggtttaacttttatttaatttctagaaaatgcattattaaatgattttttttaatcccgaacgaaaatcggggcgttacagaaactgacaagctgtgatgccatattgtgctaactaggcaatgttctgtgctttttgtgtattttggcagactctaagccaactatgcctatctgtgaactttatataatttggcagactctaagccaactttgcctatttgtttagtttctgtaatttggcagactgcttgccaactatgctgtgatgtgtgcttgttctggcagactgtaagccagctaagctatgtggattgttatcatctaaattgagtaactttgctcaaatggtgtgtcataacctaatctgatatgagatggcatttactgagctgatctgatgttatgaactgactcttatcaatttgttatgctaaaattatgtgcaaagttaccaatactcagtcactgttcagccaaccact

SEQ ID NO: 1286 - DNA, 16488 bp, Oryza sativa
ccggcgtgggcgtgcgcgcgaacaggcagaacagcttcagcatgaacagcgcgtgaccgtctgataccaccaaccccggctggttgatccttcacacgcggccgcatcaaactgatgattcttagtccggcttcgtgttgatcttcctgattaattttgttcgtgtgtttttaattattttttgttaatctctatttgttgcagttgcatgccatgcatgcaggctttttttctttcatcgaatcattcagtgttcttgtgtttgtaatctcttgttcttcttcgtgatctcggagatatataaatatatatatagcgattttaactgttattcgttttgcctctcataactgtcagtcatgagagattaatcagcatcagcaataaaattaaagagaccattcatcagagagagaaaaaggagaatgatccataaatgtctatcaagtatatataggggaaagcatagaaaataaacaggagaatgctgtgaataatctgtgatatatatatggtacaaactgcgacactgtgagtgactgagtacagcaatggccggatctcgcctacacagccaacaaatagtagtagtacatgaagactactctctcaaatgacaaatctcaatgccaatttgttgtgacgtcatattgtatcatactattatatgtgttgtgcttattaaaacaccaaaaaaaaaagagctattcctttcatcccaaaataaattaaactagtactaagttaacttattatggaacggaggtagcagtgggcagctgggcatggcctcaactcttctgcaatacggacccttaagcaaatagagcccacatgtcagccacagtaatgcagagaatctcgttccagtggacacacattgacacatactacgtacaacacgtatgtggttttatgtatactactactcccgtatacgtacgtgtatacactagcagtatgcaaaaaaaatactactacgctagatactgatcatatgctcatttgcgaagaaacttccacggccccctggctgctcccatcctgcagaaattcataaaacattcagtaattagatcagtcatgctgcagttaaacttaaaattgcttccaaattatcgagaacaaaatttaaaattcaggctgattttattcagactgcaaaatcacgaacacagtttgcacaagaatgcacatcttagagtgttaatcaattacctccaggtgctagcaaatgctctgacgctcatgtagatggccaaggcgatccagatcccgacgaacccgccgtgcgacgagagaagaaccaagcacgggatcgtcaccgccgctacgccgacctgcaattgaatcgatgcatcgccgcattgtcagttacatggtgtccattttaactttttaaggtttaatcgattcaaaaagtttaattaaggcaaaggttaatgtgttcgtgccatgaagtatgcaccaaaggcgtagtcgaaggcgccagagttgacgccgtccaagacaaaggccagcgtgtttatcgtctgcgtgccggcgacgaactgatcgatttagagacaatcgtcagatatgttcatgagacaattttttacttaatctctgaagataaatctgttcctgcttatgatgaacatctcaccggaacgcctctgtggatggtgctgatgacgccggcgtcgctggtgaaaacgccggcgccgaaccacatgccggcggcgaggaaggccgtcagcccaacgccaaggacaacggcgagctgcagcacgcgggcggtggtcaccgccaccttgtagtgatccttctttgcaaacgcgctggcaagcaaggcctgagattgatcgatcaatttaagccaaattaatcaagcagccatgcatatcatcggaatgtagctaagctaggtagctagctagctagctcacctggccggcgacagcgaggccgtcggcgaggagcgatgaggcgagccagacttgggcgcagatctggaacgccgccatggctgtcgcgccgtggcgcgccgcgagcgacgccgccagcgtcacgcagaacgttacggccaccaccctcgccagcagcagaaaccctgcagcatcacatattcagatcaatcaccactagcttcctcacctctgagatttgctccgataaaaaaaaaatatctcgagataccggtactcatggtatcaaatcgttttcgatcgttggatactccaaaatgattgagtaccgtaaggtaccgtcgtagcgataccgcgagataatttttgttggacccaaacaaatctattcacctttacttcttctactgatctacttggaagggaaaaaaaaagaaaaaacagacactgcacttcactgtccaaaaatgccgtgccatttttctgcttaccgcatccgaggaaacgacgaaacttgagtgattttagactggacgggatgacatcgaccttcctcacgagcttgcacagcattatcagcgtgatcaggtacctgaaatattaggacatatcacacggttaattttgggggaaattagtgttaacattagtggatataacggtctgacaagtgacaagagtgatcgatccttactgagaaatgacatgggcaatggctgcaccgaccacaccaaaacggcaggtgaatatcaggatcggatccagtgcgatgttcgctaggtcgccggtcactgtagaaaacgtaatgataaatcagtcattaatttcattgttagtggtagctaattaatacgagtaggatgttttatacttaccagttgcatataagggtgtcttggtgtccttgaatcctctgaaaacaccttgcattgccagagacagcagcacggccggagcacccagagatctcactaccaggtatcgcagtgcagggatcatcattggtgaaccctgtcattaatcgacacagtaattcaaacaccggatgctaatacagcaataacgaataatcaaaagtaaaagaataaccatttttttcctgtagaaaactgaaaaaaaatgcaggttattttcggggacgcactggattcaccagtggcctttgcatcttaaagagggtgatgagaaagctgtgaagattgggtaccaaaaattgaaagttaccattatgaaattctactcaaaatctagatagagttggagagtattgaattccaagtattgaattgttaattgaaatcttttgttgtgaggcttgttctagatgtgtttgtcgtctatttgtcttctatggtggtgtttgcttttgaacttgtttgtaaccgcgattgtttggtgatgtaatattgtggctatgtatatccttcgaaatgtagaggccggattttatttaaaacatcataaaaaaagaaatctgaaaacgagcagaaatgagtatatatatatatactgaccggcttgacgcccatgatgcgcagcagcggcttgccggcggcaacgaggaatacggcctggagcagaccgaggaacgcgcctacgatcagcgctgacgtcacggacggcacgaatctcctcctgcatttgccgacgccgacgccggcggcggcggccttcttgtcgtcagtagtgcgcaccgccgccgtcgagacctcggcgccattggtttcagctgaatccacacccaccacctgctgcttctccggatccgcgacggcggcggcactggcaccgtggcctttggcgtcgtggccgtcgtcgttgtcgtcgtcggctccggcggcgcccttgctgaggatggcgtcctcctcggcgacgaaggaggtggtgacgctgacgagcgggtagatgcacaccttcatgaccttgttgaacaccgcgatggcgacgcccacggcggcgatctccacggacccgatccggccgatgaacgccgtgtcgatcagcgacgccagcgggtcggccgtcagcgccagcgacgccggcacggcgatgcgcagcacctccgcgccgagctcgtccagcctcagcgcgctcctcgcgttcagcacgaacagatgcagccccgtcctcctcgccccgcccagcaacgatgtcgccgtcggcggcaagtggtcgccattatcgccgccgccgccgccggcagcatcagcattctcggtcgccggtggcgccgccaccgccaccatctgtttctgctgctgctgctcggtcaccggcatgtcgccggaagcagcagctgtcactgtcgctgtcagctggtgatccgcctccatggattcgggagctgatgaactcctcgccatgcaggtgttgcttagctcgtcgatctgcatgtagcataatgagtgccaaattaacaaggactaattatcatcagcaacttgctaatccgaatgaccgtacgcgcagcttacgtgcttgtgctgattaaggatgaaacagcgtgcttagtatcattaataatgtggatgcaaattaacaaggtagagaaagactaaccagggattaatttgagcaagatcacctagaggaaagcagcggttttggagccgtggtgggtggtggccaattggttcactcagctcggcttaaatagatccaaaaatcaggggagtctgtacgtgttcgtgcctgcactagatgtaacccgaccggccgtacgaaattacgaatggagtttgtatctgtggacagtggacacaaggagtggccagcagcaggcagcaagggaagcttgtatggtaatactcccaacctagtgccggatggaagcggatcctttgacctaactgtgtagttgtcactgatatatgaattaatcctactttgttgtggtttatatatcagtaattcaactgcacaacaagtaggtaagaggatctctttccgtgtcggataagatttatcttattagtattgtcggtgacatgggaccggggatatcttgactagaggtttggggcagccgcggtcacccacgtggcctgaccccctcgggggggtcgggcccgagggtgatgaggccgcccctccctctatctccccgaggggtcgggccgctcccgtttcgtccccgagggctggggcgccccgaccccctgagggtttggcgccacgtgtgtgggttagatgagcacagcggcgctcacctaaccgcgtttattgcgggttggacgagcgtctcacgccgcatttaatgcagcgtagcacatgcttatctagtccgtgatcggtcgcagtgtgtgaccggtcacagaccggtcagatcgcgggttagggggcaacaggcggcctgacacacgcctcgccccgtcccgtcggaatgatgagagcctccaggcactcgtccctagccggagccggcgtggggactcctggagttggcacgtcagccccggctagatacattccaggcttcatcgcaaccattgcaaggaagtcattgtatgaagaagggcagacgtgtagcatgctaaactgacacgtggtggacaagaatgaccggtctgtgactggtctgacgccggtcgcgtcatcagcaaacaaccgtgcttccacgttgcacctgcttccggcggagtggaggttggtatgacccatcccatcggagggccattcggacggcagccattgcaaatctccgcccattaatgagggaggacagggttatcccggtgtcagacgaaggtacaagccaagttttggtcaaagtaggatgggtccccacccaaaagaagggtaggtagaaatggtgtatgtggtatccccttgagatataaaaggaggaccatgcctaccaagagggggggactgacggactgacggacggggggaaaagaaaaagaggggactgggaaaaagagtagggagagggtctctagagttcgaactctcttgctctccagctctttgtaactccttcatacacagatccaccagaacacaggagtagggtattacgcttctcagcggcccgaacctgtctacatcgcccgtgtcttgtgcatttactctctcgcgaaccattccacagatcaagggcttagaacctcacttagcgcccccggccgaaccggcaaaggggggcccgcgcggtctcccggtgaggagccccacgctccgtcaagtattaagaatctaaacaggttttatgttccagtagtaggttattatattttgttacgaaaagagtatagtataaggaagctaaatcattcgcatgtgagaccgtaacaaataggactactcatatgcgagtgactcgggcttaattcaaatcagcacaatttggtttagcttttcaacgacacataaagtgagataagacattagcatataattaattataataaactttaaagataaatttatttaaagaaatttatatataaacagtttttgaaaaaaaaaacataatactatttaacaatttgtatagtgtgctaacggaaaatgagaaaattgtagtttagagttgaagaaaataaaatatctcaattgtatgtgcagcaacgagggaggatgatgtgctcaatgtcttttgacaattaatgattagatttaaatactgaagtttcgtattctatttgttttaaaatataaatgattttgattgtatatgacacatcataatactataaaattaaataaaaaacatatttagaatcacattactaagttaaaatcacttatatttttgaaccaagagagtgacgtattgcaaaaatgccgagcagcgcagtcgccatcggcggcaactggtcaccgtcattgccgccgctgccgccggcagcatcagcattctcggtcgccgccgcctttgctaaagcagtacaccgccgccaccaccaccatctgctgttgctactgctactgctcggtcaccggcatatcgccaaaagcagcagctgtcacgcagtggcggagccaggatttcagcaaagggtattcaaagttgaaaaaaaatcttacagaactcaaaaaattggactagcaaaatttaaagtataaataatagcataacaacatagtggcaatgacatgtttaaaggtacaaacagtagcacaaaagtaaagatatctaaattataaatggtttgaatgaattacatgacaaatgaaataaattgtgcaaatcctttgtatctaattttgtgaaatcctttggataaaattgtgcaagcttaaccaagttttccttgtcataagcagcaaatgaatcaataggattgaaggacgccatgcaaagaagcaactttgtgtttacctcatcaaatctatcattaaactctcgaagttgtctatcaatgatgcttataaacataaaacatgtcaacatggaagcgagggaaattcttgacctttttgaataatcttttagatcttccaaccggcttgtagaagccatccatatcaacaactttgatgccatgcttcacacaaaaagaagtggcatatctttcagaaaagattaccattcatcttcatcatcctcacgcaatagctgcaattgcatctttgtattaattagttcaattgcattaccaatatcttgatccctcagctgctcagcgtcggcagtcgccgtcgaggcctcaggtgtgaggcgacgaccggacgacgcctcggccgctcggcggcggcagcggacggcctgggcggctgggcttcggcgatggcgatgctgcgtcgaatcagggacagggagtcagggagatgaggccggtggtgacgcgctaagctgccgagcgctgagccctcgatgcgccatcggccgtcgcgacgtcgcccgtcgttgcggagtggaggcgtggattgggaggagtgagaactggactggggacaccgggacagggagccagcagccagggagatgaggccggtggcgacgcgccgtcgccgagctgccgagcgccgagccctcaatgcgccgtcgcccgtcggcgggagtggaggcatggattgggatttgggaggagtgtggacttgggactagggtttagtctctttttgggccagtagcagtgggcttattcgctggggcaatgtggggaggaatttacgggctgctgctaataagtgggctttttttcatttgagctatacatgctgcactttcctctaactttttacgtatatatgcataacatacctatatataattttttttggtaaaattctatgggtattcacgtgaatacccatgaatcacatgggatccgcccctgctgtcacggttagtcatggattccggagctgatcgaactcctcgccatatgcaggtttgctagctcgtcgacctgcatgcagcataatctgagaattaattatttgacttaagtactgaagtttatcttaccgtattgcaaaaatgtactttccttgagaatacagaacaaaaaaaacatttctatttacttcttttttttgttagtaataaaatggttcggtctgcaaaaactgataaaatacggcaccatcctcacctctagatttaaggtggtacttcaagttttcactgttgtttctggaaaaaaagatttaattcactatttctacgcttacaagacaagtaactacttagaggacggttgagtaaaatttctcttgcattgcctagacaaaataaaaagctataggacggtgcatttacaattcgcaatcgttagataagttgactgctaaatacgagcatatactcaacaaggtagaaaaggaggagacaagcgagtacttggtccttcatgatccgacaatctagtacatcaagtaaatttgaagcaaaacggtagcaaattttaaaccccctttcggctggtcccaacatcgcaagtttgcaactcgacataaagtgcctcacactatttagagcttttgtaaagctttctcccatacataaataaagctagctatatgcgaatttcaaggtgagtgaactagggcaaaatgcatgtacgtacgtactcaacgatggtgcgttgcattattgcagagggacgcagatgaatgaactgaaatcgtagggacttgtgcgatctgctcgtgggccggccggccgtggccgtcatgacgcgtgtcatgcatggtgtgtcgtctaggttgattgattggatcgtaaaattcggatgcatgtatgtacgcatatgcgtgcggagacgaaaggtagaccggtgcggacgtgcggtctctgccttttgacgataagcaaagcgatccagggttaggctgagatgaaaagccagcgaccaaaaagaaaaaaaaataatgatccgaagggagagacttctctcaaaatattttttttaaaaaaattatgagtatgttgaaaattgagtacggaatctaaaaattaaaactacacatctttttatcactgtactattaaagtacataaaaaaaaaacagcgatccgtgcatacgcatatatatggctgacgaaaaagatcagtttctgcggattttcgagacacacggcttggaatcgatcgatttcaaggagagattttcttttctggacaaattcaaatccagaacagtaaattttgatcaaaacttataaaaacatggtccaaatttaggccttaacgtttgtacaaaccttgtaacctgtggtcaaaatttcatttataaaaactaattttgattattttctttttatcgtactccttccgtctctaaatataagtgattttggttggatgtgacacattctagtacaacgaatctgaacataaagcctgtctaggttcgttgtactaggatatgtcacatccaactaaaatgtcttatatttaaagaccgaaggagtagttttttagcattatcctctaaatcgctaagaatgaatatataaaatttttgtttataaattatattatatgtttccaataaaagttactctctccatttcatattataaattattttgtttttttactagttaactttccaagttatagaaaattttagttgtgtgtcctcaaaacaaatatattgttgaaatatattcaatgctagtgttttagaagctactattttgtatacacttaactaaactgtaaaaatgtttagcaaggaaaaaatattataatatgtaatggaagtagtatgattttttaaacaactctgatccacttttaccatccgggttcatggtccggtgcaaggttttatcatggttatcacgtaccgtaatcttttttagttttataaatcacggtatattcacggtaacaggaaggttatcaccgtaaccactaaaccatggttgtcgcccaaaccacctccctgagatgcaaaagtgagcagagcagggcacggcgaccagctgcagctatactgtgactgtgaccagtccactagtggacggagctagagacgacgatcaaaccaaccatgggtgacgtactagtaccagtattaatattactgcagatttgcatagttaatttgtgagatagatacggcggtcgggaggagtatacgtagcagcagctttaccggcgacgacgggaggggaggcaaagctttaccggcgaccgatacgtacggagaggagccacgtggcgagcacgaggagatggaatgccatgctagctacagcaaatctatctatcgcgatgatctagacgattcgattcgatgatgcttccaggtagtctcgctccctagcagcagcaggatcaggcgacgcgttgctgaaccgcgctgagatagcgcctggctcagatcaccgcgccatcagctcaaccaaaagctagagagagaatcataccattgttttttttaattaatatactactccatcagtgagatcaatgaggcggccggcaggtgcttcaggacgaagttaaggttagtacgtagggcaatcacaactcatagtgtctataagcagtgtttatggtgccatgtcaataaaacatcataataaaaactgcactctataacccatgatttcttaaagtggaccattaataaatacatcatctctcttttctaccaattatatttattcttcatctattatgaagacactattctctcctaatgcaaagcttgatagtgtctagtgcataggttctcgtgttgaagctgtgtcttgcatgagacccagtttcttcctctcttcactctctctcttaattaatatagtgccacataagttaaaagtcctacatgtcaatatagttaattccatagacaccatcataggtggagggttgggactgcccttaggtaattcaaaagaaaaaacactctactaattaacataccaagcgaatctagaatgtaaattgagaggtgctactgtaaaaatgtaatatgattaatgcaaataaagatatatcaacaaaagtgttttccaataaaaaccagatgcgcatatgatcaaaagaactttctcatttatggctatattaaaatgttcaaaaatatcagtgaatatattgttttgtatactcgaagtaagctatgttttatcagtttggtagtagaagcagtgaggcagcctgcaaccttgctatccggggaatttcttcactaataattacttcctccattttatattataaaattttctagtattacacatattcatatacatgttaattgatctagacatatcattaacatctatatgaatatggacaatgctaaaaagtcttagaatatgaaacggatagagtaattagattagttaatgactaattagagacaggaatggatccgctactgctaccaatttctctccttgcttgatcgaggaacggaattcaggcagcagatcagcgcgtcgcagcgccaggaaacgcagacgataatcacagacatgcataatacaaaatcacaatgcactatacagtaagtaagattttaacgttcgttcggggatgtagctcagatggtagagcgctcgcttagcatgcgagaggtacggggatcgataccccgcatctccactataacctccaattttctcttttgcttcgagtcgagggattagtgtcttttttttttatttgttgggctttttcacacactcgtttgttttccaagcccatcatgctgatctgctacacgttgtacttctgggccggatactgctcggcccaccatgccttgcaaccgcagtcccaaacagaagtgggccgtcacgtccaaaattccctaatcaaaagccacccgggttctcctctgttcggtcgggaaaggaataagttcaccggaggtccctcaaattgacaccgagattttttaaggtccctaaactagaataccagaaatgtgtacccctaaaattactaaatctgtccgtagaaggtccctcagcagtattgactcagtttttgcccggttagcaataacatgtttctctaaatccgaacaaatgaaaactctatgcaccaaatatattcctctatcattatatttgctaaagatatgaaaaatagcattagttggacatggcaaatcagacttagcaaataatttctccttcaaattatcgagctcacaaaaatcatcaaactgaacatagcccaaagtatttaaagaagatagcaatttacgttcctcaacttcattagcaatgtgaacagcatgcttaaaatcagcacacaaagaaatactagaaatagcatgttcattcactagttgtgtcatggatataagtgaagcattatcacacaactcttctttatcataaggaacagcgagtaaatcaacttgtgacaaagaaattccagcatttggttccactaacggttgcactactttagcatgaaaagtggacaaatttacttcgttaacaacgcactcaccttgattaatttcagtaccatttactttacctttgatgtcctcttcagatgatggaggtgcctcgactttgagtgtgaacaatgggattggcggctctttcatgtctctctcctccttttcatgattatgcacttcctgcaaatgattagtaatagaagacaaaaacatagcatgttgcttcttcatgtcctactctattttactttcagcattgcaagcaagttataacaaatgagaaagagatgtatatctttgacaatcaagcatgtcctgaatttccttgttaagcccacgtaaaaacctcaattctttagcttcttcgcattcatctaaaccacaacgtaataaacaagcttgcatatcatgatagtatgaagtaacagttatggtatcttgttttaaacattgcagtttgttgagcagaatatcagcataatacatgggaacataaacatctctaaaatatcgtttcagatctttccaagattgtggtattttgttatgcctacaaagatgtttctaatcattagaagcatgtttaactaaaacactagaggcacacataaccttttgtttctcagacaagacatgcttttgaaattcactatcaaccgctagctcccaattaatgtaagcacgaggatcatagtttccctcgaaataaggcagtgcagatttgatcttacctagaacatcatcacttacctcataatggtcatgttgatccctcctcatgtctcgacgaagatgtcgatgttgagcacagctatccccaattatgttgcgtatccctgccattgttagtagaaaataagaaacatacacaaaaatatgtgcatccctattaactactaggtagtgtaggttcaaatttcacacacactcaagcttttaactgagctcttacaaattcttaccaaagcaagcggaatggtgacgtacaccgactcaaccaagcaccccaatggaggttggatgtatcgatgccttagcaaacacttgctgtacggctgcagtcaaatctgtatagctctgggtaggctaaagtatgtagcaaaggaatagcaaatgctcaaatcagagaatgcaaagttgaatgatcgttcaaagtcaagtaacgtactggtcctaggctagaacgtactagaaacgcgagcctagacacaaacgataccacaagatagcactaggaacaactcatgcacaactttgatatatgaagttcagctcaaacataacagtattttctcttttatttctttcttctttcttcttttcttttttttctttccttttcttttctgtttttttgtgcggcttttttttcttttcttttttatgcacctttttgcctttttttttctcactttttcttgattttttttaacaaaaactgactcaaggaccttaatgtaaggttacagggactcaaacataaatataaaatttacagggactcaaatgtaaaagtctaaacccaaaattaaaattatacaaaaatggaatgctgaatttatgccggttccgtttttccaaacagatctcgaaaccgacaccaaacaaaaattcaccaaggtgtttgacacaactcggaaccgtgaaagggagggagggagtcggactcggccaaaggggcgagtgggagtcagccaggaggtggagtggatggtagccgataattaggatttggtgtatgggataaaaaggaaactgatttttaactaatccaatctattatatctttccaaaacaaacttgactacttccaaaatcagatatggtaattcaccttcctcctctcatgcacgacacaagcacggccaaaacagaagcacggcagtcagcaaacccaagatgcaactcaacaactccaaatccaaccggtagaaacttttgaaaactacaaaaatagaatcgtggcagcaagccgattccgttttcgtaggtcccgacgataacagagacacggaggcgacgacgactctggtataaaacgtgaccagaactcgaaactctaaacgaactagacgctaagaccaacaacacgacgagacgatgcaacacaaaattcaacaaagcaaaaactgaaaagaacaatgcaatggcacaatatggctaggtaaatgatacggattttttttgtatggctattttctggttatcggaagataaaaactcaccgagtaacgaaagctctgataccacctgatgaaccctgagttcctctcaacactcaaggttgttgttggcccaatctttcagtgagttgtgataactacgatttgggagaaacgttgacgatccaactacaaccgtacgagacattgtgatgcgccttagcaatcgatagacctctccgtgggttgttgatcttgccggtgcagatcaaccctattcctgcaagcaaatcgaagaaacaagtaagaccaagataaaagcaatctgatattgcaaataggaatttaatacaaatgataagttggggttccgcagaacaagcagacgggcgatctagctgacacgcgcgctgcaagcaagtagcaatggctaaattttaatctatcaaaacccaagaaaccctgaaggggtacctagctatataaataggggtggggggacgacctaggggtgcctagggtcgtactccacctgtttggggcgcaccccacatgggccccacctaggccggggtcccaaatgaagttacaagcccataggcccattataggtgacgcaacaccttgtgcctgtgattccagccacacgagatggaattcggagatgaggctggatccgttggaaagagggctccaaaagctttccatcaagtactcacgggccgaaaacggaggtcgtatgcagattcggtggccgtttgaagtcagcagtgtagcaggtggccgaataggattccggcacttgcaggactcgaacttgatatcttgttgttcatccatgatgtgagcaacggatgtatccgtagtagccatggtcacatcaaggtccctcggcagtattgactcagtttttgcccggttttgctgacgtgtcgcgctgtgggacccactgatcagtccaccgttggggagttaatagacggggttaatggaggggagcgcagctagccagacctccattctctctcctttgctcgaaccctagctgagcggcgaccaggaggcgacttgaaggcgacggcgggtttgtcggcggcggcgagctggccgtggcgccggcgacaagcatcgttttcgtccaaatgcgcggcggattccaccccggttagtaccttgttggctcggcattgcatgctattgtagctggtactatgttgattttgggggaagatttaaaatgtggtagattcgttttttgtctgggattcggtgtagaggtcaagtagtatattgtcccatatgctttaggtgtagtaatgtttttgtatacccatgtgaatctgggtggtccttttttaattggtgttaggtgttaactaggtattagggatatggatgtagtgtagttttaatagtagagtagtaaagtgcttctttttttatttttttagagctggcagcatggaacccttgggcactctagcagttaggttccatttcaatggggaatttgtcaatagaggggagacaaaagttgtattgtggggggagagaagcaatgtcatccatagacagtg

SEQ ID NO: 1287 - DNA, 4264 bp, Oryza sativa
atgctgaggagcccattgtaattgatgttgatgaagaggaacacaatgagtatgaggctgaaatgaagttggatttggatgaagaatcagaggaagatggagatgaggataaggatggggatagaaaggttaaagtgaaagataaggacaaagctattgtggacaaagggaagggcaaagctgttgtgggtgctggtgaaggtaaagcaatggaagtggatgaaagtgctagtgataggaggattgtcatttatagggaaaggtcacctttgagggaaaatgcacctatgagggagaactcaccttatagggatacctcacccataaacactgtcctgccttctgacagtgaggatgatagtgattatgtaggaggagatgattgcccttctgaggatgatgaagaggctagggagatagaaagacactacaaagagttgaagaggaatatgagagctggaaaggttcatgagctagatgaagttgtgtttgaggggtttaaaagtcagtcagctagaactgctggaggtccagaagatggcaatgacaccccatatgcagatagtgatgatgaagactcctatgatgaggttggcagtgatggtgagcttgtcagaagaaagggcaagtttccaaggtttcagaagcagccaggggttcctgtttttgagctaggaatgaagttcagctctaagcatcagttcaagaagaccattataaaatatgccctggctgaaaggaaagtgattaattttattaaagatgatcgtgtgattgggctagctgtccttgggtgtgtttgctgtctaagactacaagaagtgatagttggcaaattgccacttatgacagtatgcatgcatgcccaccaaggagggacagtagacatgtttcatctgttaggatagcaaaaaaatatggcaagttcattgttgctaaccctggttggccactatcccatatgaaagcaacagttcaagaagagatgtttgctgatgcatcaatttccaagcttaagagggccaaaagacttgtgatgcagaaggcatttgatgtgaccaagggccagtaccagaagctttacaattatcaacaagaactgcttaggaccaaccctgggagcactgtggtgatcaacagagtgataggtattgaaccacctgtgttcaaaagaatttacatttgccttgatggatgcaagaaagggtttatggctggttgcaggaaggtaatagggcttgatggttgctttttcaagggatctacaaatggagagctattgtgtgctatagggagggatgccaataatcagatgtacccaatagcttgggcagtggtctataaagagaacaatgaagaatgggattggttttgtgacttgctgtgcagtgatctgaaggttggtgatggaagtggatgggtcttcatctctgacgagcagaaggtaatgctcatgatccactgtttgcttttatgttctgtcatttctgtcattacagaatgcatacctaatgtcttgtgcatgttactgtcaaatgcagggaataattaaagctgtctctaagtgggctctagaagctgaacacaggaactgtgccaggcatatctatgccaattggaagaggcacttcaatgataaagagtttcaaaaaaaaaattctggaagtgtgccaaagcatcatgcagaatgcttttcaacttggcaagagcaaagctagcccaactgacccctgctggagctcaagcaatattgaacacacacccagagcattagagtagggcttggttcaggttaggatctaattgtgactctgttgataacaacatttgtgaatctttcaacaaatggattcttgaggctagattctttcctatcataacaatgcttgaaaccattagaaggaaagtaatggttaggatccatgaccaaagaaaatgttctgatagatggagtactgtcatttgccctggtatacttaagaaacttaatgtgtacattgctgaatctgcattctgccatgctgtatgcaatggggctgacagttttgaagtcaagcataatgagcataggttcacagttaacctagatatgaaggagtgctcatgcagatattggcaattgtcaggtttgccatgtcctcattgaattgcttgcatctactataggaccaacacactagatgggtgggttgctccatgctattcagtggaatctttcaaaaaaaacctatgcccattgcctgcagccagtagagggcatgactagttggccagatgatcctagagagcctctcaatgccccaggatacataaagatgccagggaggtctaagactgaaaggagaagggagcctaatgagccagctaaacctaccaaagcttccaaatttggcacaattatgaggtgcagatcatgcaagcaacctggtcacaacagcaagggctgtcacaagcacagtggggcaggtggtagcacatctgctccaggaaatacagtcactgcaaataacaacttagtgttgtcaagcacacctagcagcattgcacaaagcaggaaaaggaagtcagctgagctcagtactagcacatctgcttgccacactaggaagagaacaactcctacaaaaaaggtatgtcagccagtccttattcaattaaacttttgaaattaacattcatttgctaacaacactttgtttcttttccttctagtcagcaaacacaaacatttcacttgtgaaggttgcagccagtgctagggtggcaactgaaaaaggtggttcagccagtgtgaaccttcaggccatagtgccacactctcaatgttcttcttctgcttcagtgaggatcacttctgggaaagcaagtgtttatgtgcaagctcaagaaccagccactaccaatcccaagaaaacacctgtaggtccactgatgctgattcccctatgggaaactgtcacgcccagaaatttaacccaaatttccagactattttgcgttttaaatccctgtccaggaccagccagggtacacaaaacgacaagtaatatacagttccaaacgtaaataaagcgtaaaatacttacggaagaggcacttagtcctcacaccgaaacagaacgacagcagcgaaaaaaggcgatcctagcggggcttcagctctactccacaggcaaaactcaactggggtctgagccttggtcctctaactccatcttcagctcagaagcactacacttctgaaaatggggaataaaagcaagactgagtacaaccaccgtactcagcaagccacaccaacgatgcagtcccctctcgtgcctaggtgaatccggaagcgacagaggccgtcgcagggcccgccctgctccatcacgcccacccttgcctggatgcgtcgactagaggaaagctacactacaagcccagccgttgcccacgctggcttgtggtaagtacgataagttcttctagggcatcccgcgaaccggtccttaactgccatgggtgcaaccagcaaaaccatgcacccatagcccaccattcagtcgtattttagttggataattacgaccacgaagcatggccagatgtctcgagcacgcagctcaacaagatactagaatgtctaatactgcaattatcccatcgactgagctagtggtaattaagcatggctaagcatatagttctagctaggtcacataagtaacatgagctagtcgatttattacccaatgttgacaaaggacatatatcaagtaaacatgacacaagcgagcagataggtaaaaccctgaccccatgtaattagcaaaatatgcatatttatttgcaaacagtaaaacatttgtaaattgggatcaacatgctcaaggggaatgtgtgacttgtcttgcttcttcaaacaatcttccgaactcttatccttgcgaccgtgatcttccgaaacgacggattctacacgcaggcacgcaaaacgaggaaaaactctaataaaaaccaaggaaacagtacataaaaagtaaacaaacatgtagagctcaattttagatgaattttgcaagttgaatggctcaattcggagttcgaatgaattagatatgaattttagaagttttgagccatttaaatgaatttccagaattattaacgaattattgtgcaattgttaattattttatcaaaggaaaaggctcctgctggcgtcatcaaagggtagcggggccgacaggcgggccccacacgacagcgggcaagggag

SEQ ID NO: 1288 - DNA, 1257 bp, Oryza sativa
  unsure (1)..(1257): unsure at all n locations
agtgtgcaattgcacccttgatccgcgtttagagatcccttnnnnnnnnnnnnnnnnnnnnnnnnnnnnnnatgtagctcatatgtagagaaaatttatcttgcactaacaacctttttgtatggtagtgactttgaaattgattatggatccgaggaacgcgcatccatagtttacaaaacgctcgctgttgataaggaggtaagaagttatagtacactttaacatggttcttgttttcataaggagtcccaatgtttcctcttttcttcatgctagcttgttgagaaaagaactcgaatcctgtggtatttatcttgcagttgcaacctgacaaggtaaagagggagatgtctgtttctggtggcaagctcgtcgtgtcagtaaatccattcttaacaattgctatcgattgtgtttactttgattcacgatgtgtactgatacaaaattttttgaatctaattcaggcactttgaagctgtagaggctttggtttccttggcgggagggcccaattttcccggggcgtccagggcgtttgttgatcttacagtactggttaccaagcttgttgaagaatatgggcatcccaatggacganaaagcnnnntntaactanttttacccgcccgtctcttagaaaaatgttttacaacacctttgagcattcataccttcttttatatcatattatgtgtgttcttcgtttcttaggccagaaatctacaagatagaagcagctgttgtaattccagatttcttgaatcttggtatgggatttgcctctcaagagtaactctgaacatacttggttgggatagtagtcagttcttgtccaccacaaaaatcaagacaagtggtgctcattgtcggtcaaggtgtcattagagcaccattaatcaagacaagaattctaaactaatctcataggattaagacatgcattgatccaggtgttaaacccttgggcagatttaggatgtcgatgtgccgttctctgaatccttcagacagatctcgatgcaagctgacagaaatgaaaaggcagattctgaagaaggaaattcattagagtaaactagtcatggttggagagtttcacttaaacttgctgaccgatgcaaagctccaagtcaacttgcaaccaataaagtgacatttttcttatgatcttatactaacatgtgtattattgccctgatgacattggatattaagtgggttgacaatgagatggtggaatnctgtccaccc

SEQ ID NO: 1289 - DNA, 743 bp, Oryza sativa
  unsure (1)..(743): unsure at all n locations
gccgctttgaatcgnctgtttgaaaagcnnnnnnnnnnnnnnnnnnnnnnnnnnnnnnnnnnnnnnnnnnnnnntcacgtaatacggatcaaagccaaaataatccacaagtgtaaactagtatgacttacactttttcatcctgaaggagaatggttggctgcaactttggagcagattaaattgaactcctagaaatctccgccggcggctatctgaacaaatcggtgtttgggattagcagcggaaacacatgctagcatggacgcttcactatgaatattagggctattgagatcctcatcctctaagcccaatatcttagcaaactgtgctatggaaattttgtgcctaacaccctcagtcatccactttacataaggagttccctttctagtagtaccaaacaatgctgtcgcatagaattgtgcaatgacctcctcatttcaatcatactccaaggcaagaatatctcccagattcttgttgcgacaaacttgcattgcttggttgaacacttcattgttcttcttccttatgtaagtcccatccatccacttcatctcaaccattggattgtctctagctataatcactgagttatacccatccaattgggtgaaacgtctaaaacgaggatcctgtgactcctcaggctgtgtctttggatcaagcanaccggtccttttgcacttggcaagctgatgaaggtagtttggacttggtctttcaaatgtgtgcat

SEQ ID NO: 1290 - DNA, 726 bp, Oryza sativa
  unsure (1)..(726): unsure at all n locations
gcggccttgatggacctacnnnnnnnnnnnnnnnnnnnnnnnnnnnnnnnnnnnnnnnnnnnnnnnnnnnnnnnnnnagctccaatggacaggcagaagaaccgtgctgagcgctgagagatccccttataatttccccaaagcgtaaccatgtgtgaataaattttgagctagtagggttgcagccacgagtaagtcttcccttgttattgtgtagccagaatgccgcaaaacttccatgcctaagcgaactgttgagagtacgtttcgatttctgactgtgttagcctggaagtgcttgtcccaaccttgtttctgagcatgaacgcccgcaagccaacatgttagttgaagcatcagggcgattagcagcatgatatcaaaacgctctgagctgctcgttcggctatggcgtatgcctagtccgtaggcaggacttttcaagtctcggaaggattcttcaatctgcattcgctttgaatagatattaacaagttgtttgggtgttcgaatttcaacaggtaagttagttgctagaacccatggcttctttgccgacgcttagtagattttaggtgacgggtggtgacaatgtgtccgtggagaacgctgattctttagggctttagagcgaagaatattcaatagaatttggcctgcgattggattgtttttaagcagcctcttatagcctatagtctttgagtgactaggtgacatatgatg

SEQ ID NO: 1291 - DNA, 630 bp, Oryza sativa
gcgtagacgaagaatcctgaaaaatcttccaagatcagggaccccaacgtcctcctattcttttcgggtctgcaaactgttttccaattggaccaagcagctgccagataaagtgtgatctgggtctttcacctttccaaaaaaaagaaccttcgaaagcggtcgatcctcttgaaaacccatttgggcatgtgcagagatgaaaggtggtgaattggcatggagctaaggaccgtttttaccaacgtctcgcgccccgaagaagtgaagaatcgacctttccaagtgggaagcctttcccctattttttcaatgagggggagaaaatcaattttctttaattttcgataatgaagtggaaggccaagatatttgcaggggaaagatttaacgatgccggggaaagcttgcagcaaagaagcaaggtctacctcttcacacctaatagggaaaatctctgtcttggcaccgtttgtatgcagaccggacactggcgaaaacaattaacagctaggtaaaaatgttaagctcagaaatgttcggctttgcaaacactgcaacgtcatcggcatataacgagcatcgaaatctgacccgatttctatcaatcggggaaagtatggaggtatt

SEQ ID NO: 1292 - DNA, 531 bp, Oryza sativa
aataagcccacgggggtcgctggggagtccatgccttgttttataagggggtgattatgatccaggaatggtgcgctgctttgaattgtgttatgcgaagggtattgtcacaatctctattcgggtacttgttaagtatcgcgacgcatagttgacatgatgttgaggttgtgtcttgtgggtacagtggtacacctctggccagagtaaaactattcgaatagccgtgcccgcggtcataggcgggtctaacaatgtctttcgtgattagtctcacacttctcaccataataaatgatgatataattggtaataatttatttagcttctggtttggagatagatctgtgcagccgggtatggttgttcaggatggttgggcctgtgcagtatgggtgtgctgttcagtgttgattaatattgatgattaattactctattgttttataattctcaaatgtttgctaaatgctgcttttgcaaatgagccctatattatgccatcctttggtatccatgtgcacttgcata

SEQ ID NO: 1293 - DNA, 655 bp, Oryza sativa
cgtctgtggagtttcctccaagttatctgccacaaacatctggggcgactttcttaaagaccatgtatgaagcagacgtaactttcacgtttggcaaggagaattctcggcaattaagtgcgtgctcgctgttcgatcatcagtcttcaaggcaatgttctttggtgctacgaaagcgaagccccgtaggagcaatatcaaaattaaagatatgaaagggggcgttttcagatcattcttacatttcgtatacactgacttgctgcctaatacgtcgcaaaacgtggtgatggctcagtaactacttgtcgcggcagatcggtacaatgttgagaggctgaagctggtatgagagaagaagctatcagagcacattgattccaacatggtggcaaccaatttggctctagttgacaagcacaattgtcatcaactcaaggaagcttgcttcaagttcataattgattctccatctaatattgaaagcatggtgaaaagtgatggttacgagcatctgaaaaccagttgcccatctgttcttaatgagcttgctgcgagattgcttcctcatgaaatgaaagcagcaaaacaaataactatggctcctaggtagttttcttttttctttttaacttttgagtaattccatctgtaa

SEQ ID NO: 1294 - DNA, 13473 bp, Oryza sativa
tattcggattagtttcctagtaggagtcctattaggtgtctttctattatcccctatatatactcttgtaagccgtacgggaaggggtgacgttcctattatgattcccctacgtttgtaatcatctcctctatagtgatcattgctggtcggcgcccgtggtttttcccgcaagggttttccacgtaaaattcgtgtctccgttgtgcatatatttttataacaagtggtataatagcattggagattcgatcaacaactatcccatcgtcgttctgcaattcggcgagattatccaccagcgcacgttcatcatcggcgacggcaggcgcgtgtcgtcgctcgtctcgtcgattcgtctcgtcttcgtcgtgctgcctacgcacgcgagaaaaaacaggaggagcagcagccggtctccacaccacacgtcgggggaggagaaaaagcagcagaaaccaatctaattgcgcacggatcccaaagtgaagaaaaagtagggcaagtcagtcagagccatcatcgccctgttctgtgaattcaatttcacgttgagaattgctatggccacctaagcttgtgtaccaggagattccctgatctacgctacgtgcacacataaagtgcacccagaggttcgtgattttgctaggtttaccctaatttcttactagcaaattttaggattaattcctatggcgagtttgaagtatgatctaccgctcctggaccgagacacaagattctcactttggcaagtgaagatgcgagccgttcttgcacagcaagacctcgatgatacgctttctggatttgacaagaggactcaggattggtccaacgatgagaagaaaagggatcgtaaggctatgtcatatattcatcttcatctatctaacaatattttgaaggaggtgcttaaggaggagacagccgctgggctgtggttgaaactggaacagatatgcatgactaaggatctgaccagtaagatgcacctgaagcaaaagttatttttgcataagttgcaagatgatgggtctgtaatggaccatctctccactttcaaggaaattgttgctgaccttgagtctatggaggtaaagtatgatgaaaaggatttaggccttattctattgtgttcattgcctagctcatatgcaaacttcacggatactatactttatagtcgtgatactctaactttgaaagaagtttacgatgctttgcatgccaaagaaaagatgaagaagatggtaccctctgaaggttcaaattcacaagcagaaggcttggttgttcggggcaggcaacaggagaagaacacaaagaaccaatcaagagataaaagctcaagtagctaccgtgggagatcaaagtctagaggcaggtataagtcatgcaaatactgcaagagagatggacatgatatctctgagtgttggaagctacaggacaaagacaagagaactggaaagtatataccaaaaggtaagaaagaagaggaaggtaaagccacagttgttactaatgagaagtctgatgcagaattgcttgttgcttatgctggttgtgcacaaactagtgaccagtggattcttgatactgcatgcacctatcacatgtgccctaatagggattggtttgccacctatgaagctgtgcaaggtggtactgttttgatgggtgatgatacaccatgcgaggttgcaggtattggaacagttcagatcaagatgtttgatggctgtatcagaacattgtcagatgtgcggcatattccaaatttgaagagaagtctcatctctttatgtactcttgatcacaaagggtacaaatattcctgtggagacggaattttgaagataactaaaggctctcttgttgtgatgaaagctgatattaaatatgctaacctgtaccatctgcgaggtacaactatattaggtaatgttgcagcagtttctgattcattatctaattccgatgctactaatctttggcatatgcgtcttgggcatatgagtgaaattggtttggcagaattgagcaagcgaggattgctagatggacaaagcatcgggaagctcaaattttgtgagcattgcatctttggcaagcataagagggtgaagttcaacacatctacacatactactgaaggtattcttgattatgtgcattctgatttatgggggcctgctcgtaagacatcttttggaggtgctcgttacatgatgactatcgttgatgattattcgcgaaaagtttggccttatttcttgaagcacaaatatcaagcttttgatgtgtttaaagagtggaaaactatggttgaaagaaaaactgaaaggaaggtgaaaatccttcgtactgacaatgggatggagttctgttctaagatattttaatcatattgcaagtctgaaggcattgtgcgtcactacaccgttcctcacacacctcaacaaaacggcgtagctgagcatatgaacagaacaattatatcaaaggcccgttgtatgttgtctaatgcaggtttgcctaaacagttttgggcggaagccgtttccactgcttgttatcttataaatcgatcacctagctatgccattgataagaagactccaattgaggtatggtctggttccccagcaaattattcagacttaagagtatttggttgtactgcttatgctcatgttgataatgataaattggagcctagagctattaagtgcatttttcttggttatccgtctgctgtgaaaggctataagttatggtgtcctgaaactaaaaaggttgtgattagtcgaaacattgtcttccatgaatcagttatgttacatgacaaaccttctactaatgttcctgttgagagtcaggagaaagcaagtgtggaggtggagcacttgatcagttcagggcatgcaccagaaaaagaagatgttgctattaaccaagatgaacctgttattgaagattcaaattcttctactgttcagcagtctccaaaacgttctattgcaaaagataggcccaaaagaaatattaaaccttctcaaagatatattgaagaagcaaacatagttgcttatactttgagtgtggcagaagaaattgaaggtaatgcagaaccttctacatattctgaggctattgtttctgatgattgcaatagatggataactgctatgcatgatgagatggagtcacttgaaaagaatcatacttgggaattggtgaagttgccaaaggagaagaaacctatccgttgcaagtggatcttcaaaagaaaggaaggtatgtctccaagtgatgaggcaagatacaaagcaaggctagttgctaaaggttatagccagattccaggtattgatttcaatgatgtcttttcccctgttgtgaagcatagttcaattcgcactttactcagtattgttgcaatgcatgattatgaactagagcaaatggatgttaagactgcatttttacatggggagttagaagaggacatttatatggagcaacctgaaggttttgttgttcctggaaaagagaacctagtctgtaggttgaagaaatctctttatgggttgaagcagtcacctagacagtggtataagagatttgactctttcatgctttctcagaagtttagaagatccaattatgatagctgtgtttatctcaaagttgttgattgttcagctatatatttgtttctttatgttgatgatatgttgattgctgcaaaagacaaatcagagatagcaaagttgaaggcacaattgagtagtgaatttgagatgaaggatttgggtgcagcgaagaaaattctcggtatggaaattactagagaaagacattctggcaagttatatcttagttagaaaggttatattgaaaaagttcttcgtcgtttcaatatgcatgatgcaaaaccagtgagtactcctttagctgcacatttcagattatcttcatattaatgtccacagtcagattatgatgttgagtacatgtctagagttccatattcaagtgcagttggttcacttatgtatgccatggtatgttctcgtcctgacttatcacatgcattgagtgttgtcagtagatacatggctaatcctagcaaagagcattggaaagctgttcaatggattttcagatacctacgtggtacatctagtgcttgtttacagtttgggagatctagagatggacttgttggttatgtggattcagattttgctggagatttagataggcgaagatcactcacaggttatgttttcactattggaggatgtgctgttagttggaaggcaagtttgcaagcaacggttgccttatctactactgaagcaaagtatatggctatttctgaagcttgtaaagaagctatttggcttagaggtttgtacactgagctttgtgaagttacgtcttgcattaatatattttgtgatagtcaaagtgcaatatgccttacaaaggatcagatgttccatgagagaacaaagcacattgatgtgagatatcactttattcgaggtgtgattgttgaaggtgatgtcaaggtatgcaagataagtactcatgataacctagctgatatgatgacaaagccagttcctgctactaagtttgagctttgctcaagcttggttggtgttacagtatagtcctagagactatttggcgcgcggtgattttacctacatgaggtattttttggtgattgatgtttttatgctacaagaggaaattcgtctcaaggtggagattgttaaatatgtgattcgaattttgggcccacaatatattcggattagtttcctagtaggagtcctattaggtgtctttctattatcccctatatatactcttgtaagccgtatgggaaggggtgacgttcccattgtgattcccctacgtttgtaatcatctcctctatagtgatcattgccggtcggcgcccgtggtttttcccgcaagggttttccacgtaaaattcgtgtctccgtttcgcatctattttcataacagtagctaaatccaatagctgaatcacagcctaaggatatacagtatatgaattacgaaaggctgggttatctgtcctgtgtgtttgcaatttctaaaagcttttgtttttttgaggtgcatatgttggtcatgagcagaccactgataaagttacatgggtttctattctagttaaggatctctccttcgtgactttggtgtacataacaagctaccaacggtccctaaaataagttctcgcaaaaaagaaaaaactagctagcaacgataaaacggtagtaagtcatgcatttttccagatgctatcactgatgtgttggagtttaatctttcttaattacataagatattagcccctatatatgatcacctctgcttaatgcaaaaattgatctaactgatgatcttgtttttgaaagccattaagcatgtatttggttttgctgtttttccttttgcctttctcctcctccttctgttcttgtagttagtagaggaagctggggcggcggcttcaaggacgctgcaaggggtgcctgctttttgtttatgaaaaaaaaacctcccagagataccttatgaaccccttgcagtgtctaatcgatcgagcgattggatttagattttaggggtagagagaactcaagggttatagagaactcaaacgtcacttatgcttctcctcttctttcttttatatgtgatgctggtgggggtcacgagtttattttcaattaaaatttaaatccgatttttaccgataaaaaaaagatattatctcttatttgtttcttgttagctagctagtgtcacgcccggaatttctatccaaaattccaaacgcttacatgtgtgtaaaccctcgtccaggaatcagccgaggcacacaataacaaattgataatagagtgcaattattactctaattgataagcgaatataaagtcattacagaggtagatagttcctctcaaacaataaagatctaagcagcggaaaataaaataaagagcgcaggcgactccatcccacaagcagcttgaccagggctacgcctaaccctccacaccttcagcatcactgtagaactcctcctctgatgaatgattgcaaggtgagtatatgacatactcaacaagccacgcagcaaatatgcaagtgcaggggataacaaaggatggcataaatagtctcatttgcataaatggcattcaataaatacttcagaatttagaaaaacagtaaagtatctaagtaaacaatattattccaacactatacaacatacccgttgcataggcccaaccattctgaacaaccattcccggctgcacagttctatctccaaaccaggaatataccattccaaaccaggagctaaacaagttattaccaattacagcatcatttattatggtgtgaggcatgagactaatcacgaaagacattgttagacccgcccataaccgcgggcacggctattcgaatagttttactctggccagaggtgtaccactgtacccacaagacacaacctcaacatcatgtcaactatgcgtcgcgatacttaacaagtacccgaatagagattgtgacaatacccttcgcataacacaattcaaagcagcgcaccattcctggatcataatcacccccttataaaacaaggcatggactccccagcgacccccgtgggcttatctccgccacttctcagtctggtgccccaaaatgaaccacactatacaaaaggtaaaaccgttgcccacgctggcttgtgattggcacggttaatgtttcacgaccgaaaatcgtgaaccggtccttaattgtcatcagcacgaccatcaaaaccatgtgctcacaacccaccattaccatgttttagttggcatcttaattaatcaacatatcatgattaaccatcatgagctaccattaagtcatcattaagtaataaatcattaattatcccattcatatgagctagtgtctctaagcatggctaagcatcctaattactttagctaaaaccatataatgttctagctaatccaattattaaccaggtgacaaagtataggcaatcaatataaaaaggctataacaaaggaaataggtcattcccacccggcgacattcaaaaataaatgcattatttgaatagaaacaataggtttaaacgggatcaacatgctcaaaggattgtctgggatctgtgtgacttgccttgctggccttggaacactttaaagtcttctcctgcaaattcggactctccgggaacgtcgcaatctaagcataaaagagcaaaatcaccaaaacagtacataaacaatcataaacagcacatgttgatatttttaaatgtagatctcaattttagaaaaatttagagacttgaaccaactaaatccgagctaagatgaattagttatgaatttttaaagattaaaccggattaaatcatttatatagattttaattggattatcacgcaataaagaattatttttgaaaaggaaaaatgatttattgcatcagcgggctcgggttcacggtggaccgggtgcacggaaacggtctacggaacgaacggctaggatctaatctagacaaaacggacggccgagatcgacctaatccaccacgggtctacggctgacgtggcgctgacgtcgacgatgacgtcatcacaggcggcggctcggcatctcacgctcaccgacgaacgacggcgcggcggcgcaaacggagggcatctacgcgtagagggcgacgcagcgaactcacagagggctcggacgatgacggacggcaaccgacggcgacggcggcgaggtcgaagcggcggaggtgttcgggtcgacgacgacagcgatgctccggcgatcctcgacagaaacggaggacaggactaggacggcgatgacttggcgaacccgacggcggccttcccgagcgacgacgatgaccagagcggcggcggcgcacggctggacttgcggcggcgacgacggcgcagacgctaacgcggctagagctctaccggcgatggaaggctaaggcgaaggtggcggcggacggaggaggtctcgggggtccttttataggggctagggggcgacgtctaggcccacggcggccggcagcgacgatggaaagtttagggttggagggagaaaacaaatccgaatcgagatcaaatccggcgatttccaaacgaaaatagccaaagtttttgtaggggaaaagatagaggaggtcaaggggatcatttcccctctaccaatttgatcggatcgggaaaggggcgacggaatttggaagggcggcggcggcttgcgcgcggctagggcgcggctggcggcgagaggttgaagacggccctgacaagtgggccccacctatcagcaagagagaggagggagagcgtggcggactgggccggcttgggccgggcgcgcacaggccggggagagagagacttgggccgtctttcggcccaaagccaaaagaggacttttaaaacctttttccttttaaattattcatgaaatgaaattttatttattaaaaatactttcttggctcaaataaatcccagaaaaatctaggaactatagaatcaagagaagtatttaataaaattttatctagcccacttttatgttggaatttattacttaaaattagatcttttcttctaggcttttaaaatcatttttaataattctatttaaacaacaatttatacatttgggatttttaggctgtgacagctaggaacggactagggagattttatcattttcctaactaaccgatagtagccaacagtttctatcattacgtgactgaataatagcgcgcaatttgaattgaaatagcatcatcatcagacaaattttgtcttttgctgtgccataactagcgcttaagcaatacaaggaatacgattacttacttttaagctttccttgagcatgatcataacgacgaaattaagcactctaatgctattcgggcattaagccatttacaactttacaaaaagtcttccaggtgattcaagtttcgtgtgttaaaattaagtaattccttcatatatgcttaaaatgtttggcatgttttgtctgttcaagattgtacagtaggagtttttgccggccggtcggcctaattttacaattatactagctagtatctttcagaaaataacatagataaggcaactagctagtatcttctaataacaactggtttatcagaagatagactaggtcatcaggacattaactttaacttagttgtatcaaaactttcaggacattgcacccttagctttagttgtatccaaactttcaagaccatacataaggtcatcagaaactttcaagaccaaacatgaggtcatcagagatcaaactagctagtcaaacagaagtaaagttcacaaactacttactgacgagccagggttatttctcttgctgagggaggaacctcgcaacaagctccatgagaacagacgggcaactgattttcagatgctcataatcatcactggccatcatcctctcaagattggagcgagaagcaaggaactcaaagcaagcttccttgagtccatagcaactgtgctgctcagctagggccaaagtggtagccaccatgttggagtcaatgtgctttgatagcttctcctcgcatattagcttcagcctcccgacattgtaccgatctgctgccacaactaggtgctgagccatcacaatattttgagcagtctcaggcagtgagtcagtgtagatgaaatgcaacaatgctctgaacaccccagcttctatatcttcaattttgatggtcctacgggctttagcactcatggcgccaaagaactcagctctgaagacagatgaacgagcagcgagtatgcacttgtgcgctgagaatatatcctgaccaacgttgaacgtcacgtccgtactatccatgttcttcaagaggaggtctcccagatgctggtgcaggtcactaggaggaaccaccacaaactgcttttgtgtggtttctttgctacagatatccttcatgacagtcaaatcgcacatgatggagaatgaatcgttgctcaaatgtactgagcgttccaaatcagttttcttcatgaacttagagtggccccaatctgaacctttttccgtgaaggtgtgtaaagggtacaatttgctgtataattgcactgatctaccattcttgtctagcaatgcaaagctgaaggttgccttcacgcccccggcgcaagcaaaatcaatggtcagaaaaaccgacaggtaatccttactctctgtgttaactccattggggaagtatgtgatgaaccagctatgacctccaacactgaatgggatagatgaaacatacttgccattctccatcagctccttggtccttaagtatccatcaatcttgattacatgcgaccctcttgcaacttcagcaaccgtgacagaggaggtgttgttgcaatggtttgccattctggaggtgagctatcagctatggtgtttacagcagcagcagttcagttgtacctatgtcagaatataagtaagtaaagaattttgagtagtttactgaataaaaaagtccctcaacaagaggcgggcccaccgtgattcaaaggtattcaaatgtactatctactaagtggcatgttgtacgaccatgaaaatccacccgtaagaagttacttatacttaatatatgtacaatgaatagtatttaaaaatagtaatatttatcaagagagttcacggtagataaaaccaagcaggaagctgctaattcattacgttgattcctcacatgaataattaactggaattgattaatggcaatgtatatgtaaaggtagtaacaacacaacactataaaatacttctctctagcacaatatatatattcagataacataataaactattattacgatatattaagttcctgttaaaggtatgttcttctataaatggaatataaacagtatagtcatgtcttaagagtacaataaataaattaactattataaagttaaataaattttaaacaacttttaaaaattcatatatagaaaatttatataaaaattgcaacgtttagtaagtagcatatgacgctaaatagaatgtgatattcatagcaattgaatgtagtagaattcgcctattctttcgatataagagatgaatccattatccacccaacgattggtgtttacggcagcagttcagtttgtacctatgtcgagtatatgcaggtaattaaagaattttgagtacttagtaccaaataaaaaagaatcccctcaacaaacaaagtacagatcgagcaacttttcttgaaccagatgcatgatgttctcatcaaactatcacgagcatagaaaatcgaaggatatctgaagccaagatgcctgttctttagacatagcaatctgaattctgaaagaccaagcatatatagtacgattcctacaaagcaagacattcgagaatgtatgttacctttcttaaatattgttctggcgtgccaccgcgcgccgcccgccggcgccgggcttcgagcagatggctgaaaagcactgcagtaacaacgtgcgacgtggggagaggggggcgacggcgacggcgacggctgcggcggagtgaaggttggcttggctgtgcccttccgtatcctctgccgtttgccctccgtactaaccatagagataatctcaaccctttattttaaagggttgattagtaatatagtactacagattagttgtagattagattgaaatattgcagcgtgaatgcgtggtggctgcgacgccgatcaccactaggaggatctttgatgccatacaccaaaatttatctgctaatactaatatgtttgatcaatccaagttcttggttcttgcgttgttgttgtgcgtgtaagtgttttatatgatgttaccaggccaaggtgcgatttgattcatagttaagtgtggttattcttatcgccttaattaggtcgattagccaccaggaattaaggttcgttgatatgtagttcttttttcgttgcttctaataatggcaaatgaaccaagtgcagcaagggttagtgagtgtaaaggacgattatgccctccacgaataattttcctggacaaaaatacactccacaattctactaccattaattaagtgtggtggtagttagaagtagatctaaactcttcaatcaaataagatcaacagtatatattactttctaccataggtacagtgcatagtagggagcaccggagtgggactcctgtatatatggttctctttgctgttgagaaatcgttgatcttacctttccaataaatggcgaggataatcaagacttgttgatttctttcttctggtagtacttttcctttatagaacaattgtgcatttaccatttcatcccatttcaaaacacggttctctagggcaatgttgtatgttgtataaaggcatacaacacttcaatatcatggggctatagtgggacagaggaagataaatcggcaaagaagtttcgtggtttggcttccttatcacagttggtgcagacagtggcgaatctagaaaatcgattcattggtgtcataacgtgtctatcggtgtcataatactaattatgcttagatcatggtgttataacatatggataagcaatttcgctatagattttgctgtaagttatcggtgtcgcctgacaccggcctttctactgtagatccgtccatgggtgcagaacaccatttcctttccttttctggtatctttattggatctccagaactttaaacaaatcaacaaaacttagaacttgaaatcaaaacttcatgtccaaaatccaaagcgttcatctaacaaccaaaaaccctttatttcaacccaaaatctaccttcttataattctcaaaattataacacaaactatcaaaagtttcaacccaaatcttcaagtttctactcatgaaccaaactttcaacacaaagtcacaaaactttcaagcaaagtattcacaactaatacggcggaggatggcggtgcagagtttctattctcccggatctaagaaaatctaaccaatttacaattacagcattttagtatatttcagaaaataacataaataatctacagataggataacatagtaaaaatatatcattccacacatagaaatactcagtagagaaaatggtaagaagaaccaccagttgattcaatattggaaagactaggtagattgaaggtcgtagacaaaactagacatgaggataaattcaacatggttgtcccacaacattcaggatattgcatccttag

SEQ ID NO: 1295 - DNA, 9829 bp, Oryza sativa
agggatttataacaatcaaaccgcttgtgctgcccatgaaggaccctttaggaacccccactcgagaaaaaaacttcatgtgcaaaatccaaagcgttcatttaacaaccaaaaaccctttattttaacccaaagggtacctttttataattctcaaaattatggcacaaactattaaaaggttcacccaaatctttaaggttctactcatgaaccaaacttttaacacaaagtcacaaaactttcaagccaagtattcacaactaatacgggggagggtgggggtgcaaagtttctattttcccggatctaagaaaatctaaccaatttacaattacagcattttagtatatttcagaaaataacataaataatctacagataggataacatagtaaaaatatatcattccacacatagaaatactcagtagagaaaatggtaagaagaaccaccagttgattcaatattggaaagactaggtagattgaaggtcgtagacaaaactagacatgaggataaattcaacatggttgtcccacaacattcaggatattgcatccttagtgatcgaagtatctagtccaacagaagttgtactaaatttcaccagctacttactgaagatccatggttatttcccttgcagcttccatttccggagagatgaatctcgcaataagttccttgagaacaaatgggcaactaaccttcaaatgctcataaccttcactggccttcatcctctcaagattggcatcagaactaaggaacttgaagcatgcttccttcaatccgtggcagctatgctgctcagctagagccaaagtggtagccaccatgttggagtcaatgtgctttgacagcttctcctcgcaaatcagcttcagcctctctacattgtaccgatctgctgcgacaagcaagtgctgagtcatcacaacatctaaagccgtctcaggcagagcgtcagtgtagatgaaatgcagtagtgatctaaacacaccagcttccatatcttcaattttgatggtcctatgggctttggcactcatggcgccaaagaactcagccttgaagacagatgaacgagcagcgagtatgcacttgtgcgctgagaatatgtcctgaccaatgtcgaatgtcacgtccgttccatccatgttcttcaggaagaggtcgatcagatgctagtgcaggtcacctggaggaaccaccacaaactgcttttgtgtggtttctttgctacagatatccttcatgacaattacatcgatcttgatggagaatgagtcgtccataagatgtactaagccttctaatttaatcagttttcttcaagaacttggagtagccgaaatctgaactttttcccgtgaaggtgtgtaaagggtgcgattggctgtatgattgcaatgatttaccattcttgtcgagcaacgcaaagctgaagtttgccttcatggccatggcgcaagcagaaccaagagtcaggaaaaccgacaggtaatctgtcacatcctgattttcgtttcaggatttataaattatctaataaattattaatagaatttatattaaatgttctttaatttacaagtgaagttaaatgtgggaaataaaaatttcctaaatttaaagcatggatggatttaattttcattaaattctccatgattaattatactctctgaaattttctcggattttttggagctcaattcctaaatgatacaaagaacagttcaataattatttaatcattaatgatctaattataattatgttaagtgcttttcttgtttaaaaatccttaaattataaaatgttgtttaattggaattattagaaatgatcttaaaagcctagaagagaagatctaattttaaataataaattccaatataaaaatgggctagataaaattttcttaaatactttgcttgattctatagttcctagatttttctgggatttatttgagccaaggaagtatttttaataaatgaaattgcatttcatgaataattataattgaaaaaggttttaaaattctcttttggctttgggccgaaagtcggcccaaaaccctctctctctcctccccggcccaagccggcccgcaaccgagccgccgctctcctctctctttctctcccgctgacaggtgggccccacctgtcggactcgtcgtcctcctcgcgccgtcgcccggccgaaccctagccaagttgcgccgccgtctccttccaaatccggctgcccctttccgtttccgatgaaatcaatagaggggaaatgatccccgggatcccctctatcttttctcttatggaatcgtcggctaatttcgtttggaaatccgtggattcgagttcgattcggatcgatctctctcctccgaaccctaatctttccttctcgtcgccggtcgccatggaccttcgccgcagcctccttgcccctttataaggacccccaagcccgccgctacccgtcgccaccctcgccttagtctctcgcagccggtagagctctagcgccgtgccgcctcgcgccgccgttgtcgccgccgctccagccgtgcgccgccgtcgctccagtcgtcgtcgtcgcttggggaggtcaccgccgtggtcgccgtcgcgtcgccatcctcgtccgcccctccgccgttgctgtcgaccgccggaacaccgctgtcgtcgtcaagccgatcgtcgccgccgctcttcctcgacgccgtcgccgtccgttgatcttccgccgccgctttggtcactggtgagttcgccgtgccgtccgctacccgttggtgctctccgttcgcgccgccgcgccgtcgttcgccggcgagcatgcgccgctcgagccgtcgccggtgatgacgtcatcgccgaagtcgtcgttgtcgtctctcgtagtccggccgtggaccggtcgatctcggccgtccgttttggatggaaagatctagaccgtccgttccgtagaccgttcctgtgcacccggtccaccgtgaaccctagccgctgacgcaataattcccttttccttttcaaaaataattcattattgcgtcataattcaattaaaacccatataagtgttttaatccgatttaatctttaaaaattcataactaattcatcttagctcggatttagttggttcaagtctctaaatttttctaaaattgagatctacatgttaaaaatatccacatgtactgttcatgcttgtttatgtgctgttttggtgttttgcttctttctgtttagattccgacgtttccggagagtttgttttcgcaggagaagaatttgaagagttccaaggccagcaaggcaagtcacacagatacaaacaatcctttgagcatgttgatcctatatttaaattctctatttatttcaattgtgcatttattttcgaatgtcactgggtggtgtgaatctattcctttgttatggcctgtttgcattgattactttattccttgataccttgggttattataacttgactagttgagctttatatattggttcagctagatattagatatgattgcttagccatgcttagaaacattagcacactattgggataacttatgactcactattatttaatgatggcttaatgatagttcacgatggtcaatcgtgattggttaattaattacttgccaactaaaatttgataatggtgggttgtgagcacatggttttgagagtcgtgctcatgacaattaaggaccggttcacgattttcggttgtgaaacattaaccgtgccaaccacaagccagcgtgggcaacggctttaccttttgtatagcatggttcattgcggagtaccagactgagaagtggcggagataagcccacgggggtcgctggggagtccatgccttgttttataacggggtgattatgatccaggaatggtgcactgtggtgagttgtgttgtgcagagggtattgtcacagcctctattcgggtactttccagtatcgcgacgcatggtagacatgatgttgaggctgtgtcttgtgggtacagtggtacacctctggccagagtaaaactattcgaatagccgtgcccgcggtcataggcgggtctaacaatgtctttcgtgattagtctcacacttctcaccataataaatgatgatataattggtaataatttatttagcttctggtttggagatagatctgtgcagccgggtatggttgttcaggatggttgggcctgtgcagtatgggtgtgctgttcagtgttgattaatattgatgattaattactctattgttttataattctcaaatgtttgctaaatgctgcttttgcaaatgagccctatattatgccatcctttggtatccatgtgcacttgcatatttgctgtgtggcttgctgagtatgtcatatgctcaccttgcaataatcaatcaaacctcagttgaagacaagttgcgaaggagaagacgttcggcttataccccagttgagctgcctgtgggagtggagctgaagccatcgctagaccgttaattccgctgctgtttttcttttattttgtaagtatgtaactttattattatgatgaatttgtatattaaattgtcagtttgtgtacctcggctgagtcctggacgaggattttatgcacaaataagttcggaaattactagtgaatttccgggcgtgacataatcctaactgtctgtgttgttcccattgggatagtatttgatgaaccaactatgacccccaacactgaatggaacagaagacacatacttgccattctccatcagcttcactctcgagtatccatcaatctagactacatgtgacccgctcacaacttccgcgacaatggcagatgacgtaatgttgtttgccattgtggagaggtgggcagtgggttatggtggaacactagcagatgaggaaatgttttgcggtgccactgtttatgtttagtaatgtagcggtgggaactgagaagttaaaccggtcgaaagatcgatacatttcctcgatcgaaattaatgatgagctgatgataggattagactatggactaagtgagtaaatcgagatgcatatcctcgatcgcatggcggatttcaagtttggctacacgaggagactccaactcgattgccaaggtatctgtgaattcgtttcgtttcttagttctctctttctgatgtattcaggccttatttggcaagcccggccatgattccctggccatcatatctctggggataggccgattatggcccagcccatgtgcaggacgccggtgatagcagcgatgccatgagcatatttcctggtttgaaattctgagcgcggctcaaaagaacaccaatagagatgataatatttcccggtttcaatacattatcaaattgaggaaattttaaaataaaaaacatcagaaaataaaaataagaaattgagaagacttgttttatctcattttatctgtactgtattttcgtatggtcgaaattcccctagcctaccctatcttcttcttcccagccaacaaggaattagattttataagtattaaacatagactattaacaaaacacattccataactctggactaatttgcgagacgaatctagtgagcctaattaatacatgattagcctatgtgatgctgcaataaatatatgctaattatggattaattaggcttaaaaaatttgtcatacgaattagctctcatttatgtaattagttttataagtaatttatgtttaatactccaaattagtatccaaacatccgatgtgacagggattaaagtttagtccttggatccaaacaccacctaaggatggtgcgataaagagagagcaaggactccggaccatcgaggatggggctggtggtttcctcctctccctcctctcccctctctctccctctctccctctctctctctctgcgcgccggtgatcccctcccacgacgcatcgtcaaccttgtgcttctccatctcggttgaggagtgccgaagatgctcctccccctggggtcgccgagctctagttggggagtgaatcggtagcctcgtgggcatgaagccatcgacgagcccaatcaccccaagcagactccccatcctactggcaagcccaagctactccttgccgatttcatgggcatcgctgacgaggaggaacaagatttgaaggaagagctcatcgacaacggtgctctcgccgcccgcacacagccattgtccgccaccgccggcgtcgcctcgccctgtcaccgcatgcggacagccatggctcaccactcgccatcactgcctttccctcttgccgtccgcacacatccatgcccgtccgccaccgtgggcatcacctcgccctctcgccgcccatagacagccatggctcgccacccaccgtctttgcttttccctcttgccgccctctttgccccacgcctccacgcacccatgcccggagagaagacaggagaggagaagcgaggtgggtagaagatagaagataggagaagagatggagaactgacgtgtgggtcccacatgcatattgggggcctcatcttttcgctcatgcttcagctaaaatttaaattttttaccttaaatttaaagttgatttttggattttttttatcgaagtttgtttttcatcctttgcttttagatagctaagaacatgtataaaagtgctattcacaaatgatttttcatttgcaaatataagcgaaataatccgtttctaggtatttttgttcatctaaaaatacggtagcaaaagaacaattaaaaacatgattgatgcatataaaatggtatggatacaattttagaggtatagcaatggcatagttacaaattacctttggcatttttataatgatatggatcaaattaacccaaatatcaaggaattgtattaactttatttatgttttccctaaatattcaagatatgcatggcatccttacagatggaattactcaaaagttaaaaagaaaaaagaaaactacctaagagccatagttatttgttttgctgctttcatttcatgaggaagcaatctcgcagcaagctcattaagaacagatgggcaactggttttcagatgctcgtaaccatcactttccaccatgctttcaatattagatggagaatcaattaggaacttgaagcaagcttccttgagttgatgacatctgtgctgctcagctagagccagattggttgccaccatgttggagtcaatgtgctctgatagcttctcctcgcataccagcttcagcctctcaacattgtaccgatctgccgcgacaagtagttactgagccatcaccacgtcttgcgacgtatcaggcagcaagtcagtgtatacgaaatgtaggaatgatctgaaaacgccagcttccatatcttcaattttgatattgctcctacggggcttcgctctcgtagcaccaaagaacattgcctcgaagacggatgatcgagcagcgagcacgcacttatgtgccgagaatctctcctggccaacgtcgaacgtcacgtctgctccatccatgttcttcagcaagtcgcccagatgctggtgcagatcacctggaggaacctccacagacggcttgggcatggccggggtttccttgctacaaatgggcttcatgaccgtgacatcgcaccggatggaaaatgagtcgtctctcagagattctgatgctttcaaatccttgctcttgataaacattgggtagccccaaccggtacctctaagtttgaaggttttgacagggctggcgatgctgttcagtagcaatggtcttccattcttgtccagcagtttgaagctgtaaattgccttgacgtccctggcaaaagagtccagaaacaggtacaacgacaggtattctctacactccgtagattgaccattgggatagtatctgatggtccaggtgtagccagcaacgctgaatggggtagatgacagacactcttcattcttgatcagcgccttggtttttgagtatccatcaatcttcattacgtgtgacccgctcacagcttcggcgacaatggcagaggagatagtgttgcaatcatttgccattatggaggggagctatcaactttggtggtggaacactgacatggaaattaaaaggttaatttgctgtgtttcttatagatgcccaaagttaaaaccgattacaagtatatattaaaatctaagtaaaatcacacgaaagattatccagggtagaaagtatttgcaccaaccgaaggatatttgaacaaggaatacagtataagttcagttaaagcttaacaaacagaaaatattcttacattatcagaacgagcatcgcaaatccaagcatatttgcagccaagatgcatgttctaaacatacgtattacccctccgtcactaaatatttgacgccgttgacttttttaaacatgtttgaccgttcgtcttattcaaaaaatttaagtaattattaattctttttctatcatttgattcaatgttaaatatagttttatgtaagcatatagttttacatatttcacagaagttcttgaataagacgaatggtcaaacatactttaaaaaagtcaatggcgtcaaatattcagtggcggagggagtacacagcaatctgaaactcaaagcatattaaagtttcaagagtgtgtacgtttgtcaattacctagttatatgtcaggacattggattaggagtggggaattcttcaggaaaattcagtaaagatggtggtcgccgcaagactcgaacgctgaagaaaaccctaattttactcctactcctaaagacaaagatatagtagattcatttcctgcttcattatgggctaatagccgctataagtagcatacaaatattattacacagctgtaaagctagagttaaacaaccacatgaaacagagcatcttcctctgtcccaaaaaagcaatgacaacgacaaaaacgactacagtggtcccattttgatcttcttttccccttagctctgatcttttctgaacttaactgaagtttccttcccaactctgaaactctgaacttaatctcccatttctcaactcctgtcttgacaattgcccccggttaagttggaccttgtcctcaaggttcaaaagaaggaaaagctgactgaatataagtcgcatcctcctaggtcgcatcagccggcgtcaagttctgccaaagaataaggcactgaattactggttcattgtttcttggaatcatgcgcctttgcaacacagcgactggttcagtcttaatctgtccctcaggacctactgctggcagattaggcataggaacaacatgctgtcctaaatgtttcttcaattgactcacatgaaacactggatggattcctactccttcaagtaattgcagcctgtaagcaaccttccccaccttttcaataaccttgaatagcccatagaatttagacctgagtttcagtgatcccctaatgccaaacgcagcttgtctatagggctgcaactttaagtacaccatgtctccaacctccaacactctttcagtcctattcaaatcggcataatgtttcattcttctctgagcttcacccatgctatccctcaatttctgcaaaatggctgctctttctttcagggtaacccttgcttcttcagatacattgcatggaattgaaaattcattcacttgtgggggtggatacccatacaaagcttgagtattctat

SEQ ID NO: 1296 - DNA, 665 bp, Oryza sativa
tattttctttttgtggctacaacatacttgtcacttaagcttcacttccagtaatcttacattgaaatcctataaacaggtgaaattgaacctatatcttttggagggaatccatgatgatgttgatttttgttgccaacttgcgaaagaagagtcggtgattctttgcccaggtacatctaacatttttgttaataaatggatatgtatgtgcctatttaattaaagaaagttaaaaatttaatattatattattcaattcacttgttatgttcttgtaattctctaacgctataccatgacatataagtgatgctaccttatttagtttctcacaaatctaatgattactttttggctaaacatttatgcttattaattaattttgttatgaaactttgaaaattattctatgattttgttgcttaaaaaaagttaatagttaattacttttagttttgcatctctaatcactaatagataatagtttagttagaatatttaaatatatgtggttatgagttttttattgattgcatgtaaactttttatatgtgatatatgaatatgacgacattattttatttctatatatgaaagaaaatttagcaaagtgatgcaatgatattcagacaggcacattatatccctacctgttgtttttg

SEQ ID NO: 1297 - DNA, 967 bp, Oryza sativa
gcgccatcgggtctctggtcctccatgactggggcttcgggagggaggaggtggaggacatgggggagcacctagcgaagttgctccgcccgtttcaccctgaaatggatcttacttcggattccgactagatcatcttcgaaaaatcttacttcgagaatcaagcatgatccatctgttgcaatttatgtggattgtagtaatactaaatctttttttttcagagggttttcagatactgaaaattcatgctcatgtggctggctgttgtagatcaagaatgagagatctgaatctatggccctgtttagatccggagggctattaaatagccctctggaatcttactatttaagagtattaaacgtagattactgacaaaacccattccataacccctaggttattttgcgagacgaatctaacgaggtatattaatccatgatttgctacagtgatgctacagtaatcagccgctaattatagattaatatacatcattaaattcgtctcgtaaaatagcctaggggttatggaatcggttttgtcgataatctacgtttaataatcttaaatagcaagattctgaagggctatttaatagaccagaggttctaaacaaggcgtatggcatggtagaccttttttgtgttctactcatgtgcatttgagcacgggtgtaggctgtgtatgccacatgctgctgccgtgacattctgcggtgtttcaggccatgtacagatcaaccgggccctggcttctgtcaagtcaagcagttccattttcgttgtgatgtgaggtcacactccgtcggtctgtgacagtttcacatgaaactggagtactcaatttctgttaaaaataactaaaattcccgcatttcaaatataaaagccgataggctgtatatatcgggttttagccacattaggaacatggaaaattttcgccattcctatggagttat

SEQ ID NO: 1298 - DNA, 722 bp, Oryza sativa
tagtatgttgtattttaagtttttaacagttgatagagcaaaattctgatagcataccttggctcctgtgtgcttgaactaccactaaggcaccagtgaagtgctgtgtttccttcaggatcggcttcattgacatcaacatcccccatcaggagcttctttgtgacatttacatctccaacctttttgccgggtcggcggaaggacgccgaccaaatttcattaagatgaaagaagagttaccagtattacacgacattagactgtcgagccggggaagaaccccgaataaaagaagaaaaattaagaaaactgagaaagactatttacaagcaccaaagagcttaaggctactcctcgcaagagaaaaggccggctgctctccagatcaggacttcctccttaatgtctgcaactaagcgatcagccacaaccgatttattctcaaaaaccctggcattcctttctttccaaactctccagcaaaccagcatgaaaagtgaatcaaaagcagtcctgaacctcatctgaaaacagcggcgggcacaatgccaccaatctgccagttccatgccaagctgagcagggagaggaaaagtgacattcacccaagccttcaattgctccacactctgttagtgaaagggcatttgacgagcaagtgattgcagtcctccggcgccgattgacatagcagacaagtgggatcatgtggccaacct

SEQ ID NO: 1299 - DNA, 706 bp, Oryza sativa
tctagcatatgtgaaatcagttccctggagagcatctccatctcaaactgccatgacctcacagagcttccatatgagctgggcaagctgcattgcctgagcatcctaagggtatacgcctgcccggctctgtggcggctcccgccttcggtatgcagcctgaagaggctgaaatacctcgacatttcgcagtgtgtcaacctgacggacctccctgaggagctcggtcacctgacaagcctggagaagatcgacatgcgagaatgctcgcgactgaggagcctcccgaggtcgtcctcatcgctcaagtccctcgggcacgtcgtgtgcgacgaggagacggcgttgctgtggagggaagctgagcaggtcatcccagacctccgggttcaggtagcagaagagtgttataacctggactggcttgtagactgatgttcctggatgcttttggctccaagctcacctttgtacagatgatgtgtatatttttccctgtctaatacaggatggaggaacaatccactctgcaattttgacatgttcagtgttcatgcaactgactctccagcagcagccaaagcttgctgagaaaatagaaccatagaattaatagagattttttcttcttggcacaaagcatatttacatacacatagcaaatacattaaccaatacatctcttctgtctctctgtttaatacaa

SEQ ID NO: 1300 - DNA, 1412 bp, Oryza sativa
taatatattgtgaacaggtttcggcaaaacaaagccacctatatcacagttatcattaaatctctgcaccaacttcaaccttcggcgagcaatcaattttgaagacgacgatcacaagcgcagcttaatcggaggtgttccataggctctttcctgtggatgtaattaaccggccgcctcattgctaggcgccgggaatcagcggactacacgcaatctccagtcagcatacctttccattaagtattcctcgcgaaggcaaaaggcgaactcctgtgggagccctcatgtatttgtaaacattcatgttaatgaatcgtgattaataaaatacagggtttccctattttctgtgtgttcgttgttttgttttcatcaaacatctggcttggagtgagattgcattgcatgtgacttagcttctttttaatattccggtgcagtctgcaacacagaaatgacgcagaaggaaaatcaagagagggcaacgcaactgaatggatccaaggctgaatcgaataagttgtctttgtttccttcttttcctgtacctgagagttggttgtataccccctctgactttgcttctttttatgcagttttgtacaaaacaaactcaagcagaaagcgaaacaaggggtggaatctcaaaagagagaaacgaaggctcacttgagcaagatgcttgctggattgaagattgttgaatttcttcatgctgaagggtggattggagggattatctaagaggttttttttttcattttaaagctattctaatgcctacattgtcaactacattccccatatttagtatgcttgtccacatgtcaatggcaccgttggagcaaatccataatgtgcatccttattccttaaatagtgcggacatccttaaataatcctttgagaagaagtatcctaacctttacaatctagttagaaataaaaatgaggtagtggccaaggtaatgagtagaatcccgttaaatgtgtctttcagaagatcaatactgggaagaaacttgaagcctggtatgagctagtgtcgaaggtattaagctagtgtcgaaggttgttaatactgttttgacagattagaaagatcgcttcttttggaaaaacaataaagatggcctttccacagtaaaatctatgtacaagttgctcatgtatgaaggggtggttcctaagaagaatttcatttggaagctcaagattccacttaaaatcaaaattttcttgtggtaccttaaggaaggggtaattctcactaaggataatctagcaaagagaaggtggaagggtagtctaagttgtttttgtaactcaaaggtaacaagataacaccttttgtttgattgctcaatggctaggtatatttggagtgcgctcctttttacatttgagat

SEQ ID NO: 1301 - DNA, 709 bp, Oryza sativa
gacataaactacgtacataaattacaaaaataatgcttcctcatggttgacacgtgcatattgaacttcatcttcttcctcctcctcttctagaggtatttcttgacctatgccgtggacgtgctggttgtaatcatcctctctgcaatattgtccaatccaacaattctccttttcccttcacgaacaacatgtactttcttgttacacgggtcaactatgtagaacacttgaacaacttgtttggcgagaacgaacggttcatccttgtacgcgttgttagccaagttgacagtggtgaaaccttcattgtcaacttttatattgcgaagatcgacccatcgacaacgaaacaacgggactttgaacttcaagtaatctagctccaatatttgctcaactctaccatagtattgatcacgacgaccaccgtcactagcagcctcgatgcgtaacccactgttctgcactgtgcatttgctgtcttgcttgaccgtgtgaaaggtgtatccatttatgtcatatccttgccaggtggtggcactccattcaggaccctgtgacaaccactgaagtgtttcactaggcaagttctgcaacctggcaattcggttcttcagccactcgttgaaagaagacatgtgcttattcctgacccaactctctgatcggcctgggttctcttgtcggataactgcaaggtgttcgt

SEQ ID NO: 1302 - DNA, 5428 bp, Oryza sativa
ggcaaccccacggcggcggccatcacccacgtgctcaacaacaagcgcgagttccctctcgccgccggcgtcgaggacctcctggtcatctccatcggcagcggcgagtgcgacaaccgccccaccggtggcccgccgcctcgacatccgagatcgtcaggatcgccgccgaaggcgtcgccgacatggtacagaaaaaaacaatccatccagtgtgtctctctgtgtggtcctcttcttcctttctcgcatgcattcttgttcttcgtgctcccttggctaacgccttctccccgacgcatccttgactccaggtggatcaagcagtggccatggcgttcggacataataggacaaacaactacatccgtatacaggtcagagaactcacagccatcactataccaccatgatatctttgcgtttgctttagcttgatcaatctccatctccattggtgtctttgatcttgcaggcgatggggtcgccgcgggcgagccgaggagggatgagatgcggcggcggcggcggcggcgatggcgcggggtggggcgtggcggaggagatgctgtcgcagaagaacgtggagtcggtgctgttccgggggaagaagctggcggagcagacgaacgccgagaagctggagtggttcgcgcacgagctcgtcaaggagcgggatcgccggaggacggccggcgcgctcgcccccgccgtcgtcaagcagcagccgtcggagtcggcgccggcgacggcggccgccgccgatggccacacgccgccgccgacgtcgtactcgaacctggtcagccagatgttcaccaccatcctgtagacctgtagacgtgcgtgcgtggcaagcgaaatgtgcttccgatgtattgattctctccccttatttttggctgaattttgtaaatgcagagtaacaaaaatgtgcatgcttgccgtgatctgtacgtaggacatgcctgtttttttttttaatctccctctaaatcctaggatgcttaatggagagctggtaagttgactaaaagctgtagaatcaagttaagtactgctagtagtgatagctgcaacctgcaatcaaagaaactcaaggcaaataataatatatttaattaaaaagaagatcagatcactgaaacaaagtgctagatttaatgaaacaattctaagaaattgtacttggcctgtactgtcagaatttcaacaggcaatacaaaaggtacactcctgagctgttgcaagttgcaagcttcagactccagattccagaacagtagttgctcgcaagtcgcaagtttccaacaaaagaaaataaatagaacgtagttgctcacacatctagcgtgatgaccccgttccccgttgatgcacggagaatttcagtgtgggtagggtagaacttgtctggcaatgtaaattagtagtaacatgcataaaatctggctatttgcatttactgctatcacacaatccaatgcaaaactcattcatgatcggtcaacttcacaatgtttaccatgtgatagaactatagaaatgaatgagacgtcatggagatattgatgtctagattttcgatgcaaaatggatttctcttttcttctctgtacccagagggaacaaatgctaatcatattccagaaaagcaatagttatttcctacgcaaatgaaactgactatagaattcaaatagtactagaattcttgtatttcagaagctacgagggtgtgaaaaatggtaaatccatgattacctgtaggcccaacagaggagcagtactccctccatactaataaagaaagttatttaggacagcgaaacggtctccaaaacacaactttgatttcttatttctataaaaatatttattgaaaagtgatatatgtatatttttatgaaagtattttttaagacaaatctattcatataatttttatattttcaaactcaacaacttgagagttatttatgatttatattatcaagatttaacttaaatattgttctaaacgactttatttacgaacacggagggagtatgctaattactcctttaacgcagcggagagacaggttctgggcaggccggacccggatctgcgactgcaagaagcatgcagcttaactcactttaagtaaaaacaccaaatccgaggtgcgcgtgttgacgggctggtgatgtattctttgatccgtcgaaataggtggcactcttcatgcaacgtggaggcctggagagctgccgagctgggcatcggttatggcttgagatgctccaaatccagcaaatttgtcttcaaatgtgatttgcctcatatatatactctcctgcaagaggcgtcacaccattgattccacccatcaaaagatatagtgcaaatgaaaagatcacagaaaacagggattgtatcagaatgcatgtatatattgatgtcaggaaacacatgttcaacttgggttgaaggattggatgtcttactttgttattcatgtggtgtgggggactgagctgatcctaaatcccaagtaatgagcatttaggtcatgttaagagtagcttattaactgagtgcatgggctactgtatattttaccagacaccacagatcggacctacatatactgtccccttctatgatggagtggcctaacagcaatgttgataaaccatcatgtaaacagcaccagaccatactagtaggtaaataggcatgcataaagcataatgatctaggttacaacttacaggctacaaagtagtgctggtggtgcaaaagtagctccagggggtgataaacaggtactactcaggagtcaggacaatgcctaagacaaaggagggaatataaaatttcactccagccacaccaaccagcctttttccaaagatcaaagcagtaatttgtactgcatgctacagtgtgaagatagatcactgatgagaaaccagcacttgtgcaccagatggcatgagctcggtatcaccattcactgcaccattcaggcattcactgggaggaccagacactcccagttagtacagctgaggctttgagtactgcatgcccacactatagtcttgtccccctccctccctgctgcttgctttggattccattttcatgcatgcataggtacataggtcacacgtgtagcattactagtacataaatctgctatggcttgtttgtgtttgtaaatgcaactatgcaagtagccaagaatctctctagtctctacccagggatgaagtaatggagccatcactcatcagccatgcaacaacttgcaacttgaagagttggatctaatctcgctccttttgcacaaaaaagatgatcgaaccacgtttgcaaagcgatttcttggaaagaggagtgattaactattgtaagtagaaaaaaaccgccctgggtaaggttagttagcagttaccagcttcgtcccctctgttatagtttactctggggagtcagaatgacgggttatttaggggtctaggatctttagtcacatgtttggctacagtagtggagatttttaatgtttgttgctttgtcatagacgatcttatagtttgttttcttaatgaagttatatacatagacaaattagacctgcagtgtttgtctagggaatcctatcctgcatctctgtaacgaaattcgtcaatacagacaaaggaaaaactgttcatgctcatgcttttatttggctctctggttgttctcttccattttgtactggcctgctattttcaagtagctaagctgctgaagtatgtagttgccatagcatcaaggttataaattgtgaaatggataaaagttgcgttatagtcatcatttattaatagtcaatggatcgttccttcttttttatgattagtcgatggagaaatttcttgaagtctgaaattcaaatgacggatcgtcctaactaccaaaaataaatggtaaactctgaagaagcacaaaacacgagcaagagaataaaatgcttccatattttacatccaaaataaatacacaagatacggatattgctgcatcaaatgaatggaaaatgactgcttacttgacaggttgatagatatatatgattgggtggccacacgtacgccaccatgccaggaccatgcatctgctgtgactgttgtgagcagcgtagcgtacttcgattcagttgggaccctggatgaagctttcagaaaatgtgctgctcacctgcaagaacaatcagtctgcatagcgcacgagcaacgcatgcagactgcctatacctaactcgcagccgattagattgttttaatcaatggaagttttaaagaaaaagatatgtgttgtattgattattgtatagtactattgacgcaagcaatacttctataggtgtgcaatatatatcttatatagcatttgaattggcataaataaagatgcaaaatatagctatagccaaatgcattttcctactatgaatttgcaacctcattgacatatataacagagtcgtagatgcagttcactgcatcttcaagagaaagaggcattgttttggtaatatatgacaacaggagaggggcctgggaaacaagagtaaaaggggatttttctcatagaatgaaaaaaaaaaagaaacaggcccaggtatagatttatcaggtaagtatggcctagactaaacaaaaaaaaaagctactctgaaaagtactctgtagtagctcacagaagatgtatacgcatatttgggttattgccaatctcataatcattgaactgaaagaaatttgtgggtgcttatagtcttaagaactatatatagtttatataccctttcaatgtgacagttaataccttgaaaaaatggagaatgataaggctatattctcttacctttttcacagatgctcatgaagggtgaccaatttgcacatgaaaatttcctgtgggacaaacccaaaattcttcaacaagaaaaggaaaaggtggatgcaaggatataggaatgtaaaggctaataagatgaactcagagaatatgcaacagataattgaaatgattacatagggaacaaaccatgcaaagccttcttttaaactgaaaatcgtacctgtttctgttgaagatgtggaaccattatgtgcagcgatacaattgctttgagcatttctagctccaaatagtagtgtgaatttactaacctatttattcactcacaatagagcacatattgtaccaaaatacatcagtagacactaccaaactaaactgaaagttgctctgttgggcaaattagattaaaaacaaagctataagaatatgaagtctggttggaaaagatttctcccaacagtgcacttagacatttattatattaggtcgctgggcagcatctgatatcattgcaagggtaga

SEQ ID NO: 1303 - DNA, 633 bp, Oryza sativa
attcctgcgcccgtaaaggcaagtcaaatttcgggttgttgtttctattgctaggtggttgtggtgcttctgcgattagtggctaaccgatatggttcttcagtatgccaggacgaaattacatctttttggctggctagtggttcacttccatgatagcgatgtcacatgtgcaatattttatcaaaccaaccaactactatgatactttactctataatagcttactttaggacagcctagtggtaacgtatgaacaaaacatgcacttacatctcaacctgatctatgtccttatgcacttacctgaaatgattgatgtcagatcaatgcactttcattattcgtgtgatatttcataagctattgtgttgcaagctctacaagtttcaatgcaggaggtcacatgttttctttatttgcattaaacaggatatggaggattttcttacttaatggagcctctatggtggataggcatgatttctagtaagccacatttgattcctttttaaattatacaatattttgtacttcttgaaaatgttcctttcttttctgtcacattatgtgcacaatattttttttctatcattggatttatcagttttttcccctttgatcttaacatat

SEQ ID NO: 1304 - DNA, 7271 bp, Oryza sativa
ccgcgcacactatccccgttgggaacctctagtagcgaacagatagcatggagtttattatctcacccctccatgcatgcactcctctacgccatgaccagtgtgtgtttattctgaatattttttttctacctttttcaccactgcccaatgcccacttcgtttaccttatgctactgttttacttaaaatgcaatttacttcttcacccgctactactttaaccctctatatatcctgagtagagcctcgctacggtgctctccactaatagtagaaaacagtttgaaccgttgatcttatttgagctaaagattcaaaactatttatactaccacccaattagcgatagtagaaacataaaggggtattattgtctaaaagaaataagtgtgaaaagatataatcgttattagcagtgactaaacttttttccctcttttttagctttctcgatgaaatactacttgccaacccagctgctacccttctttctcgatgatccttatattagcttcatgtcagtgagaagtagcaagctagctatctacccaagaaaacatatagaagagtgtgtgagaatggaaggcattgggagagccaacattaggagattaacaagtccgagctatactgtgcacatgttatcatgctcgtcccagatattctgggcaacaattcttcgaattcgcaacagtccagcgtccagggggagataatcagggtgttaacggcctggctgcctcgtatagcctcaccagcctgagaattgcatgcctgggctgggttgatcaggcttcgtgtgcacctggcggcgcatttccctgattttttcatgcctcacctaacctattcactgtattttcctgtttttctgaccagtgaagatcagcatgtggttcttgatgggagaattcatctgatcttttgcatatgttgtgtacctttcggttggctggttatttcatatggttcagtagaggtgtttgtgccctggaatgtcaggaggagcatcatgattcaaaatctcattgtttttacttgtttcttttttcttgttttaatctaatttaagtttaacactcgtacgaaactaccaataaatttgcaaaacctactttgtggtccatgatgcacacaccatgtaccatattctggaataattaatatgctacatctattttgtcctaacaatttgctttctgaatttaataggattcattggtagaggcagctaaagaggaagctaaattaaattattgcgcatgctactaaataaaattatactccagagtctgatgtttgctttattttggtttgttgttatattggtaaatgtaatgtgctagtcaatttggtctgttctgttaactattttcgttgcgataggtttaagaaggaacatgatgtgtaactaaattgtatcttttactttcaactgaaagcagactttctaagggaaaatgtgcatgaaaatggttcatggagtgttgcaaaaattagggggttgctaattcgtgcatacgcgccagcaatggagttggcgcgcaagttggcggcccctcctcctacgcgcgtgttttcttttttctttttctttttccaattttggcacctcccttaccttagcgtgtttttctcaatttttttcccgctgtttctttccgatatttttaatctttcgcacacgtattttcaaatgtagaattgaaaatttttaaatcttgacttgaaagtttttcaatcttaattgatagtttcaaatattgagttgaaagtttttctaatttgagataaaagtcgaaaaaaattgattcgaaaatttaaatttgagttgaaagcttttctagtttcagatgaaaagttgaaaatttttaaaatttgacttaaaaattaaattttgagttgaaagttttaaaatattagattgaaaaatttcaaatctgggttaaaagttttcaaaagttgacttgaaagttttgaaaatttgagttgtaagttttcaaatatgaatttaaagtttcaaattttgtgttgaaaatttcaaatttagagacatgtttaaaaattgagttagaaagttttaaattgtagatgtactcacacgctaattatggcgctaaccacgtggagggcgtggagggtgatgtgtgcatgtgtgggcagtgggcctgcgcatccgaaacgcgcgcgtggtggcttgaccgcgcaacagcaatcctggcaaaaccatgatctgcttataccactcaattgtgctctttgtattgcaatgcctgcagatgttgccacttgttactccctccatttttttttttgacattggttagttcaaaattgaactaatcaatgtcatacattaatttgtgcaaggaggtagtacttgttagtgttcttgtgatagctttgttagtgtattgggaatgcaaattttcatccctcgagaggacatccctcgttgtttgcatgtcatctaaatagctattaaaaaataaaaaaattgacaataattaattcaaccctctatatcatcacaataaaaagaatgttagtctgagacgatcataactcctatgacttgtatataactttgctttcctgctctatcaatatataaggcaatcttcttgactttccctaaagaaacaataaaagaaaatttgggtgataaagagacaccatctcttgtcctgctgcttcttttcattttacttatgtacctcttctgacgggctataccttgtctggtatacacgtcgacggttgttactcctacaattctatgtaccacctcttgctcttgagctatgagctatgttggggttgggaggcatcgggagagcctggtccatccaactgctgcacatcgccaccgtgcggaagtgaccaagagtttgcttcaatacattcggccggctgagagaattcttcctggctaaatgtatttgcctttgtagttcgactgatgataccatggagctctacttatttgcaccttcagcaaaatggaaataccggaccaagtgtgcacggggccattcccgagttctgggactatcacactccgggcccgggtgttcttctcccagtctttcaccgctcgatcgagcatttcttaattattgcttaattaggacgtacctaattaggcgttgctaagtagcttaatttcagtttcatttctctgtgaagtcttcaaatgattctgattgacatatgtgactcaacttgcacatttgcaagaggaaattaaggaagggaaaaattaactcaattcgttgtgaaatggtgtgcaattaagatctccgtagttatacaaagtgactcgattgccttcataagcatcaacccggcctattgcttcctttctttctcgatgatccttagcccgacacgtcaatgagatcatcagaagtctgaagctatatatcaactcgatcggagtgagcaagaaaacacatagaaaagtgttgctgactcgtgagtatgtacataggcatgcatagaaggcatcgggagagcaagcacttgcaacgcaacaagttcaggatgtcccctgcacgcattggcaagcttgcccggaagagtccgtgctacgttgttctgagtcgcgatagcgcaacgccacaggggaggggagccgatcacggcgaacacggtggcctggtagcgtggctgggctgatgagcgcacgtgttcctggctcgtttcctcatttcggcgactaagccagccctagcgcatcacctgggcttgacgggaaatgacaccgggccgatcggggtgggtagaaatgcgctgtggcaagagatgtgtttttctataagagatgtgtggatttaatattgaggtcccatacaaggagcggatctagaagaagatttaagagggactcatctcctttttccttcttcaatctccttactctttattttcttcctattctttcccttttatctcccccttctagcaatggtgatccagcggtgtaggggggacttcacccacgctggatccgcctctggtcccatgtttgatccccatttcgttcccaatttctccataggaaaacgttccaaatctctccctcttttttttataggagtaactaatttttgatttttaatccatgcagcatatattctttttatcttttctactccgttgatttatatatattattcacgaaaatttgtcatgggtattgcaaatcacagtgcttgtaaatgatgtcagattgtcatcagttatgagtttcccttgataacttttatttttacactcaagaactggttaactggttaagattttcgagcattgtccatattcatataaatgttaatgaatctaggcataaatatatatctagattcattaacatatactccctcattccctaaatatttgacgccattgactttttaaaatatgtttggccgttcgtcttattcaaaaaacttttgtgaaatatgtaaaactatatgtatacataaaagtatatttaacaataaattaaatggtaggaaaagaattaataattgcttaaattttttgaataagacaaacggtcaaacatatttaaaaaagtcaacggcgtcaaacatttaaggatgaagggagtatatataaatatgggcaatgctagaaaatcttataatatgaaatggaggaagtagcaatttgcagtccttgagaatgtaccatgagataccaatttttccattataaatttagtatcccttgatatctagatactatgagataccaaatatacaatagaaaaaaaatattacctcatgttatctcctcaattaccgtaccgtaaaaaaaatgctcattgaaaaagtttcctccactgatcctgttacctgttgccctgttagcagtagcagtgatgtgtttgtacgcgagcactcattgattggtactgtttttctttcttttctttttcttggccctcttccaatttcccaataatggctcgtacgttcagctgccctttgcctgtactgtaggcacttctactggaaatcacttcttctcgccaactgcatgctctctcctatataaatgccacctttgataattattcattcataggactcatcggcctttataaacactcacccctgtcgtctcccttctttctctatgatcctcatagcttggtttaatacgaactcctgagtgagaagaaacagatggttaaacatgatttgatctcattgacgagttgtgacttgtgacagctagtgatcagtatgcatgggaggtgtcgcactactagaaaaatcatttgttgtcacgaaaaaaatcgtggcatcaatactaaaattgtggcaatagatatatgttaccacaattgtaaaatcgttgctagccgtggtaataaacagcatggtaataggttattgcaacgatttttattttgtggtaataaatttagatgttgctacggaatgaatgtggcacaaagtcatattacaacacttcacatcgttgtaataaaaattattgccaccactccatatgtagcattagttttacgtaccaaattaaaatttcaaatattaatctatcatcctatctatttatctagatatcttttttattttgtgtcttcgctaggatttgaacccaagacctgtccttcaggtgtgctctcctttatcaactcacctacgcatcaattctattggaaaatgcatatcgttccatttgagcctagctaactgagatttgaatcatatatttgaatatctaaaagatttcaaatgaaaaagttatcacctataaaattgtagatctcgtcgagagctataatttccatataaaatttgtctcaatccgagtccatatgaaaaaaataagttaaattatgagacaacaatttttttattgcaacgaatttgttgatcgtggcaacaaaaaatagtgaaaagtaccatgtactatataaattgccacaaaaattaaaattgtggtgatagaacatgcttttttgcaatagtacgattttttgtggcgatatctcattttttattgcaacaaaagtactaaataaaatagatcgttgcaataaaaaataattatttgccacagaaaaattatcattgcaatagtataatatattgctacgaattatgttttgttgtaataatttggtggcaatagcacaattatcttgtagtgttagggagagaacgcaccatggaatcaaaccattcaagcgctataacctgcttgggtggctgccttagaacactacgtcgcgatgctttggaatcgcgaccatccagcacaagggagacgcaggggctaaccagcaaccagggtccagggtagggcgttctgacgcaactgctactcgatcgcctcatgcttgaatgcttctgccgattcggtctgcacgtacgatttggtccgaaacaacacaacgtgcctcatgcgtgctcgtcatctccgtcaggacatggcaccgctgcatcgcgtgtgcttgtactttgtaccacggtcactgtttgatttagttttttaagttgattattaacacgaatcatccacttgattatatgaataaagtagatattctgtaagaaataaatttaacaaacagtttaaagaagtggtcaactaatgcagtagatatccattttcaatacctactccctccgtattttaatatatgacgccgttgacgttttaatcaacgtttgaccattcatcttattaaaaaaatgtaattatcatttatttcattgtgacttaatttatcatcaaatattttttaagcatgatataaatatttttatatttacataaaaaaatttgaataagacaaataattaaatattgataaaaaagtcaacgacgtcatacattacattaaaatatagagggagtactttattagtacccgcgttcaactctcaatatttttatattgtggtacgaaggtagttggaaagaaaaatgacgtagatatccattttcaaatgagggacgtttataagaggaagggtagttagaagtaagaaccataagatgagaataaatttgaatattagatgattgatgcgacaagaactgctactgtaggatgttattaactacgcatcctaaccttattcaaggtcttcgatgttgcgcaatattaactactccatccgacccataaagactacatgtctaacgttcaaaatttgtctcaaagacttcatttacagggtttacatgaacttcaatacatttggtcagctgagaaacttctt

SEQ ID NO: 1305 - DNA, 2520 bp, Oryza sativa
agctagctctataagcaacatcattgccaggctacaaaataaaattctactccagtctgatgtttgctctcttttgttgtgttatattggtaaatgcaatgtactagtccatttggtctgttcagttttctaagatacgtctttcaaggtgccaggattaagaatgaacatgatgtaactacactgtatccgctattttgaaccgaagtcggattttctaagagaaaatgtgcatgagagttgatcatggagagtgcattatcttgagcagttgtgattattccacttattgttcgccttctgtattgcaatgcgtgtaaacatcagttatcaacgtccctgatagctttatattacatgcaacacctgggtaagatgaaatagagcttaggttgtaccttgctgttggcacatgtgaatgtgtttgtgaacactcattgattgtatactggtatatgtgcatcctgaatatccttttcacttatccaccacattgcccgttcagttgctctctgcatgctcacttcaaattggaattcacttcttcacccactattcccctaacccaaggaaaatgtcacactttcattcgttttcacttctcggggcttgtttgcctctataaacacctgcactattgtttcctttcttttctttcttgatgatctttagcctctgatatcaacgagaagttgtgacctaccgactctgagtgagcaagaaaaatagagtgagcatgggagccgttgggagagcaagcattaggacatcaacatatcaaagctaccgttcacttgtctttgcatgcagagagtggaaactttgggcaaagatgccttgcactagaggcaagccagctacactgtgtgactgataatgttgaagatgagacaactcatccacaccgagtagttgatcaggttgaacatgagagacggccttgctgcctccagtgtggatcatggcgaccctgatgttgcatactagaacaataggccgcagttcgattccccgcgttgcccacaaggcctgggcaacgccgatgctacatactagtcgcacgattggaagcattggctgctcgaggagtcggcgctgccctcgtacccattcttatcgacccctttaattgttctaattttggagtgttcatgcaaagtttgattctcggttggtagtgacaatcctcctgtacggtgtcctatcttgtcagatgtcttactcaaatttaatattgccatcttatatagtattggttatattggatctttgaacttttttcttgagtttaatacaaatccctttgtcaatcaatattaactaaaagccatatgcatattaatagactataaacacagttagttttcacattttaacgacctatgtcaatgtcaatcattttgcactatagaataatcttgtatataaggtaagaattcgagggtttgaaaggtatcaacctttgctagcttcctctccattgtcaatttgtcagtatcaatgctcaaaagttgacagcatccatccacagtacgacgctgcatgcctctcctcagttcttgattctaggctacctgataacaacataatcctctctctcgatctcgatgttgtggcttcaaaaaggaaagatgatttttgagaatggaaggcatcgagagaacacttgcaattatagcaaataagagatgttgtaactatgtcgttcttggactttgatactacttgtgaatggctgtggccctccatcgcacgaccattctctctacatttgttttctttgcttctcaccagctccgatatttcttaaagagttaattttgatttttttgctgtaatttatttttcatcattagcttttaaattgctatgaacacatatataaaagttctttcaaaaaattattttggtagctaataaacgatgtaggtgaaatgatagcacttgcatgtggtttgaactccaatgtcccttcaattctcatgaggctcacatgtcaaacttgtgcatctaaaacaggttcagttggccgggaacatatcttatgcacacaactaacaaatatcaccgaaaatatttagaaaatattgtgcatatacttccaatattgttacacatatgtgtaaaatcttaacctcaaatccattatattttaacctaaaaaataaatattataagtccatcagaatttatcttttttccctctttatataggatgaatttgatgatgggacttcacacttagatgtaatattattgaaagcacatgcataacatttttttaatttttagtgatattttttagtttttttaaactaaactggcatgagaactgccaattatatttcattaaacagagtaaaaacccacggtctacagaaaaagaaaaacaacctctcgacgagtagagactcgccgagtcctttatccgcggccggtacaaccatacaacacacggagctccacacaactctagccaaactatcaacgaaacaatggcgcgaatccaacaacgaatat

SEQ ID NO: 1306 - DNA, 2992 bp, Oryza sativa
ccgccatgtccgagggagcggcggccgccgcgccgtcgccggcagagatgtacggtgacgaactaggcgacctcgagaacaaggtgccggtgatagggccgtagacgaagggcgtatcgtacggccgggatgatgctgccgcgagttaatttatacgtttcaatgttcactgctccctccgtcccattttcacgcctaactttaatcgtctgtttttttataatttatatctttattgttatgagatgataaaacatgaatagtattttatgtgtgacttatatttttaatttttttaaaaaaattgaataagatgaatggttaaagttgtacgcggaaaattatggctgcattcaaaatgaaatgggggagtatgaagcaagagcgatcattaggctgctaattaacgtacgtttcagtatttaatttgtaaacggacgtgctaactaaacatataaactttgttaccgtaataatatattagttgacgtttatacatttgtgtagctctaaatttgcctattcttttttcttgttttcaatttgttcttcacttcttctgcttcagttttggacttcaaatatgatcagatgcatgcaattggatacgtaattaaccaattttgatccagtaaacaagcatttattacttttctaattgagagttacggaaagcatttaaacgcgtaatcgagctctaaataatgttgagtatcgtttctttctgaggttttaaatatatgcaacgtaacgcataatgacctggataattaacggtgctagtattttgatcaaacgcttaaacctaacgattcttaaaaataattcatcccatcaaagtatctctctgaaaagaaaaataatatcaagcttatctagctaatgaaaaataataactttgattaagctttttttaaaaaattaatggtagtctactctactctacctacaaacagtcctaacgggattttttttttcattttaattttttaatatttacagaaatattataccgacgaaaatatttacagaaatagaccctgccatccagtatagagcagcaaggtgacatggcacacggcgccgtgtgcgtattttgcgctgaggtcccttgctgttaaatgcagtttttgcctgctcagcggcctccccgagggcggtagggtatatttctgtaaatattttcgtcagtataatatttctgtaaatattaaaaataaaaattttaaaatgaaaaaaaattcgtcctaacggaagcagaagcccactagattagctagaacacccggcccatgggcttggcctacccacttgatattccaggcccattaagcccaacccagcgaagcgaaacatatcccacccaccccaccgtctctctccatttggactccgattccacgccgacgtcgccgcctgatcgtctccggcgccggcgatcccaaccgccgcaaccaccgcctctccctcctcctcctcctccggtaggtgctcgcggccgctcgacggccacgcacgtgctcgtgtctcgctgtcccgtccgccgcctcttctccactcccccacgcttccgctccagatctgcctctccgcccgcccggatctagccaccggttcgccggcccgccgctcgggagctgaaccgtgtggccgagtggcgacctctcctaccgcgtagccatggtaagatccgttcattctatccggtttcgtggtctgtgtagcgagcgctgtgtttgcttgcgcggggggaggaggatgatctcggaggagattagtggtaggaatggatctagtgttgggactgagatggatgaactttctgccatttgctgttgttggtcttctgcagatcaatttcgtgctcctgatcagccgccagggcaaggtgaggcttaccaagtggtactcgccttacacccagaaggagaggactaaggtcagcatcctgtactgaattctgtaccaaccactgatcatatgatgctgatgctgtttctctgctctttgagcatcactagcggtggctgttgcttctgttcaatagttagacgatatgctttgtagttcgtgtgatccatgtgccgtggcagggtttgcaacttaggctgtttttgcttaaatgtacactaattaaacaagcatattattctgttctaggatctgtctgtatttagcacccatgtttcagtggaccttatgatgatgatgattcttgtctcatgctcaaaggcacggtattggttcttttttggttccacttgtgggtttaatgtttgcggaaacccgaaagatctgttctgagcccatgaataacactgtaggtgcccactgaacattcttgacagaatacacaaagcctcttcattttattattcttgggtttgcagtgcccaattgcttatgttctgttggtgagctgcactgtactgtttatcttgtatgtaattttctacacttgttgaaaaggttatccgtgagctcagtgggctcattctaacacgcgggccaaaactctgcaactttgttgagtggaagggttacaaggttgtgtacagaaggtatgattccagcatgtcattggtgttctattgtttgactaatcggttatgttgcttcgtggtatcttctaaattagctattttatgttctgtttataattatggtggcaaggtatgcgagcctgtatttctgcatgtgcattgatgctgaggacaatgagctcgaggtccttgaaattatccatcacttcgttgaagtactggaccgatattttggcagcgtgagtgctttgatgctgtttatcatgtagcttctctttcatttgcttgttgtactgctgttttgagtccttgtttcaacctcattaggtatgcgagctggatttgatattcaatttccacaaggtaatatcttttggttctattgaagttgctactacagaggatctaggattggaatttacatgattcttcttgctagtctattgtca

SEQ ID NO: 1307 - DNA, 15601 bp, Oryza sativa
acaggtacctgattgaaatatcatgggacagaagaataaactgactgaatgaaaactacaaaattttccaagcatcatataatagacaacttgcaggattgattagattatgtgaataataagggcgattgaagatccctttagtgctatgctatttaggaatttatttttttctcagcaaatggttccatctaaatgtattgtgataactgatagcaggcagaaatgtgctgtgacaactgataaaagataatggaatcctattcaacttaacataatagcaagtagaaatgcattgtaataactgataagaatgaagtgtgttacaaacttgccatggaaatttcatcataaaataggtaagtggaagaacaagtgaggggaatggtgatgatctggagttacatgaatggctaacatgtaggttgcatataccttagtcaaaggctctgagaatgctaacataagagcaaaacaggggcgaacagggatatcctgaatcatcattgacaattgtggaagcaatgacaaatctgagaaggaaaaataatgcaactgctcagacattcagctgagatatcataaaaataccgctgttctgtgtaattaggaacaatggtacaatgtatcctacatgagtccaatcaaacaccggtttattttgacattaagtaacctgcattgtacccttcattaaatgtgcattttcttgctgtcaacttattgtttggacatggtagctgcaaaaccatattctttaaaaggaaaaaaggaacaatcttccataaggaggcaggcatagattcatataggagcattttcttactgtcttcactattttgtcaatctattactacattttaaacaaatgtagaaatcttaagatacagacaatgataaaattaagttatagaaaacaagagttatttttctaatcaaagataaatatggttatcctggttaccataaaccgtcagaaaaattagaacaaagaatttatggtgaaagaatattttctttaattaattgtagtgctagacctcctgatcaatataatttgctaaaaaaaactattgtacaatattgtctttcaaaacataacataagttcataaacccattattttgaaacttgtgttatggtagtgcatattatgaagataatagaataaaacgaaccaagaggcggtggtcttccagttagcccagaaaatcttggtgatgctatattcttatcggttgctacaacataatcaaaatggccaagatctctcccatccaaactagccagtaaccatgaactcctatcttgaatccagtccatcctgccaatggtgacaccaaatttggccaccacacctaacaggcacaagagatagcatgtatgagcagcaagttctagattgctggtactgaagagtcataaactcataatgctacaaagtaagtctaaccatcctctagacaaagtgatttgcatattgagttcatgcctggcactcccacatacttcttaattgttccctcctgtgcgaatataatgccagaaagcttatgttagtaagtagaaagtatcattttaagcggtgcagatacataagactacatatcattctaatccacccccaactccatcttttgataaggatcagcactacaatagtaccatcaacatcagagacatcacaggttaagttgattctgaacatgtgagtaacggtagttcgatctatccactaaatttttagagtactgcacattatatattcagtgatgagtagatttggcagcagaaagatggcttactattccaagtgcaacctactgcattctgcattcagacattcagttaaggggttcaccagtaaactatcccaattcccacagtcatgctaccactagatacgtgacatgttcaagttgaagcctcaactatgggagggtttcgaagcctagaaccttctcgaaatcagtgaatttgccggcctcccgatcgaagcacgcgaacatggccttccactcggcgacgagcccccgcgcctcccacccgctcacgacccgagcaacctcgtcgttgctcacggtgaagtatggcgcgccgtggtcgaatcgcagctccgtgccgtcctccatcacctccctgcgcccacacaaaccagcaaaatggggtggaaaaaataacagcaccgatcagcgcggaaccaacacacgcggcccgggcagtaaattggtcgagcacctccgctgcgccatgcggccaccggccccgcggccggagtcgaagagcgtcaccgccacgccgcgcgcggccagcagcgacgcgcatacagcgcccgatactgcatcggtggacaaaccaaaaaggggatcgcaggtacgggtcagttcaaacgggagcaatcggatcagagagagaggatgagggattggaatgggctgcgtctgcttacttccgcccccgatgacggcgacattggcagccgaggcggctgcggcggcggcggcggcgctcattgttcgaggcttcccggcgacggggtgcggtgcggagaatggagagcttttccgatcgaggcgggagggcttggctgcttccgcggtgaagagattgcgcgctgcggcgtcgacgtggcgtctcgtggacccctcgcttttctgggctcttctccatccggcccagcaactgaatttggcccataaggtccaagtcttctggactaatcttttcgctcatgcttatacttatacttatcagccaaaccaaaatttgaatttttaatcttaaatttaaagttgattttagagttttttttgttatcaaagtttattttacaacatttgcttttaggtcactaagaagcggaaatcctgtttggcgatcgatcgccctggggatggatcagcgatcgatcccctcccccctccctcccaccacccctccacctggttttcatttttggcaccgcattattttcttattttagtaaatttatacacctaaagtttatacacctaaagtttatacatctaaagtttagagaccaaaagtttataagtcaaaagtttatatatccgattcaaatttgaatttgaattcaaatattttttttatatatagtatttctatacatctaaagtttatagacctaaagtttatagatctaaagtttataagtcaaaattttatatactcgtttcaaatttgaatttgaattcaaatattttctatatatcatatttctatacatctaatgtttatacacctaaagtttatagatccaaagtttataagtcaaaagtttacagacccgattcaaatttgaatttgaattatgtcgacgtttgatgtctcgactacggtatttggacagtatggggatcgtcggtgctaggatatacgcgagactgaggtaaaagaaatggggacgaggatttttatgcaggtttgggcccctgaattgtcaggtaataaccctacatcctgttggccgaagccggtattgctctttattcactataatcacaccagtacaatatgtggggtagcctatctaactgttgtcgacatggcggtctgaagatctgactcgtagtcgacaacagggtagccttcctcctcgagctcgcgccctgacggaatcagagacagtgctagatccctatggccggcctctgaaggtaccggatagggtcgatccaggcgtatctctgatgtcgatatctggcggcttgtcttggtgtatgttgacttgtatgctgtggcttctatgtcgattgtgttgggtgttgattttgtcaggtgttaatcctgttgggtgttgattgtcttgtcccccatggtggttgttgatcgtgttgatcatctcatatcatgggtgtccccctgtcctcctaggggggcttgtatttatacccataggtgtcccctcgtccaagtagaactagggaaaccaatatggatacaatccgagtagtccttgttgtttccatgtagaactctggttgtcttttcttatccagaactccctccatatctgaagtcagtttccgtataagacatggtatgtggtggatcctgccaagatttagtcaactactattaggtatgtggtatccataaccctgacagtagcccccgacttcgatgcaaatgaacgaattcatattctcaaccgcgcgcaaacattggagtaactgttatcgagctcatgtgaccgttctcggtgagtttagagataacgttggacttcctttgtcaacctcgtgcgagcaccgaaagggtttgtgtaagtcaatctctgatgtcgaccgagaaagtatagagcgtacgactaattctcacatcttgctgtaatcgagaatttggattgaagtcaagaaattttatctcggcgggtacaccatctcttcattccgtattccttgtcgagatctagcaaccgttctcgagcgattgagaaggcgtagagtctgcgacggaactttgtcgacattggtcgtactcgccttagtcgatcttggtgtagaaccatagagacatggagtcttcgtcaatgtcgaatagaattttcctgaaatcaatactcagaaaagaatatcaaataaaaatagcccccgagcgaacgctcaaagggtgacacgttataatatgacagactagtgaattgaatgtacagaccagtgctttgtatatgagtgtcttctctcttaccgactccgatcagtcagtttgtagagtcatacactctccgtagcccccagccttgtcgtcggagaatcgttatcagaagataaggctcttggacctttgacctgcctcggttgaacaagcactgattctagcccctagccgtgaagttggaaaatccatttccgattacacggcttagttaatacgcacggcgagaactcttacacgaccagatcttacatggtctttcgtctctgaaggatccgacaaggccttatcggctctgggcgtgcccagccgaagttccctcaggttcctcggaggccttgtcaagacggcgtaaagggacagtaggataggtttcaacgctaggtgtcatctgggtaagggatctctgggtaaaacacttggcgatcttgtgtacctaacatcaactttattgaagcaggggtaatgggagaatcgctggtcgaggaccagacagtagttgtaactcgaccatttgaagtggaaatagtgggagaaacgagaaacactacatcgctagtcgaggaccaggcagtagtcgtaactcgaccacttgaagtggaaatagtgggagaaacgctacaccgctggtcgaggaccaggcagtagtcgtaactcgaccacttaaagtggaagtagtgggagaaacgctacatctctggtcgagaactaggcagtagtcgtaactcgaccacttaaagtggaagtagtgggagagacgctacatcgctggtcgaggaccaggcagtagtcgtaacttgaccacttaaagtggaagtgatgggagaaacgctacatcgctggtcgaggaccaggcagtagtcgtaactcgaccacttaaagtgaggcaagagagatcactacgttttactggttcgagaaccaggagtaggagtctcttaatcacctataggggcgctaaagttggtttattacatgtgcatatcatgtggccagcatgactcccatacccaacttatagcatatccggatatccgttcgcaatcatgtcgggtgatcaagccgacggcgttcgcgaggaattatccgttaacaaccttttctcgagtagtccagcgatggccggtgctatgagataggtcgtcggtcttcgttggcaggttgggtgcgataactccgcatttgtcgagaatgttctcgataatggagtgtactcgatcataacctactcgagtgctcaattgttcctgaaaaatattttctagaatgcaagatatatagcagataatatcgagtatgtactcaaaaaactgcatggatcttctagtattatcaggacataacgagcagatgtaattattaggcattatgtaaaccgtaaacaagaatgatttatacataagagaacggagtgagcccccggcgttagacaatagttggcctatcgtcggaagtactcgcacaatggatattgtataagaagtatgctctaggtaaacataataaattattgatctgacaatactgtatgatctgaaaagtaggtacggtaaattgtgtatataatattgcgtacctttgtagatacatgccggatgtatatacggaattattagattaattaaaaatcaatcttactaattaccttatttgacttgcatatggtgaacagccatcacacgtggctcccgagatgatacacgtgtactgtacggggagtccaccaatccgatcagtgcatggtcttatgtgctgatgtcatgcatgctccaaatggtttatttttcaacatttgcttctaggtcactaagaagcggaaatcctgtttggcgatcgatcgccctggggatggatcagcgatcgatcctctcctccctccctccacctggtttttatttttggcactgcattattttcctattttagtaaatttatacacctaaagtttatacacctaaagtttacacatctaaagtttagagaccaaaagtttataagtcaaaagtttatatatccgattcaaatttgaatttgaattcaaatattttttttatatatagtatttctatacatctaaagtttatacacctaaagtttatagaactaaagtttatagatctaaagtttataagtcaaaagtttatatacccgtttcgaatttgactttgaattcaaatattttctatatatagtatttctatacatctaatgtttatacacctaaagtttatagatccaaagtttataagtcaaaagtttacatacccgattcaaatttaaatttgaattcaaattttttatttatatagtatttctatacataaatttactgtagtgaaaaaatttgtgtggtgtactgtagtagaaagagaagaagggggagaagagggaggagtataggggtaggcggggtaaaccgatcgctaggcgatcgcccattagcctcccccactaagaacacgtatataaaagttttattcacaaattattttttgtttgcaaatagggaataagcaaaacgatggggccgctcttttctggactttttttattaaaaatgtcgtgcgtaattttttttttacgaaacgtaactatagttgataatattattacacttgggttaacttgcatttacaccacagtaactgagaactaattgcgtccacttctccactataaaaaccattcaagcctccggattccagcgcaagaggcacagcgcgccactccacacgaaatggccaagctcacggtattcgtggccatcctcgccgtcgccgccgccgccgccgccgcggccgtctcgacgacgacggcgcacggcgtcgccgtcggccgccgcgctctggatgagtacaggagcgtgctgcgcgtgatcgtacccttggaggtggccggagcgccatcgtctgggtcgttggacgacgacgcggcggcggctctcggccccgacctgccggagtttggagctgcgccggcggctggccccgccgcggcggcgtgcggcggcgatgaagttgactgcgacaacaaggtgccggtgtatgggccgtagcccatgtcgtgtgaaggttttcacttcgtcgcctacggaattgatgaagtgcgtcgttttgaccatgtaaatggccttcagattattattgttacacctgaataatgaaatgcagaactatatatatcctaatttaatcaccttatgtttttttttctctctaggataaatgttgctagctagtgatttatcatatttggatatgtgagactccagcaaagatacagcaatgtgacagattttttttcttcgtgcatggtttattatcctcgtcttcttcatcggctccattttagatagctgaaattgatggattaatggattacctgattttctttatagctatttaagggtacaagcgaataaattaaatcatacaaaattgaaaggttgttctacaaaagtatctcaggaaaatttgatatagaattctcctttacacgaaacacaccgcttaggaagcttgcaaatgaaaatccaaaatcataatcagtgaagaacagggccggccatcgttgtcagcattcttttttttcctcaaacaataaattaatgtgtttccatttaaaagaaagaaacaaattgtcttccatccgaatatccaaaataaagccaaaccaaggtgaccgccgagcaatctacctcagtccagaacttaaacgacattgcacaaaccgttctgtcgttataagattcgatgatggttcatatgcagataaaactccagaatctgcttacaaaataaacaataggttagatgcttgcggggattttttttttggaatgctcaattaaccttggcgaatggacatatcagagaaatgtacacatactcgaacaaaattttgtttctgaaccaatgagattaagaacaaaatttgcagcaagaagacaacaaactcactagcatttcaaatattccatacgatatattttaggtgtttttagatgaaagatcatcacgatccggctttgaaagaaagcctagacgtccattacagaggttaattacaagcccaacctaaaaacaataggaaacataccaacactaattccatcacaggagcttgcatctagcaacatcttctacccaagttccacacaaaaacacccaaaagatcaattttcctaacccacgagtgctattttttcagatctccagcggcaatacatcctgaggatatgtttaagtaggagttgaactgcagatatactgcagagccacatccaaagccaaaataagcttaatatatctgcttcttgagcagagtaaacactagctagtactcctggtagaactccagatagatctacagagagcacagaaaacgttgaacgaatcaatcgttgaattcatattcaaaatcctcgaattcgtcttcaaaatcacccatcaggtcagcacccatggaagccataatgtcatcaggaagccgctcagggaggctttgcactattttctcccactccagtcggaacctcagtgcttcgtcggcgtagctgcagaagagctgaattggactgaaaggaggttcagtagaaacgaggaagacgggattcaacgaatctatggctccgccgatcttggtcgtctcctcgctctcgagttcatacatgtagatgtccgcggatgtgaggtcgtcgcgctcctggtagtagattcggttgccatcaatggcgttgaacttatccgcgttgatggatatgcacctggtggcgccgacgaagatggcgcggccgccgccgatgctcttcacctcctccagcgatcgatctccttcacccctcccgtgctcatcttgtaaatctgcacgatctttctgtccatcttgaagatgagcagcgcttcccccgcggattccaccacgaagcaacggaacgcggggttcgcgcgacatgtgtttgtgattttgacggcgagagggagccccgtcttgatggcctcggggaccaggatcgacgccaccgaccctagctcgccggcggcggcgtagcggccaccgacgacggccagcctgatgagagcgcacgcgtagctctcctcgaacacggagaagccttcgctgtcggggtcggcgaagtagaccttggcggagtcgtcggcgagcaggacgagggtgggcgaagcgccgatgacatgggcatcgaacccgtcctcgcaaggcagcggcgccgcgaagcgcgtcgtggcgccgcgcttcgcggcgccggtgaacgggttgaggacgcgcaccgcgtgcgggggggctcgcctcggccagcacgaggtcgccgccgggggcgctggcgacgaggcggtagcggcggccgcggccgagcagcggcaggtccatgcggaggaagcggccggtggcggcgttggcgaagaggcgcgcgtcggtctggaagacttcgtcgagcatggcccagtggcgggggcggaagcgggggtcccgggcgctcgcccccctggggtcgtcggtggcggagcgccagcagcggcagacggcgcggtagcccatgtagtagtcgaggtcgccggtgtggaggaagcagcgggcgatgcggttgatgaggtccaccggcagcgtcgaccggggcttttaactatttgccacacttaccagagtggggcttaacgatttgccactaattccacatattatagacacataagggttcatatgttatagacacggtgtgacaaatcgttaattgacatgtcacaagagtgacaaatagataaattttccgcgtcagagcttttaactatttaccgctttatgagtggtggttaacgatttgccgcgaccagtccgccattgccgtaggctggaggaaggggtgaaaggtttggaagcagtgcggaaagcagctgaccgacgggcgacggtggcgcgatttgaagggaccagtggctgcactgcccgggggatgtggagtagacttttattgtggcgttttccaacgtggacgacgaggcgaaaggacgtcctactcccctactatgcgcgattcccgggggaggtggggaggtggtgggacgtgtgggggtggggccgtgggggagtgaaaggaaggcagaacgctgaacgcagaagcgaggctttgtttagatttcaaaaaaaaaaaaaagccaaaacttcgtataaaatgtttgacacatacacgtagcattaaatatatagataaaaaaaattaattgcacagtttatatataaatttcgagacgaatcttttaagcctaattacgccatgatttgacaatatgatgctacattaaatatttgttaataacggattaattagtcttaataaatttgtctcgcagtttatagatagaatcggtaatttattttgttactagtctacatttaatacttcaaatgtgtgtccgtatacttcaataattttacacccaaagaattaaacacacccttagcaccaatgtgtagcacaatctaatcttaatgtgggccctaatacaagttgactataactatttctattgccacaatgcttaaggccttgtttagttctaaactttttcttcaaacttccaacttttccatcacatcaaaacttttttacacacataaactttcaacttttccatcacatcgttccaatttaaaccaaacttccaaatttgacgtaaaataaacacaccctaagtttacataagaatagatgttggcccattcacacttgccaaaccaaccatttaagaatagagaagagagagaataaattcttcgatttctttattctcttgtggtgcactctaaacttatggttgtttttcttcacaaattttgacagtttgaccctttgcaaaaactatttttacaaatgaaccgctgccaaaacttatttcaaatctgatcctttttgctcaacgccaaatcatgtggcgttgaacttagatacctcagcgccacgtcagctggcattgaatgccgtgccacggcggatgggagactaagtcagcgtgccaacgtacattcagcgccatgctatttggcgctgaggtgtctaaattcagcgccacacgatttggcgttaagcaaaagggtcagatttaaaataagttttggcagcagttcatttataaaaatagtttttgcaaagagtcaaattgtcaaaatttatggtttttcttgttgttgcctagtactagcttattgccaatgctatgatgcactttaaggatcttaaggttacacttttgcgacattgtggttgcccttagacatataaaaaattttacaggaaagttatttaaaaaaatcgtgttaatcttttcttcattttttctaatacttaataaggttaattaattgtgcactatactccttgcgtttaaaagaaaggctctgtttagttcgttcgtgtgccaaaatttttgaagtatacgaatacacatttaaagtattaaacatagactaataataaaataaattatagattccgcctgtaaactgtgagacgaatctattaggacattcccaatccaagacactagacatagtttccataaactctacatcatcaagaaactagtactagacactactcttccaatgcaaacactactattccatacttaaatttaatgctacttatctcacataatgtcttggatgttgtgtagaaaccatgtctcatgcaagacatggtttccttctttttcctcatttattcaattgccacatcatttttcatcctaggtgtcagggttatagataccacatacctaatagtagttgactaaatctcggcaggatccactacataccatgtcctatacggaagaggagttctggataaggaaagacaaccaaagttctatatagaaacgacaaggactactcagattgtatccatattggtttccctagttctacttggacaaagggatacctatgggtataaatacaagccccctaagaggagagggcagaggatgaacacccaacataatcgacatagaagccacaacatagaagcctacatacgccaagacacgccgtcggatatcgacttcagggataagcacggctagtaccctacggtgtctccggatactgtcaggagagacgaaagcactatctctgatctcgtcgggcacggattcgaggagaaaggctaccctgctgtcgactatgggtcagatcgtcagaccgccatgtcgacagcagttagataggctacctcaaatattgtactggtgtgattatcatgaataagagcaataccggcttcggccaacaggatgtagggttattacctgacaattcacaggcccgaacctgtataaaaatccctgtctccatctcttttacctcagtctcgcgtataccctagtaccgacgatccccataccatgcaaataccggaatcgcgacatcaaacgttgacactaggtgacaacttattcaatgctatggacaccatcctagttattgggttgggaatgcccttaagcctaattaatccattattagcaaatatttattatagcaccacattaccaaattatggcgtaattaggctcaaaagattcgtctcacgatttacatgcaaactgtgcaattaggttttttcgtccacatttaatgtttcatgcatgtgttcaaacatttgatgtgacggaaaatttgaaagtttaaagaaaaaaatttgaatctaaacacggccaaatacaatctaggaaaggatgtgaccccttgatcccttcgttgtaatagaagcgccgggacacatcctcagtacgttcgtctcgttttacgtctaaggagagaagggctatgaggctgcgttcgggacccccacggcatcaaccaaaccggtgaaatctttcgttgatcagcttggatcgacatacgcatagcacgtcctctgtactcatattcatccttctttccacaaatttcattcgcatgagagaggaaagacacaagtgaaatctgaacaagaaaatggatggatacgtacaagttgttgctgctgccctgccccactctatcgtggaatcgcagtagatgatgagccccatcaccgatttcctttctataatatattttaccaagacaaatttattataaaaatatatttgtttacatctaaatttgtcacctatggatgaaatagaggaaaattgccaaagtttgaaaattaccgggtttccttcacagggccggtcagaccgcaggtatatgggcggtctgaccggctagtagggccggtctgaccgcaggtatgtgggcggtcagaccggcagggtccgagtccgagtctgttttcgtcgggtctcgggtttccttgctcgggaaggcatattttgtgttttctttggtttctatcccgagttggacgtggagaagggcctgtagagggcaagaccaacccctatttaagggacaaggccggttcattgtaaaacccccgaatacaatctatttgaatcgttcttttactatgttttctattgagtaaatttcacaaaactacagatactttgatcaaactatcacaaaactacagatttaagaatgtatttcacaaaactacagatttagagttaaatttatcatggaactacagatttaaggtattatatcacaaaactattgatttaacaactattttattacaaaactacacatttaaaaactattttatcacaaaactacaaattttataactttaaataaataatagtgctatgatctaaactctagaatatgtagttctttgataacttaatcactaaatctgtagttttgtgatatggtgcattaaatctgtagttccgtgaaaagtttaacgctaaatctgtagttttgtgatacacattcttaaatatatagttttgtgataatttgacacaagtatatgtagttttgtgaaatttactcttttctattttaccctagtttagttcatctttgttggtttgcgccgtaaaccgtccaccgccgctgcgagagtgcgacacctctttgtaggtttatcctgaaaaccttccgttttgctcacgagacgggtagttatcctcatatcgatctaaatcggtctagaggctgattttgatctctaaattggctccgctagccggtttaacttttctttttgcaaaacccatcttgatttggccttttggctagatcgaggtggttggcgactccatatcaccgcaaggcgtttaggtgttgcgatcgtgcttatcgacttgtcacaaaaagttgctaacaatatttaataattattttaatagacctaatttgataatgtaagtattactatatttgtctgtaaacttagttaaatttgaagcggtttaactttgaccaaagttaaaacatcctagaacctaaaacatagggaatactattaaatccaaataacactttcaaagaattcaaagagcaatttagtaggattcaaatcctacataaattttactagagtaaattacactcacggtacatgaacttgcgtggtggatgcaaataggtacaacaagttgcaaagtgcttatttcagtacaataactcgtctatattgtgcgaattggacaaaaatgatccaaacaagcaaaattgttagaacttagcatgtactgatgaggtagcagtttaatttacatacttattatgttttggagatcttatttgcaatccaaataaaaagagaaattagtgatgcaaaagtttgtttcatttcatttctgaggaattttcgttccttcataagtcatcttatgtttatttatatctttagggccaagacaaaatctggcgtggcatagtgcaagtaacactaggaaattcattttaatttctatgtctagaatttccattttattgaaagtttattttcatgacc

SEQ ID NO: 1308 - DNA, 5006 bp, Oryza sativa
attagaaaaaaggatatcttgatgagtttcaagaacagatcgatcgaactatatatggatgacaagaaaatactgatcatgactgagaacgggaggcgtcaggagatgttctgttctgctggaaacgtgggacagtatccagacacaaaaaagttggaattcggctggagcattcgctactaaactcaaaagtgagcgtccgactcctctcgtagagacggccaacaccggttgtcccatgcgcatgatgtgatgagtagagagtatagtagcaagtagaataccaatagcggcagcagagatatcacaattgcaacaattcaccgttcaagcatggagtcgaggaagaaattatgtttaatgattgatagatcatcaagaacgtagtttgcaatatgttgggaataatggaaggaaccatgagaaattcaatctgccacatgagaaattcaatctgccactaatcgatggatcttgctcacggattggggattttttttgtttttgttttttgggttcactggagatattccaccgtagcctttcgctcggaggaacaacaaccgtagcctaaaaactgcaccggcttgtgcgtcatcgtcaatgatcgatcctagcaagcatgcatgaactactcgcggttgtattgagcctaggccttacgctgtgcttgaatttgtatttttaattgtaaactcagcctatcatggagagagatacgcacataggccacaacggattttttttatttattaaattttttacaaatctacacctacacggtatatgggagggtgttttttaaaatacgtcctccaaaagaacgtttcttataatgtgacacgtgatcgttattgtaacgccccgacatttgttagctataaacacagctaactcacaccggggtgttatgcattacctgtgatatagtaccagtcccaggatacactagctgatactcacagaataaatgtggaatcaaagtaaactgctttattacatcactgggtagtagtccttataaacgttgctatcatggacatgcccatagatgaacaacacaacattacagaaaaacacaaaagcgacggcgcagaaatgaatagcacggagaactaagcaactaagcgactacgcactaggcaaagaacctagacaactaacttatttcacaggcgaggcttggggctaggcacgaaacatctaaaagtcttcatactcggcttgctcctggagatacttctcggcggtcgggtcgacgtcttcatcttcaaactctatagattattataaggggcaagggtgagtacttaacgtacttagcaagccagggaaaagaatgacatgtcggtttaacaaggaggctacggttttatttgcgaaggctgccattttggcaaaatgatttatttcacaaaattcctagtgagtgagtcaagttttagttgtcgagaggaggctcacgcctcgacccattccacaagttgctttgcaacaacttgtcacaattaacgaacaacaattaaattgttttctctattagttcctttttcacaacaacacagttcatacaaatatcctggttatcccagcacatcaacgtcatcatggccctaacaacaccttggtgtcggacgacaccccaggtcacacagacccgttcctaaccacaaaagttagccgtctgccacacaggcggactctggtaacgttcctttttcagtaaccacttttccacaaacctttgtcaaacaaatctacgctatgagaaacaccttacactcgcccttgaccgtgggcacggctgttcgaacagttcattaatctctgcagaggttgcacgctttacccacacgacacgaaacttacaccggtactggccggtaccggaagttcgtgataaggcctttccaaagctaacccatgaaaatcacataccacctagttgggctaaaatccatagccgagtatcaggcaatgacagccgtcatccactcaggaaataccgaggatgcctcctactcctactggtaccacgccacaatagaggcaaaaagacacccatgatgggcaataaatgtgtaacacttcgtttcctcatcctcggtattccacaaccattggcacaccaactcccatgtgaaaacaatttactcaaccagaggcatcccataaatactcgtgtggtcgcattgtaacgtgttcggatggatttcccaaaggaatcggtccttaacgacaatacgtggccaaaccacaaaggcttgactccgcatcatcaccactttcacaacacattttatttcacaactcctcggtacaacgtaccggatttttaatcaggtaatttggaataacccaagtttcccacacggcaacaacgtaagcatggctaagcgaaactacctcggtaatcgtgtaacgataccagcgcaaacatttgtggagctatcaaaggtatggaaacatcaacctatgtaatataaatgcgactactaggttggtccgtcggttgttaaaacaatccgaggcctaaacatgttaatcgtgtatgctaagtaatgcacttttcaaacaacatatctttgcaaatatagaggcaaagtgaccaaagaggtttgccttgcacagggttggggtcttctcattcgaaagcggcgtccggagcttcctcgaactcgggctcttaacgcgaaaacaaagctaataaacaaaaggcaataaaacaagctcaaaccagagaaacaatagcaccactgtgtagatctcaattttagaaaaatttaggaacttaacggggtcaatcggagttatggttgatttactatgaattttcaaaggataaatggtttttctagaatttcatttattggacggcaagagaatattccgttggaatattccgctagactaacagcaaagggagggggcccacctgtcagcggccaatggaggaaaggaggcgcgggcccggcttgtcagcggcttgagagaggaaagggaggtggggccggcttggcagtggttgaggaggtcttcttcctcctccacgcgctgctctatcccagtcccgggcagcgatgtgccgtggcggcgaggctcggctcggcagccggcgaccggggaggcggcggagaattccggcggatctccggcgaggcaccgccggcgacggcggcgctagaaggcgcggcacagcggctatagacggcaacacagagaggagaacgagcaaaagtgagagaggagagagagagatggtgatggtgtggggagaaggagctcgggctgcttccccttttataggcgagcgacgcggtggcgagctggcggtctaggcgcggcattccgggcgtagatggctagcagctagggcgggattccggggcggacgagatggcgatgcgacgacattgcgtcatgcaccggtggcgacgcgatgtgaagcgacgcactaagacagacgatggacggcgatggtgatggcgcgacgcgacgcgaagagacgtgcggagagcgagtttggcaacgggataaggatgacgcacggccgacggcggctatggccggaaattgggcggtagggttctcagatcgatgcgacgcgagcgacgtcacacggcggtggcgatggaacgcgagagagagggagagacgcggctcggcgacttcccggaaggagacagtcgacaagacgacgaggcgacagcgaagggacgcgcgtccacggatgtgaggcggcgacgcgatggccaaggtgacggcgcgaggcgacggaagcggcgtcatgcggcggtggcgacaagacgcgagagaaagagagagagagagagagagagacgcagctcggaggctaagctccttcctcacgaagcaacgagaacggataagggagatgatcggataagagaatgactcggcctagggttagggatgacgacgagtgaggtggcggccgttatccgtcggggtcgatgcaacgggcgacgggatagatggagtggacggcgacgggacggggtgacgcgaggcgacgtggctccgtgtctcccggagagaaaccggagcgaggtcgggcttggcgcgacgcgattttggcgtggcgcggcctcggcctggtgcggaggcggtgcggcgcgggtgttggcacgacgcgcggcgcacgggagggtgttttggtgcaacacacggctcagcacgactcggcgtccgggcgaaacatttcgtcgaacaccttgtgtgcacgtggctagctgcctcaaggaagaagaaggtgaataggagctaggctgggctggccgactggggaggagaagagttgggccgaggggaaaagaaagagaggatgaggcccgaactgaacagtactgcttcacaatttcgcaaggatttgtagagtttgaattttgaggagatttcaaaggatttgaatttgaatttgacctaggatctcacagaaattttaaaggcaattctaagagaggatttgagatctatttggcacaaaatcaactaagaaccaaattaactccaaaattttaaatgacaagatttttaaataaaagcaaataaaatacgggtgctacagttatcgcatgctaacggccacgtagcagagcggcaaagggattggttgtaaaatggtcagtttcccctctgctcggttgtcaaaatacgctcacaaacgtgtaccacatcattaaaaaggttctttgggaggaataaaaacgctctcctaattaaagagcggtagtaatgtagattttatagaactatgaaaaaatattttaataaataaaatgaaaattttaaaaatttcagccacagccactggtggagaaaccatctttggtcagtcgaccaaaatatataatattcctggttgcaataaaaaccgggactaaaaatatctttagtcccggttcaaaaggttagagttttttttatctttagtcctggttggtaataccaaccggaacaaaagatctatttttagtcccggttgg

SEQ ID NO: 1309 - DNA, 7402 bp, Oryza sativa
cataaatcaattctttattcaaaattccatgaatcatttcccttggtcccgcacgtccgtgactgtcaataatattcttgagaatattatttctataaatttcataaatcaatttccccttgttccacaaatatcttcctttgtccacaaattccaattaaacttccaaaattcatatctcccgatccgtaacaccgattgaccccgttccacttccaataattccgtaaaattgagatctatctaatggaactattatttagtctaaataggatctttcttttggtcttttgtttaggttttttattgtttgcgtatagttgcggttaccggattttcgtcgatcgcgggttttctcgaagattcgtgaagcttcgtgaagaccttgagcaaggcaagtcaccctttgaccaattgctcctataattgaaaaatcattactattttgtttgcaacttgcattattagaatcatacactcaacttgcttggcctcggtttgcgtgccaaaccgtcggacctacctagtagtcgcactaattcctgtaggtcgtactaccctgattccttgtcgctccacccttgtggtacctcggtattcgttctctctaagcgcgtataccaaatattccacatacaccattgtttgtcgataatatgggaaatgggtttgagaagcctttaaaacccgacctgtggtgtcggcgtgtttgaaaataaaatgaattgtgaaaactcgcgatgcaggtgctgtgcctgggtggcactgtcccgtattcgcatataagaaccgattcctttgggaaactcatcaagcataacaagtgcaaccacatggtggtatgggacaccctggctaagtaattagctgcttttggaaaatcttgtatgtcaatagaggcggaaagccgggatgtgggggtagaggcatcctgggagtccgaaacagaggaaggcatccgggagtcctaaaaggaaagccggagttggcccgatgttggtcaaggagaccctctatgtggcatgaggtgacccaaagttagctttggaaaggctttgtcgcaaacctctaacaccggccagtgtctggagtaagttcgtgtcttgtgggtaaagtgtacccctctgcagaggttaactaactgttcgaacagccgtgcccacggtcatgggcggatgtgaggtggttcccgatgcgtagatttgtttgcctgtgctttgtgaaaagttgttgtgaattgggaatcgtaaccagaatcagcctaagtggcagatggatgacctgagtggtcagaaacgaatctgtgtgattcgggatgtctgcgggcatcatagactaggcttcccgagtggaagcggattgctttgctgctgggcagctgaactttgggagtccgcaaaaatgaaaaaggctctgggagccgcttaatcaagtgaaatggctctgggagccgataagtaatgatctgacccgggggtcagtacattaccatttgagttgttgaaaagcatctcttaagtcgaatcgagacgcaagtctcctctcgacccaaacttaaaaagaaataaatcacttagtgattccaaaatgttttcaaacaaaggatttgcaaaacaaccttgcctctcttccaagcttgcattaaacacctaagttcccgtgacttgctgagtacgaaagtactcatccttgctctatataaatatatatatagttcctccgccctgaagctgaagatgaagtgaagtgaagattagggtttcgtcctggttcccagccatcgcctgtggtgttgggtgttagttcgttggttccgctgctgctgctgttgctggtgttttctcgtcagtgtcttcggttgtattctcaggctgtcctgagctgcaacctaagttaaggtaaataagtcctctatttattttaaggattttgcaatgaatcatatttgtcaccgtgggtaccagcactatgtcctgggactggtactgtgatcgcggtttcgtaggaagcggttcgcgccgtttttcctgcgacacgctcctatcaggtgccgttgtacggcggtgccggattggggtgtgacattgaggtagagtatgtctcatctaaagatcaagttgcagatggctttaccaaaaccttgacagtaaggcagatggagatgtttagaaacaatctgaacctggtaggttgagattgagggggagtgttaggatttacgtgaaatattgtttcatatggtttggatagggttgttagctctagatagagtttgctgttatccctctgtattaggagataagctcaacaaccctgccggctgtatatatgcatgtacttgtgatcagcccgtttttgaggcttctgaattaacacgaaaccacccaccgaggtgttctccacgcttgcacctctgttctttacacgtccgattttttattaagaagaaagggtgcctcaattacatttgtacaacaaacaaggttattgcgacctcgacacatacacgagttctctgacagctaacatgcagccagcaggccattcgccttctctctatatatacacggctggttctagaggtcactgaatttgatccatcaataccagagaagaagacactgtcactttgtacactgatagagcaacaatgcagtgtaatgctcgactgcagctggtgtgagaaatggctttgttttcaactggcctccttaggaatgcaaggcatctggagaatctgtgagaaaggtacttgatcaatttgtctctactaaatattgggtgtccttgtcgccaaacagcatttggaagtgcatttcatcatgttgaaaattttgaactttcatacatggtgcaaaaaactcattggagacttcgatttggcaccttttggggatgaagtaatttggtttttgtatggtgtattggtgtacaccatcatcttcaagggcattcgtaattttcaagcaacagcatgcaaaaagaaaaaaaattatgttccatgaatggtaatagtaagtagcacgtcaaaaaaaccggagcgatcgaagcaccaagattctagtttgtcttatgttcatgtctgataattttactaaacttttttgcctatgaactgttcgattgacgatgtaattacatcatttttcttttatgcaggaccaactaaatcccttacacaagggtaggatggttgatggagtttaggaatttggttaccgaccgttcatgtcagtactagatgttttcagtttcctaggtcatgctatgcaggaacgcggaaccaaacgtctatctgaggtacaaaatgccttgtggccctagcaggaggatatagcattatagcttgattgatgctgggagtcaatcgcatgatacagtccatactaccgatcaggttcagttcttgaatccaagctagactctggaacagacgttttagcttgttttttcataactagacgagttgatcaggattggggatttgctggattagactcggccattttgggattattggaagaaactacggttgagcaggatgatctcgtcgttgcaaaaacttgtagcgagatgagtaaacatttgtggttgattgcacagataaagctagcattaacgaatgtttttagtactagagttcgtctcaaatacgaagagaaggatgtacagttcttagaaaaagaaaatatttgcagttcttttggcagagtattcatatgcagctattcgggtgtttgagaaattaaaatagcatgaaaatgcccaattagccatgcccaaaaggaaaacgagcacaaaataaaaggagcaacggttactgtaatttcaacaatgctagctcttttctgaaacttttttcatcaattcgatcctataccaactctgcttaaactcttcttcgatctctgacaactaatgacaactaacatgcagccaacaggccagccatcttctctatatatacatggcctcattcatggctgcttctcaccttatcctctgaatctgattcatcaaataccttgtctaatgcctgataactgagaagtgagagaagaagacgctgtcgtgttgtacactgatagaacaacaagctgtgatgtgcttgagtgtagctgggtgagaaatgtttgagaattgcattgccctcctactaggagtggaaggcatccagataatttctaagaaaggtgcttgatcaatcgttctctactgagaactcgggtgccaccaaaccacacataaaactactgtcatcaaatattctagctttctcagacgatgagaagcacctatatatagtctatcatctaatttcttcgtgataatttactaactgggttccttttcttttttgaaaaagaatttcactaactgggtatgcctgtaaactacttgattggagatataacatcactatttttgtctctttttgcaggagctgcacatgggatgtacgtggctatattggtactagctaggttaacaagtgggacatgatttcatcgtccgggttctcctctcaaattatgtcctctgcatcgaagcattcaatgtcatcgtcgtcaaggctctcatcatcaaccaaactcaaaaattttccccaactaaacaaggccacagtatatatacatagggtccaaagacaactaggcaggtgctagatgtgaagttgaataactgatagtatatgcacaaccacgatcaacattgtgttgacacgcaatcaaaattatatgggggcaaaacataaaaggtagcgacccaaagtaggggtaaaatgcagaataattcgatgattagatgaggctgcacatgggatcgatgttacatggctatattggtactagatttcatcgtccgggtttccaaacagattatgtcttctgcatcaaagcattcaatgttatcgtcgtcgaggctctcacaatcatcatcatcatcatccaggtcctcctcacagtcgatttcttcctcatcatcgaagatttcatcatctgggttctcctcgcagatcttgtcctctacatcatagcattcaatgtcatcgtcgtcgaggctctcatcatcatcatccaattcttcctcgtcgtcaaagatttcatcatcggggttctcacagattccgtcctcctcatcaaagcattcaatgtcatcgttggtctcatcatccaagtcctcctcgccggagaaggtcgtgtcctcggcggcggcgatgttggagtcgacgtggtcattgtttctctctgccacgtcagatatctcggcgttctcgtgctcacctccggcgatcgccggagacacctcgggtaatgtcctccttgtcctcttcggctgcgtcgagcaccggagcgtgagaagaagctgcgacgagctcggaagctttcccgagaacgcctggcggtacgagacggtcttaaagaaccccggcggcgaaggcgaaggttgcagtggcacggcctccacggcgatcgtcgtgtgcggcagcgccgccggcgtgtcggcgccgacggccgcagcggcacggccgcggacctacacgaccgcgaagccgctctcgctgtcggagccgccgacgtcgctgccgtcgtggagctccacgctgtcgccgtcgctgtcgctgagaacgacccagtcctccatggccggcgctgcgctctcctcctcctcagcggcggctgctgcgtgcgtgagcctgagttctcggctgcggcgctcgtgcgtagatcgaagtatcgaagcgatcgtggtgaactctggttggtggggtggtgatcaggtttcgctgtgaggttcaaggcggcgaggagcgctgcgtatatagggggtggatacgggtgtaggattcgaactcgatcggcgctgtgtgcagatgtccgtttcagtttcagaagaaagaatccgagttgataagggaatttcgtcgttgagaacaccgcaacaacatgagccgtgagcgtgagtcggagttgggatcgttttcctgtgaggctgtgaccgtgactgacatctccttttccttgagtattactccagtttaaggacttgtaacttgtttgtgttttggggatattcgtttcgtgttgaccgtgactgcaagttgtgggaagcgcaggatttttatttaaaaatataagtttagttttccatcattaatttgccttttaagcttatgaccgaagctaagtttattagtacataattttgtagttaattttagataattttgtacataattgacagagtacgcattatgtactgcaggtgttggagaaattaaacgggcccctccagggcctgaaaattcccagcccaattgactaggcccaaagagcaaacgagtccaagcgcagcccaaaaggaaaaaagaagaaaggctcaagattttctgaaatgcaggtattatatatattttcttggactagcatcatattcgttcgttatcgttgcaacttattacattaaatatgttataagtatgaaatataaggtaaattaattgatgaattatttctaaatttataaaacctatatacataattatatgacaccaactgaccaccttcatacactcatatatatatatatatgccaaatgaccaacaactacaaataaaccctacagataagatatacagtcctatattatatagggctgaacaatctaccatctcatctcgaactctctaagatgggcaagacaaaattaagaattaagagagcactccatcaaacgccaaggatctgaaactaatacatacatatacacatgcataattgcgtaatcaattggcatgcatgatcagtcacttgaaatcaagatataagaccatgatatcaatcgtacacacaggtcagctcatgcatctaccataatctaacctctcctaatcagatcaagatagaaaaccatgacaacaattgtatatgcatgcatttatgtcagcagtcagcactaccatgcatcagaaaaaggtggcaaacagtacatgaaacaaactagctaggctgtcaataatttttttcagagaagttgctcaccaagtgactgcatgcagatgtgtaatcaaccagagaactattagtacacactatatacacaggtttgctcacttactgcaaatcatgacagcgtcacacacaagcgaaaaataaaatgcatgcaatatgtattaagcataactactcatcaaactaataagaaaccataaccaagcgcataactaattaaaagagactaattgtaataagaactaataagactactaaaactgcagtataaactaccgtatgatccatgtttatcaggtttaattaagcgtgtaatcttaagtgagcacacacaatgagtcaatgagagagagatagagacagagagagacggtcatgcttggctcct

SEQ ID NO: 1310 - DNA, 14154 bp, Oryza sativa
cgcccctgggggagagcgacgcacatgaatgctgttgaaaccttatttatgtttgtgagttggagacacaatggacgaattgtgacgttcgggacttcggggtacgctgtgcgtgtaggggttgtcaatattcagttttaaaacttaagattctatatggacattcatccaaagtttagaggatgcatgcaattctttttattatagttatgaatattacatatcattgactgtctgagcaagcaatatatttgtgtgattaaggagagaaggattagactggccgacatatgtcaagaaaggggataatggggagtggattctaatccctcgaggggacatcccctcgtatacctttttctttcaaatttgatacaaatagttgtgaaaaattctaaaaaaaattgacaatgtagagtataatgatacctactagtccaccaaaattcatgttccaattcgatctacacatcgagaaaaaaaaagacaaatttagatataaacagtacgctactattcatacgctgaatttgtcttttttatatctcgaagtgtgagttgagtttggacttaagattttgtgaagttgtatatatgtgttgtatgaatgttgtcaaatttttccagaatttttcataaccgtttaaatgatttttgagcaaacgagggaacatcccctcgagggattagaatagtttcccgggataatgcgcaacgctacttgatgggggacaaaactacagtaaaaatcgaatcgttcttgactattttggtcttttggagatgttcgatcgagcaacccaatgatgcaaatcccatgtaaaaaaaacaaatatagatttgtttttttcaaaaagaagttaaaatctttgtctcgtatgtattgataaagcaggagaaaaacaaacaaagtaaggtgttatttacaggccttgccggaaaaaaacatcacattatactccctccggttttattttaattgacgctttggacaatgacatgctctacgagacatacctttgaccttatttttctattataatatatacaataaataaatgcatgtttacttttattatagtgttttgaaagacaaatctatatatgtttttctagtttctttgaactaaatatttttaaagttattgattgttaaagttataaaagtttaacctcaatcttgtctaaaactttaattaatatagaaccagagggagtaatggatacgaagattaagaacatcacgttaaaaagttccattatttcgaagcagatatgttccaacttttcaaccgaaatgatggttccacagatgaccttctaaagtcggtcaccagtcagccagtaacatggaaggagaatgctgctgctaagtctgtaaacagtaaactgtttgagagatgatgacacgccggtgcaggtaactgaactgcgcagggacatttagttgataacgtgaagggaaaaaaaacagatatttgtcgttgtttgttcctgcggagtgtgcaatcaagtagccctccgttttaggttataagatattttgactttagtcaaagttagactattttaagtttgactaagtttatagataaatataataatatttataatactaatttcattaaatcaataattgaataaattttcataataaatttctacaaacttggtcaaacttaagttgaatatattttcataataaattaaatataattgattatagaaaaaatattattacttttttctacaaactcgataacttaaagcagtttgactttgattaaagtcaaaacgtcgcataacctaaaacggagggaatatttgttttctattttgcaaatgaatggcgggctctttcttgtatgcacaccctatctcttgtttaaggtgtcaaacaaaaacatttctctttaattaagatctctcacacccttaacattttaatggctacacatttttttccgcatgagttgtgcttttcacgcccacttctctctatccaatagcaattatcacgtacatttctcacaagaatgctcctgcagatgccttccatccctaagaacccatgcatagctctctatcattttcttaaccatattgttctattcatgcaaaagcttagtgcgagtgcgtacaacgaagagacaaattaagttgcaagtggtgagcagaaataatatgtatatagagtccaaagacaactaggcaggtgctagataagtaatggagagcctgtgaattagttgaataactgatagatgcacaaccacgatcaacattgtgtcgagacgcaatcgaaattatgggggcaaaacataaaaggtctgacagctaacgaccgaaagtaggggtaaaaatgcagaataattcgataattagatgcggctgtacatgggatcgatgtacgtggctaaattggtactagctaggttaataataagtgggacatgatttcatcgtccgggttctccttgcagattatgtcctctgcatcaaagcattcaacgtcatcagcgtcgaggctctcatcatcatcatcatccaattcttcctcgcagtcgatttcctcatcgtcgtcgaagatttcgtcatcggggttctcctcacagattccgtcctcctcatcaaagcattgatcaatgtcatcgtcggtctcatcatccaagtcctcctcgccggagaaggtcgtgtccttggcggcggcgatcttggagtcgacgtggtcatagttgctctctgtcgcgtcagatatctctgcgttctcgtgcacgaccgcgaagctgctctcgctgccgtcgtggagctccacgctgtcgccgccgtcgctgccgctgaggacgacccagtcctccatggccggcgtggcgctctcctcctcctcctcggcggctgctgctgctgcgtgcgtagatcgaagtatcgaagcgatcgtggtgaagtctggttggtggggtggtgatcagatttcgctatgaggttcaaagcggcgaggcgcgctgcatatataggggtggatacgttacgggggggtaggattcgaactcggcgatgtccgtttcagtttcagaagcaagaatccgagttgagacggaaattcgtcgttgggaacaccgctacgacatgagacgtgagtcggagttgggaccgcgtttgaggctgtgaccgtgaccgagaccgacatctactttccttgagtattaaggacttgtaacctgtttgtgtttgtgttttggggttcgttgccggctctctttgctgctgatgataaggagaacatgtataggcctcacgagtcctctcttgttacgttacttggttcatgcgtttagttattgtaagttgccatcttatgtaccaaatcccctacaaatcgcgcatttaaaattttgtaacttgaacacggagtagtgcataactctgatggggatgtggaccacgtttggttgggcccagtttcagtgagttgggtttttacaatggggcagtattgcctcgttgatatcaccatatgtaaactatttttctttctttttaaacgttatattaatagtagtattacattgcctgatttttttttgctttttagaaactttcattgccaaaataagactagtaaatataatggaatatcaacccctgttttcttcgattgaatctcgaccaaatttattccgactaaacccaattcaaggattttgtttgtacttactacatatatacaacttgagaaatttcaagaaaaaacagccaaattaggagtgacatatacctgttgagttgtgatccaaattcatttgcacttaataaagactagcttctaccgtagtggagcataggcccgtcgccggtagatttgggccggagcgtacggatcgtcatcccttttagggtttctaccatatatatacctcttgtaagccgccgtgcggcgttgtaacctcaccccagatatagtgaagatattttgctgactggtgcccgtggtttttctttcctgtcttgggagggtttttcacgttaaatctcgtgtcttgattgatctattattctttatcgtttatttgtctatcgtttcataacaatactatcacgatcgatcatatgattcatatcatatatactctctctgtccctaaatatttgatgtcattgacttttataaacatgtttaaccgttcgtcttgttcaaaaaatttaagtaattattatcttttgattcatttttaaatttaagtaatttaagtttttgaataatattcacaatagttataagacgaacagttaaacatatttaaagaaatcaacgacgtcaaatatttaaggacggaggaattaccatatatataataaaagaacatgatatttgcagtactaaaccacaaactttatcagcatcactccctaataaatccttaattctaattcaatgcgcagattcgcagaagaaggtacacgacaccaaagagcaggtagaagactgcaagcgaaaccaccccgtcttggagtgcgagcgtatcagggaggaaggccgccgccgccgtgttgctcgcgctaacgtcaacgccaacggcgaagctgggcgcggccgccatggcgcgcaggcccgtggctccctgcgacagcgcctccacgtcctgcgccgccagcccgccggcggcggcctgcatgtacgaatcgatcgcgtcggccgccctcaccatcgccgctgcagcctggttccgagccgccgcttgttgcatcgcctgctggaactgcgacgacgtggacgccggctcggccgccgccgccgcgctattcccgcctgccatgtcggcgctgtcgccgtgcgcctcgccatcgccggcgtcgggagcagtgtcgtggtcgctctcaccggcgtcagagggctcctcctcgtcggcgccgcttgcgtctccaccgatctcctctccgagctgcgtgccatcgaactcgtctccggtgatcagctgatagaactcctcgccgtcgatgagctccatgcagcggccacagacgcacacgtgctcgcactcctcgtcgcaggagctttcagtttcatagtcgtagagcgtgtcgccatagaagaaatccaggaactcatcgttcaagccatggaagaaatccaggacctcatcgtccaagacgctttcctcctcaccaaagctttcattgtcaatgccaccatcggcgagaacctgcaggtactcctcgaagtcgtcgccgttaaggctttcgtagtcgatgccatcgtagccgccaccggcgaactcctcgggctcctcctcatcatcactctgctcgtcggagacgctctcctcctcatacaagctctcactgtcaatgtcgtcgtacttgccgccgtcgatctccatgtcagagtcggtgtcgatgtcgttgtagctgacagggacaccggtgaactccggccactcctcttcagcatcactctgctccatgcagctctcctcctcaccgaagctttcgttgtcaatggcgtcgtacttattaccaccatgctcctcctcctcctcctcatcgatctcctcgtcacaatcgctctcctcctcgtcgtcaatctcctcatcagaatagctgtcctcctcgtcgtcgctctcctcctcgtcagagcttccggtgtccacggattcatcgtccgggttctccgtgccgattttgtcctcttcatcaaagcattcagagccatcgtcgtcgaggctttcatcatcatcatctaggtcgtcctcgtcatgggaagattcagtgctttcagtatcttcgtcagaatcgctttccaagtcagtggtatcctcctcctcgtaatcgctctcctcgtcggtgctttctatatactcatcggaatcagtctccaagtcagagcttccgatgtcctcctcctcgggatcgctctcctcctcttcgtcgtcgaagatttcatcatcggggttctcctcgcagattccgtcctcctcatcaaaacattcaatgtcaccgtcggtctcatcatccaagtcctcctcgccggagaaggtcgtgacctcggtggcggcgtcgatgttggagtcgacgtggtcattgttgctctctaccacgtcagatatctcggcgttctcgtgctcacctccgacgatcaccggagacacctcggcaatgtcctcctctgccgcgtcgagcaccggagcgtgagaagaagctgcgacgtgctcggaagctattcccgagaacgcctggccgtatgagacggtcttaaagaaccccggcggcgaaggcgaaggttgcgacggcacggcctccacggcgatcgccggcgtgtcagcggcacgaccgcggacctgcacgaccgcgaagctgctctcggtgtcggagccaccaacgtcgctgccgtcgtggagctccacgctgtcgccgccgtcgctgccgctgaggacgacccagtcctccatggacggcgtggcgctctcctcctcctcctcggcggcggctgctgcgtgcgtgaggttctcggcggcggcgctcgtgcgtagatcaaagtatcgaaccgatcgtggtgaactctggttggtggggtggtgatcagaattcgctgtgaggttcgaggcggcgagacgcgctgcgtatataggggtggaattatacgggggtaggattcgaactcggcgctgtcagctgtgtcgatgtccgtttcagtttcagaagaaatccagaatcggaaagccggagttgcctccgatttctatcggctatggacaagcgaacacacacgcacgaagcactcgggctcggtacatgctagctgatggggttgtgaattgtgatcagtggcgtgcaagaaagtaaactcattggcttaaccacactggaaatttggcaaagactcacgtttgcagttgcaggggccttcgatgcatgtgcttctgcggtagtttatcagttattggtcttcttgctcgatcggatggtgaaattgaaatatggaattaatgcgaatgtactgcatataaacttgcacgagttgggatacaaatcagggggttgtgtcaatacaattaaagataaagaaaatctcagctttgctacatttgctgtttctgaaattttttccatcatttgctatcaagtctgcttacactcttcttccatctctgacagctaacaatgttttaattatggattttcattagtccaacctctgtatacataaaagatatacacagccaaaacatacacgtgttctctctttatttttcgccgggatggcggaagaaacgccgtcctgttaggatttacgtgaaatattgtttcatatggtttggatagggttgttagctctaaatagagtttgctgttatccctccgtattaggagatgagctcaacaaccctgccggctgtatatatgcatgtacttgtgatcagcccgtttttgaggcttctgaattaacacgaaaccacccactgaggtgttctccacgcttgcatctctgttctttacatggtatcagagcaaaaactcgatctatattagatctcatggcgagttcctcctcctccaccgcttttgcaaatcctttgttcggcgtccaagtttctgagaaactcaccaagcaaaatcactccctctggtcggcacaagttctcacagccctaaggggcgcgcgactggagggccatgtcctcggaacatccgttccaccagaagccgagcttgagcagaaggaaggagaaaaaggagagaagaccgtcagagtcccaaacccggcgtatggcgaatggtttgccacggaccaacaggtccttggttttctgttctcctctctgaccagggagattcggtcgcaagtcgcaggcgcaccgacggcagccgcggcatggaagacgatcgagaacacgttctcgacacgatctcacgcaggcgcgatcaacgttagattggctctcaccaccactcagaagggccaatcgactgtcaccgagtacgtcagcaagatgcgtgctctcggtgacgaaattgctgcaacaggaaagccaatagatgatgaagaacttgttgcttacattattaatggtcttgattcagagtttgatccagtggtggaagcactcatcgccaagaatgcatctgtcactgttgcagaggtctactcacagcttcttggctttgaaaacagggtgaagatccgaacagcgtgcgctgctacgagtggaaaccgtggcagcggaaatcagggacgtggtggcggcaaccctcgcggccgcggcactggacgcggcggcggcggcagcggtggccgaggtggcgggcacggccgtggcaatggacgcggcggcactgacaacagacctacctgccaagtctgtcacaagaaagggcatgtggtggcggactgctggcaccgctacgacgagaactacgtccccgatgagaagctaggaggcgctgcgacgcacgcttacggtgttgacaccaattggtatgttgacaccgaggcaaccgaccacatcaccgggcagctggacaagctgaccacacgggagaagtacaagggcaccgaccaaatccacacagctagtggtgaaggtatggatatacagcatattggtcattcctatgtacctacatctagccgtcccctccatcttaaaaatattttgcatgttcctaaggcatcaaaaaatcttatttcagttcatagacttgttgctgataattatgcattccttgagattcatcaaaagtattttttgattaaggacaaggtcacgaggaggacaattcttgaaggaccatgtcggcgcgatctctaccctttgcctgccggagatccaataaaacaagtctttgctgtgatgccatcgttcgagcgatggcatggtcgtctagggcatgcctcaaagcccattgttcttagggttattaatcaaaataaattgccttgtagcaatgagtctcctagtgagtctgtttgtgatgcttgtcaacagggaaagtctcatcagttgccatttcctaagttttttagtgtttctagtaatcctttggaacttattcattcagatgtatggggtcctgcctctgactccgttggagccaagcgctattatgtgagttttattgatgattatagtaaatttgtgtggatctactttcttaaatttaagtctgaagtttttgagaaatttaaagagttccaaagcatggttgagagacaatttaatcgtaagattctaggcatgcaaacagattggggaggagagtatcaaaaattgaattccttctttaagcaaattggcatagcacatcaagtgtcgtgccctcatacccatcaacaaaatggtgccgttgaacggaaacaccgtcatattgttgagattgggctatctctccttgctcatgcatctatgcctttgaaattttgggacgaagcttttcttgcagccacttatctcattaatcgcttgcctagaaaagtaattgactttgacacacctcttgcacgcctttttcaccaacaacctgattataaatctcttcgaacttttggttgtgcttgttggcctaatcttcgtccctacaatactcacaaattacaattccggtccaaacaatgtgtctttctcggttttagcaatttacataaggggtttaagtgcttagaagtggcaaccggtcaagtctatatttcccgtgatgtcacctttgatgaacaggagtttcctttctccaagcttcagccaaatgctggagcgcgtctacgtgctgaaatttcccttcttcctgctgatcttacatcgcatgcatctgatcaagggggagtagcacatagcaatgatcatatgcataatatcctacctgttgttactgattcctcttttgagaatgatgctgcagatgacacagatgctagcgacagcaatgcagaaattaatgcagagcaacctgatggaattcatcctggtgcatctaccggggtacacacagcagaaacagaagtggcggcagaatcgccgtctcgtactgatcagcggcgcgccgtgcaggcccctgagcaacctgcgaccgtcaccgaaccagcagccgccacgtcgtcggctgtacagagctcccgcgcgagttcccgctccatcgcaagccaccaccagctcggaggtgacacatcgccagggcctcatcatgatgcggcaggatcgtctgcggctccggaggttatcgctgcaacagagcaaggtgatattaatgctagaccaaaaactagactccaaagtgggattagaaaaaagaaaatttatactgatggcacagtcaaatatggttgttttacatcatctggggaaccacagaacctagctgaggctctaggagataggaactggaaagaggccatggacaaagaatattatgcattaatgaaaaatgaaacatggcatttagttcctcctaaaaagggaattaatattatagactgtaagtgggtctataaaattaaaagaaaggctgatgggagtttagatagatacaagggtagattggttgcaaagggtttcaagcagaggtatggcatagattatgaagatacctttagcccagttgttaaagctgcaaccataagaactgttctatccttagtagcttctaaaggttagagtcttcgtcagttagatgttcaaaatgccttcttgcatggagttctagaagaagaggtgtatattagacagccaccaggatatgtaaaatctaaggcacttaactatgtgtgcaaactagataaggcattgtatggattgaaacaggcacctagggcctggtactcgaggctaagtacaaagttgaatgagctggggtttgtgtcatcaaaatcagatacatctctgtttttctatgataagaatggagttactatgtttatgcttgtatatgttgatgacatcattgtgtctagctcttccgaaaaggccacctcagctcttctgcaggatttgaatcaggagtttgcactgaaggatttgggagatcttcacttcttcctaggaattgaggttaaaaaggtaaatgatgggctagtgctaacacaggaaaagtatgcctcagatgtcctgagaagggtaggtatgagtgactgtaaaccagttaatacacctctgtccatctctgaaaagttgtcaagtcaagggggagctctccttggtcccaatgatagcactcagtaccgcagcatagttggagcattgcagtatttgacattgacaagaccggatatatcattttcagtaaacaaggtatgtcagtatttacatgctccaactacagatcattgggcagcggtaaaaaggatattgaggtatataaaacatactgtgaaacttggtctacagattaacaagtctagttctttgcttgttagtgcatttactgatgcagattgggcaggctgtcttgatgacagaagatccactagaggatttgatgtttttgtaggacccaaccttgtatcttggagtgcacgaaaacaagctacagtttctagatcaagtactgaagctgaatacaaggcattggcaaatgcaacagcagaaattatgtggatacaaacattacttcaggaacttggtgtaaaagggcctagagccgctaaggtatggtgtgataatatttgagctaaatacttaacagcaaatccagtttttcatgccagaacaaagcatatagaggtggattatcattttgttagagaacgagttgctcacaagttacttgaggtgtaacgctccgctttttgcgtgacattaaaaactaattcggcaaaatcctaattgcgaaaatttcgttctttgtgtgcgagtctaagttgtgccatggatctcaattcaatctccatcgttgttccctttcgtcgccatcaaaatccaccacctcaagattccaattccgattcaagtctctgaaatcaacatcctgaaatcaatcgtcgattctttcgtccctatctctctctccctctctctaatcaatctgcctacctactatctatccatcgatctgtctatcgatcttcctattcgtttatctacccatcagccgatctatctgtctatgtatcgatctacctatctatctaactaaccagctgtctatctatctatcaatctatccgtccctctacccatctacctttggaacctatcccataccattgtcccaactccaaagataggtctcacttgaatccctctcatctaatccctcggaccgccgagtataactttgctccaaagaaacaccgaattctcgcttgggtgcttccccttgactcctccctgctttgtcagaccaagcctcaagttcgaaatccaaattcaatttccaaatctcatatccctccgaatcgatttcctcggaaaaagtctaatttacctccctcggttgttgtgggccgttttttttttccctcggcccatctctctccctcagccgctccttcctccctcgcgtgcctcgcgcgtgcgccgctctgagcgagggcgctcgctctctctccctcgtcgaactccctctcaccggcgccgatttcccgccgccgccgttcgaaatccggccgcaccctcgcgtcgcgcgcgcgctcgcccgcgcgtggccgactgcccggtcgccgccgcgtcagccctggcagcctgcgccacgcagccgcccatgccgccctgccgcttgcccccacctctgtgcgcttgcgtccaaaacgtggagccagagctcgcgctcccatccttctctccctccccaaaatggcatggtcgaacccctcctttccaccctgcccttttcctttttccctcccgagctggacctcctctgccgcccgtgagcgccagccgcgttcttgaccgcgccagctcgccatccttgcaccctcaaccgccctatgtcggttcctcccccaaaccgccttccccaccctataaaacccaagctgagatccctccccatcccaatcaatcgcgttttgctcctcgcctcgaccacgccattgccgccgtcccactgttcttgccgtcgccgtccgtcgccaaacaccgagggaaccggtgcgtgcgtgggcgtgtgacgcaggactccgggcaccctccttcctccccttccccggcctgaggccgaagagctcgccccgcgccgtcggccatctcccagcgcacgtcccgacacggtagccttccgttccccttcctcgctccatctcctccccttagcttcgggcagtagtgcgagtagccttccagtagctagctggcgccgccccgactgccgccgctgctcgccgtaggcttgccgccgtcgccgcccgctctcggaggccaccgctcgtcgccggacctccatggcgtcgctctgccccatccgatgccagaaatgggcttcccgaccaccatagatactcccaccgctttgaatcggactcccgttgcctgtcgacaaatcccctcttttaccaccgccggcggccgccgccgcaattcgtcaacgtcgaactccctccggcgaatctgagccgttggctcgctccttctcgatgccctcgtcactccggtgtgctccccgaagaccaaatccgtcgcgcttgctccagtgaacacgcccgccgtccgccgtccatctcggcctccccttcttccttctcccgccggcctgcatggctgccacgtaggcgccacgtcggcgccacctcggctttgaccgggccaagccggtcagccgcccccctccctccgtcttccctcccgtgcgcgcggtccacggcaagccgtgcggctgcacgtgggcccgccgccatccgtccacccggtgcaccgctcctaagccacgtgcacccgaaaccctagcgccgcacctcgcatgcgcccatcccaccgtgggccgtgtcaccgacaagcgggccccacctggaacccgcgaggtgcactcggtccaccgaaccgctcccccccttccgcgcgccctaatgggccgcctttcccgtgcctgcgccggcccaaatggctcggccgagcctccttcaaccctcgggccgcgcccttgccgcccaaaaaagtctaatatacatccctcgtccatttccttttccataaatcaattctttattccaaaattccatgaatcatttcc

SEQ ID NO: 1311 - DNA, 13110 bp, Oryza sativa
ggcaacgggctttttttttcttctttttaaaatttgtgattcggatctgtgtatttaatttgtgtgtgatgtgaatgtgatgtatctgtgatgaactttgtaaaatttgtgatgtatctgtgatgtatcgaattggggagttgaggatttgaggatttggggataatttatttgggattttgggatgtggatggggtgaaatcaatataatgaagaaaagaaaataataatcgagcaaccggggctagactagctctatctttagtcccggttttttactcccggtttttttatccgggactaaagatagtgatctacagggggttacgaaccgggagtaaaacccctttctccaccagtagcgtactctagatagtttacaaagtactgcctctggtacttgttttgatttatagcatttttttatgggacattagtccttgaccaatcatatttagccagatctgaattatttttcattttatctgtactttatatccctaatttggatcacatctcgacactccactagtaagatagtgtggttgttgtatctgccattttcatactcaaaagaaaaaaaaacaacctagtcaatgatgggacataatctaatacagtgaatttggacgtggttatatccatattcgttaaatgccacgttgtctaggttaaatgctccactaagttatgtctcattgttgtctagattggttttttgggacagaatgagtatatcataaaagaagtaattatagtggggattgtctgtggtactactgtacctgcggtagttgccgctgacacgtaggaccacccgtcacccgtcaaccactgctactatgggtgggcattcggtctaaccgaaaaatttggttcggttcctcggtctttttgaaaattcggtctttgtaatctcaagaccgaactaaccataaaaacagcaaaaacatagcaaatcaacaaaactatctgtaaaaacagcaaaaacaaagcaaatcaacaattagtggagacggcgcccggcggtggaggcggcggcggcgcgccggctggaggcggcgcccggcgatggaagtggaggcgcgccggcgctggaggcggaagcggcgcctggcgatggagcgaaggaggatgcggatgggatggagacgggacggcgccgcaccaagatggatggggatgaaacgatgcttgtgacgcacctgcccctagggtttcttattagtgggcttattgggccaactagatctattgagcctaattcggttatttcggttaattcggttaattgaggcccatgaccgaataaaccgaatatatttcggtctttcaatagttgagaccgaattatagaccaaatttttcggtctcggtcttttcggttcggttctttggttcggttttattctgcccacccctaactgctactatagatgcagtactacagaatatccgtgtccaagtaatcaaatgaatttaatttgttgccatcaccaaccaattaaccactttcctctcaaaagaaaagaaagaaagaaagaaagaaaagaaataatggttagtcctctcttgacccagtactcatcaaccagctgcctagcatgcttcggcctctatatatacacggtctctgctcactattttcatcctttgcttcttcattctacacactctgcactaacagagaaatgaaacttagcacatgaatagaacaacgtagtgaaaaaaatgattgagagctttgggctcttagaaatggaagtcatcaggagaattcctgtcagaaaggtttgtgatcatttttctttttcttcggaagatcctcttttagtccttaacagcagatacgatgcggcaaaaatgtgtagccattaaaatgtaaaactgtcaggtctgaaaaaaacttgagtttggcaccaattagttagaaggatgtgaaactgaaaacggccatcgttccttaactttgtagagaaaaatgccgttcgatccagagtacttccgtagagtgcaacaaaatatgaatgcaaatcaaattagttcatttagtaatatcctgggtacgaactgtaacctgtacgcatgcatttcaactacttgaagatctaatatcgtttttcttttctccacaggaacaatcacatgtctcatggttagcgccacatcatcgtcactagtacagctcgccgtaaaagccagacagagttcgtccacgtcgacagtagcagtggcggagctacagagaattggaggggtgcagtattcaatcaggtgtccatacccatcgagccatatagatttttcaagtaatatattgtactaaataattatgcctcccattaaatatttaaaaaggaaatcaatatgtgatgccaattatatcaaaattaagaggagtgcaatgataaaaatactgtactgaccaatgtgagtaaatgcattatactagcaaaaccgaaatgcattgccccaacctccatgttagctcttaactaaaaaagcttatgaactattcacgtcaaatagatacatcatacattatcttctactatttatgactctacatttaatttttttaatgcttgttaaacagtaaggcaaacctggatatttatatatattcctttcacactgttggcttgttctatcggccacttcttttataaaaaaaaatcccaaaaaatcacctatacagcattgacaaatagtccgcaattttcgggagtatgatctaatccatcaggagccttgttatgaacacattagtgcattgaagccttcctagtagcacctgttcggcctggtgatctgcaatgcacgcactggactttacgtcttcgtggcttaattctcggtctgggggtacacatacgtgagccaagggggtgcccacatagtcattagggggtattaatcactaattttactttcctagtcgggttcctaggaacacctggggactacatagctttgcccctggacagcagggtgacgtggttgcacgcgatcatcgagcaacacaacgggcaattctaccatgatcaaacaaggccttacagaaaaaaaaagttatttcgataataacgcttgaattttcatcaaatttaaatttttttagcaaaatttgctacagtgcatcgaaaaaacgtgtaattagctcatggacaccgcaaaaatgagaatttgctatcgggcataaaaaaaacgtgtaattagctcctagacactcggacgttattttattatttcctgtgaatttgctatcgggtataaaaaaacgtgtaatttgcgatcgcgtcctcgacggctgctgtctcttccaccggccaaccacaccaccctgatgtggaccaggatgcgttctgtccggcctactccacaagttgtgctattgactgatgcacctgtgcaagtccatgagatatttcgttcttcctgcggagaaaacaatattaattagatgatcagtagtttgcctggatgaaaattttgaaatttgtattcacagaacattggtaaaaaagaacaaatctgattaaatatttatattttgctgcaaaactcttaatcaattgataatttttcctagtcagaaaatgcatgatggtctgcttcggatccacatcctttcaactgattaattagtgtcaaactaacgaatttctcttaagtgcttagatctcatggtctaacattttaatcaggggcggaggagtcggtatggcgctcgccataccttgatctcccgccggacccccccccctcctgcagcgaatcccaggtcccagggcggtgactcacatggcgatggcggcatcgctccgagccggcggcgaggcatccaactgccgattgccgaagccaatcctgcccacagcccacgtgcgaacaggccaaccaattaggcttttttttggtgtaaatgggccttttcacctgttgaacatgaaaccctaactccaaaattccccatcccccattccccaatccaatccgggcatccgactgaggaggcaagcgccgacggccgacgacgacactgtgactctgcgacagggagctgcgatggccggtgggggctcggcagctggcggggtaggcgggtgcgcggccacgctgggaggcaggcagcagctagccggccagggccaggcagcggcgcggcggcgtgggcgtgctgcggtgcggccgcgggaggcaggcggccagcgcagcagggcagccggcaacaagcagtgagccacagagccagtgaggcaggcagaggagagaccgagagaggatacatattcttcaaaagttcaaatggatagaaagagaaaaggaaaagcattgtcttcacaaagaggtacatattcttcaaatgctgacaattttagaacatttttgcatttgtttcatttgttttgcatatttgaagagttattggacctggggctcttgtagtgcatgcccaagtactcatggaagccaaaatgttgcagtagagatggaggaggaggaggggcagatggaggagcatgttgtccaagagcttggggaagaacgtgttgaagagaattttgaaggtataactaagttcaacccagattacattggctgtgtttagatccaaagtttggatccaaacttcagtccttttccattacatcaacctgtcatacacacacaacttttcagtcacatgatctccaatttcaaccaaaattcaaactttggatccaactaaacacagccattatgtctgatctggggcttcgcgctagtccatgggtcacaccgccatatctagatttttttccatcctccgccactgattttaatagaggtacattcttcccacatggtatatatgtaccatgcgcactcgtgaaagagtcgatgcgatagcagttttttagagtaattatcacgtacatttctcataggaatgctcctgatgccttccagtcccaaaaattaacacaaagctctctatcatttccttcgctatattgttctattcatgcagcttcattttctatgttagtgtgagtgtgtgcaaatgaaggggcaaggatgcagcaattgagcagaaagaatgtactactccgtatatatagaggctgaaactagcattagtgttagagtttgtgtcgaacatgtgtacaaaatcggttacagtttaggacttagagttgtactaggtataggaatagagtatgagtcggactatatcctaggatctctcataaatagaggggcgtgcctcttgtaaccgcatggcgacttagcacagcgagagggagcggctgccggcagtgaccagccgtgagtcgttgtaactctgatacgctgtaatatgctagatcggggaggaacgcccgcaatcagtgacccagagatgtaggcctcggcagaacttcgttatcaaatatcgtgcctcagtgtcgtcatcgtatttggatcttctatggcgtttcttccgcgtttggtttccgatgtgatttgggggccggttttataacagagacttcaagttggcaccttttggggagaaagtaatttggtttttgtatggtgtattggtgtacaccatcgtcttcaagggcattcgtaattttcaatcacattgaaagcaagcgaaaagaaaaaagaatcttattttccatgagtgcgtaatagtaagtaaatcgtcaaaaaaaaaactggagcgacctaagcaccaagattctagtttatcttatgtttccattcaaaaaaaaagtttattttatgttcatgtctgatgattttaccgaagttttttgcgtatgaactgcttgattgaagatgtaattacatcatttttcttttatgcaggaccaactaaatccctgtagcacccgttccgtcgtggcgcctagcgggaaaattatctcttaaaaaccctaattgcgaaatttgtttctttgcttgttgtctagtgtccgtgccatctcaagatctcaatccccgatctatcgtcgagttcaattccgaatccaattccttccaaatcgaatccctccgcaaaagtctagtttgcctcccccgggttcgatgggccgaattccgctcggcccatctcttccccggccccctctctcccgggcgctccctctctctctctctctcgctttccccggcgcgtttccccccctgctcgctgctcgcgcgtgcgagagccgcgccgagcgccccctcctctcgcgtgagctccccgctcgcaaagccggccccgcgcgccgtcgctcgcgcgcgcgcccgcgtggcttcccgcccgagacgcgtcgtctgcgccgtccgcgtcgcccggtcccgctgcccagccgcgccgcccgttgtttcccgcgcgcgcgtgccgagtggccgaccgcccggtcgccgccgccgtcaccctctgccgcgccagcccgcgcctgtcgcccgtgtcgtcgcgccgctccaaaccgccccgccgtcatcgccgtcgtcatcgcccggcccccgccactccgcgcgctagcctccaaggggcggaggcagagagcccctctccctctgccgagtcgccccgctccctccttttcccgaatcggcaaaggggcgagccccctttctctccctccttctcctctttttctcccctttttcccctctcgccggcgtcacctcctgtcgccgctttggacgctagccggagcgccagctcgccggcttgaccgcccatgtcggttcccctctctcaaaccgacattgccgcccttttaaacccgtcttccccctcccttcctttcctctcccattcgcctcctcaccgttgccgccgctcccgtgctctgcctcgcctccgccgtccatcgccaagcgccgggagagccggttcgttcgtggacgcggaaggggactccgggcgcgccctcttcttcctcttcctcagcccgaggccggagagattactcccgcgccgccggcctctcgtcacagcgcccctcctcttctcggtaatgtctctctccgttcttcctcctcgctccatctcctccccctagctttcggtagtagcttgagtagactccccgtagttagccggcgccgccccgaccgttgccgtcgctcgccgtgtgctcgccgccgtcgccgcccgagctccgtagcacccgctcgtcgccggcctcgctcggcgtagttccgtccaatccgacgctagcgtcgagttcccgacgccgcgtagatgctctcaccgctgggaatcgacctctcgtgacctcgtcgccgtttccctcttctcccgccgccggttgccgccgccgcaatccgccgccgtcgagcaacctccggcgaatccgagccgttggctcgtctccccttgtcacgtgcaaccgcccggtgtgcacgcttttgcccgtatcgccgtggttcgctccgccgctcgccgccgccgcccgccgtccattcgaggccgggtcgtcgtctacctcccgccggcccgcgtggcagccacgtaggcgccacgtcggcgccagctcagccagaccgggtcgggccgaccccggtcggtccctccgcgtgcgcgcgatccaccgcgagccgtgaggctgcgcgtgggcccgccgcacctgcgtccaccgcggaccgcgcgcatgcaccgcgtcccgtccccgcccgcgcgcgtgcgtcgcatgctccctccgcacggtgagccgagccgctgacaagcgggtcccacccgggaccgcgcgtggtgagcccggtccaccggctctctatctcctccctcccgcgcgcgcgcgagtttgggccgccttgggccagccggcccatttagctcggccggaccgctccatttctcttgggccgcgccctagccgtccgagaaaagtctatattccctccctcccttcttttcttttttctttttcaaaaaggatttaaataaatcctttttcctttagaccaaaaatccaataatcttagaaattcaatatcttcccaaccgtaaatccgattgactccgttcaacttccaaaattcctcaaatctcgagatctatctaatgacacgcttagaggtcattaatagggctttattttcgccgtttgttgagttgtcctgtttcgcgtgtagtttcggagcccgaagatccgcagtgcgaggatttcgaggatcaagctccggatctcgagcaaggcaagccacctttgaacatcttgagcctatatttgaaatttaattatattgcttgcgaaatattattcattgataggatcacacttaatctgttgtcccgtctgcaaggcagattggcagacctacctaatttgttacatttgatccttcctttgttaattgttataccatgtccccttgtaaccacccagttgcacctcgatattcgtgcactctgtgcgagtatcgacggtcgccttcgaacttaaaatctgagtaacaacttgggtaaaactggagttttacaaaagacttggaaaacccgacacccgggtcggtgcttgcgaactaaatgaatttccaaaaccgcggaccggggaacgtacggggtgtacggtttcccgctctcgcacttaaggaccgattccttggaatttcatccaaacataagacaagtacaaccacatgggtggaatgggacacccctggctgagtaactagcttatcaggggagccttgatgccgagagacatgtggattcgccggggtggtgtcggggaggacccctgggcttcctggcacagtatggtctgggacctaacctgttgttggtctgggacccctctcgtcggcatatggtaaacctgtatcggctttcgaaatgccttgtcatgaaagcttggaggtctcccgacgtggctgatccccacgggctgggtgacccgggttagtaatgtcgtgtgggtaaagtgtaccccctctgcagaggtcattgaactgttcgaacagccgtgcccacggtcaagcgcggatgtgaggtgattcctagcgtagttttgtttgactactgcttgtgaaattgctgttgtgaaaaggggttcgatgtttgaaaaatctgtagctgatgggatcagctaggcccgggtggccgtttgaaaagttgttggcccgggtggccgtttgaaaagttgttggcccgggaggccgtttgaaaagctgttggccggatgccagctgttggccgtttgtaaaactccagttgcacctcgatattcatgcactctgtgcgagtatcgacggtcgccttcgaacttaaaatctgagtaacaacttgggtaaaactggagttttacaaaagacttggaaaacccgacacccgggtcggtgcttgcgaactaaatgaatttccaaaaccgcggaccggggaacgtaccgggtgtacggtttcccgctctcgcacttaaggaccgattccttggaatttcatccgaacataagacaagtacgaccacatgggtggaatgggacacccctggctgagtaactagcttatcaggggagccttgatgccgagagacatgtggattcgccggggtggtgtcggggaggacccctgggcttcctggcacagtatggtctgggacctaacctgttgttggtctgggacccctctcgtcggcatatggtaaacctgtatcggctttcgaaatgccttgtcatgaaagttggaagtctcccgacgtggctgatccccacgggctgggtgacccgggttagtaatgtcgtgtgggtaaagtgtaccccctctgcagaggtcattgaactgttcgaacagccgtgcccacggtcaagggcggatgtgaggtgattcctagcgtagttttgtttgactactgcttgtgaaattgctgttgtgaaaaggggttcgatgtttgaaaaatctgtagctgatgggatcagctaggcccgggtggccgtttgaaaagttgttggcccgggtggccgtttgaaaagttgttggcccgggaggccgtttgaaaagctgttggccgaatgccaaccctgtttcaagatctaaagactgatacattgcacatactccgaccggacgagacgcactgtcccatccgtgtcgtttgagaagcactcacctagtcgttttagaaaaagagttcaaataaaaccaaattgcaaaaacaacagccttcccctggcttgctgagtactcccgtactcacccttgttctatataaatatcccccccccagttgctgaagaagatgaagcggatcctgctgacgaggagttcttccaggagcaagtcggctacgatgagttttagggtttcggcctagttcccaagtcgcgcctgtgatgattggtccaagtcctggcttccgctttccttttgtaatgcagttgtgagctcgggatcagtccgcagcccaacatgactgtacttctactctataataaagagacctctgttgctgtgatactctgtctccctgtgataccagcattgtttcctgggactggtatcgattaacaggttaatttggagcgtcacgggctagttccggtcgggactagttcggggcgtgacaatcccttacacaagggtaggatggttgatggagtttaggaatttggttaccgacagttcatgtcagtactaggtgttttcagtttcctaggtcatgttatgcaggaccgcggcaccagtcgtctctctagatgaggtacaaaatgcttaatttgtggcactaaccagacaccagcgcgatatagattgatgctggactagtcgatggcatgatacagtccacactgacgatcagactcagttcttgaatccaagctagactctggaacaaacgttttagattctaagttttttcataactagacgagttgatcaggattggggatttgctggattagactcggccattttggcattattggaagaaactacggttgagcaggatgatctcgtcgttgcaaaacttgtagccagatgagtaaacatttgtggttgattgcatagataaagctagcattaacgaatgcttttaggagtagagttcgtctcaaatacgaagagaaggatgtacaattcctggaaaaagaaaagatttgcagttattttggcagcgtattcatatgcagctattcaagtatttgagaaattaaatagcataaaaatgaccaattagccaggcccaaaattggccatgtatattcatcttataatgcaaaggccggacgctgcccattatatatataaaaaaaagccaggcccaaaaagaaaacgagcacaacataaaaggaacaaaggttgctgtaatttcaacaatgctagctcttttctgaaactttttccatcaattcgatcctaccaactctgcttaaactcttcttggatctctgacaactaacgtgcagccaacaggccagccatcttctttatatatacatggcctcattcatggctgcttctcacctcatcctctgaatctgatccatcaaataccttgtctaatgcctgataactgagaagtgacagaagaagacgctgtcatattgtacactgatagaacagctgtgcttgagtgtagctgggtgagaaatgtttgagcattgcattggcctcctactaggagtggaaggcatccggataatttctgagaaaggtgcttgatcaatcgttctctactgaaaaatcaagtaccaccaaaccacacataaaactactgtcatcaaagattctagctttctcagacaatgagaagcaccacgaataattatatatagtctatcctctattttcttcgtgataatttactaactgggttcctttttttttgaaaaagaatttcactaactcggtatgcctgtaaactacttgattggagatataacatcactatttttgtctctttttgcaggagctgcacatgggatgtacgtggctatattggtactagctatgttaataagtgggacatgatttcatcgtccgggttctcctcgtagattatgtcctctacatcaaagtattcaagtcattgtcgtcgaggctctcatctcatcctcgcagtcgatttccgcctcgtcatcgaagatttcatcatccggattctcctagcagattctatcatctacatcatagcattcaatgtcacttaggcaaccaataggactgtacgatgccaagcgttgctagttttatattagagcaattttacagttattgaggaggtatatacctgctaaggacagtaaaatttattttttatattatattataagtaggggaaaaactttatataaccacccagggtgaagaaaagaaaaaaaaggaaaaggaaaggcaaaactacatcagaacatgctagggcgcattatctataaaaaaaagggggggagggcatgctagggcgctattctcgttgtctttcatggggttgtacgtgtcaagttaaatggttgggtaactagcaagctagctgtaaactatggctatggctagttaacgtatattcacagttaaatttatttttacgttgtaacctatagaagttaaattagatcttgcatgtttgtagagtgattttcacatattaatatgtcttgttgattttcttttaaaaaaatttataattatttagatgacatgcaaacaacgagtaaatgtcctctcgaaaatttataatagtttaccaagtgtgatattatcttcactttcactgaagtagtttacgtgtatctgtgtatgcacggtttactgtttatttttcacgctgcacagaacattactaaaaaaataactaatttgattaattattcatgttttgctgcagtatgctgaattgccaatcaattattttttctgctttgcaaatgaatggcgggctctctttcttgtatcgtcaccattccggccgccatcgcccacatcccctcgcccctaccgtcgtcgtctccactcccaccgacatcgctgtccccgccgccagctgccaccctaccaggatctggcagtcaccatcgccgctgcactagaggctcccctggccgcccgcacagggagaggcgtgaagcccaaccgccgccgccgtccttgcaggtacatggctctgcggccactacggcggtggcgaggcggaagaggaa

SEQ ID NO: 1312 - DNA, 567 bp, Oryza sativa
tatagggcgaattcgagctcggtaccccactccgcctccgcgaggatacgctcaccgagcgggagcgagccctcgaggagggcgaggccgcagcacagaggctagcggagagcgcgtccctccgcgaagctgcgcaagaggaacaagcgcgtcgcaatctggaaagtgcccgcgccgagagggccgcattgaaccagcgggccgctgaactcgaggcgcaggcaagggagctggatgcaagggcgcgtagcggcggggcggccacgggcgacagcgacttagccgcccgcctcgcagttgccgccgctgtctgcgccgaccgccgccactgtccccagccgtctcgggagtgtatagagggagagagagaggaagaggaagagggggagaaagatgaggaagaatgggtatagaggctgatgcatgggtactgctgtcatagactcaaaatagagaggatggatgaagaagctgttggagtaaataacaaatttgacttgataaatgagatggagagttggccaaatagatatttggagagtcgaatttacagagagtgttggagat

SEQ ID NO: 1313 - DNA, 600 bp, Oryza sativa
tatagggcgaattcgagctcggtacccgctcgcctgcgaggagttcggcttgggagacgttcagctcgaggagatgatcagagaagtcgacgaagacaacgtcagtaaaaaaaaaaagaacctacttttccattccattctgatcgaagctagctaatcacattgcctgaaatgcttgatctgacggaactttcgctgttctttttcgtgccttgtgtttgcaggatggtcgcatagattacaacgagttcgtggcgatgatgcagaagccgacgatggggctcccggcgaagaagtccggcgggctgcagaacagtttcagcatcggcttcagggaggccttgaggatgtcttgagaaacagccactagagtcagtcacacacttgtagaggcgacgacaacgagatcgatatgttgtcttccatagggctggtaatttcgaaacggggaaaaaaatggctggaggagatgtgcgtgtacgtacaggcgtagaggggggtgggtcactcttgggtcattggttcgattgttttcttctgacgttaaaaatacaagagaggtttttcgttcctcgccgccaccgtcgttcatgtgataat

SEQ ID NO: 1314 - DNA, 633 bp, Oryza sativa
caaattttcatcattccatgtttacgcccacccccacccccccccccaaaaaaaaaacacacacacacacacacaataagacaggtaatgcacacaacatggctcagtacagcagagtactgagagatcccctcataatttccccaaagcgtaaccatgtgtgaataaattttgagctagtagggttgcagccacgagtaagtcttcccttgttattgtgtagccagaatgccgcaaaacttccatgcctaagcgaactgttgagagtacgtttcgatttctgactgtgttagcctggaagtgcttgtcccaaccttgtttctgagcatgaacgcccgcaagccaacatgttagttgaagcatcagggcgattagcagcatgatatcaaaacgctctgagctgctcgttcggctatggcgtaggcctagtccgtaggcaggacttttcaagtctcggaaggtttcttcaatctgcattcgcttcgaatagatattaacaagttgtttgggtgttcgaatttcaacaggtaagttagttgctagaacccatggctcctttgccgacgctgagtagattttaggtgacgggtggtgacaatgagtccgtgtcgagcgctgattttttcggccttt

SEQ ID NO: 1315 - DNA, 663 bp, Oryza sativa
tgaatagtacagttaaaaacatacaaaaaatagatgatctcaatatatgaacaagtaatggaattgcatctaaggttcacatggttttggttgattggcaagcaattgaggaagggcaacttatcatcaacagctaatgaatagtacagttcaaaccatagatgatttcgatatatgaaccagtaatggaattgcatctaaacgttcacatggttttcgttgattggcaagcaattggggaagggcgacttatcgtgctctgaatccaacacatttccacaaccaaatctactttcccccacctaaatccatcattcccggagcacacgcaagcgctactccaaacccttctaaacccatcgaattcttcaaccctatcacagatccaaaactccccaacgtcccccctcaaatcccccatcctcctatcctaaatccggtcttatctgtccctccttcatccgtcccgtccgttagtacagtatccgtaaacgtataaataacatagagacgaatcgctcgcgagctcaccttctcggggtctccgtccttgtctgggtggttcttgatggcggtcttgcggtaccccttcttgaggtcatccttggaacgcatccttgggcaccccaagcacctcgtagtaccgcgtgttgtcgctcttct

SEQ ID NO: 1316 - DNA, 571 bp, Oryza sativa
caagtattcactgatgttgttggtagcccttactatgtcgcgccagaagttctgaaaaagaaatatggtcaagaggcagatgtctggagcgctggtgtgataatttacatcttgttgtgtggtgtgccgccattttgggcaggtaagaattttgctgatttttcagtcaatcacaaaacaattatactaactttcgtgacaaaatgtgatgtattttgatccgaactcttgtactaattaagctctccattgttgtgaatcagagaacgagcagggtatatttgaagaggttttgcatggtagacttgactttcagtcagaaccatggcctagcatctctgaaggtgccaaagatctcgtaaggagaatgcttgttagggacccgaagaagagattgacagctcatgaagttttaagtaagttacttgattaattttcatgatatattcctaaatgtatttttctagctattttaatagtgcagggctgcaggccatgaacagtgcagtctgatttacttggcattatcatcttttcaaggcatccatgggtccaggttggtggtttggct

SEQ ID NO: 1317 - DNA, 560 bp, Oryza sativa
gcaaccacatggtcagacaagccgttgtactaacaaaaataggcctttggtacaaacaaatgctagaaacaaggcgttctgagctccagaaggctgaagccaaggtaattctttgtttttgcctgtccaatttccctttggaaattacaccaaatttaaagcacaaatcaagggtatattctaactcccctttgagaacttgaagatttgtggaaataccattaaaggggcttcctctagtgagtttcttcttgacaaactgatacataaatacagcccataggcttatttagtactggtaaggactaacgacaaacacctcatatcctatcatgatccaacaactcctaatctcaacttaagtcgcacctcagtttttccttttttgggcgtaaacctcagactgttcttcacacggaatacttcattgattaattaagctttgtttgactacaactgtgatatatcgctataaattcaaagagacaacgttgaaatatttccgatgtgattcaggttgtcattttgggcgacaaggttaattcacatttaaaccttct

SEQ ID NO: 1318 - DNA, 594 bp, Oryza sativa
attacgacctagaaaagaaaaccaggcaaaaaatcagaacatcaggatcacaccattgccaccacaaaggaggcaagacaaaagaaaaattagcaatcgacaaagcagatgaaagcatacttgagtcgaattagtatcccacactttgacatactgatcaaaagaagctgtcacaaacagcccagtgtccacaggataccatacggccatagataccgcgaacttgtggccattttcatgctgcttgtccacaaggagaatgctcctatgcttggcaatgaacccagcttcgtattcgatcgcattctgcacatcaaatatagcggctgatccatccgatgcgcccgagagcaggtaccgccgctctatcaaatcaacctgaccatattgtcaaattacaaaacaccagcgggagcgactcaggaattgcacaccaaatacgcaagattccatctacagggtgtacaaatcaaattgatctaaaccactaaggtgagagaaggagaaggggagtgagggagtgagaagggggtgtacctggagagagttgacggcgccgttgtgcggggtggtgaactccttgcggttggagag

SEQ ID NO: 1319 - DNA, 1691 bp, Oryza sativa
cacttttgtcttcattccctaatgatcacactaatacgattttgcatcgtttacatatcatgtcagcaaaagcatcgcgtctcttgacgccgccgcacccgagcagagcgtattcgatcaccacccgcgccaagagcgcttgtcgatccgatccggtgcaggacaacttcttccatcatcccggctgaggatgcttgctttgctgagctaattgcatgcaagagagcaattgaaacaggccaaggaagtcagagtgttacctagggacagtcggacagacagacaatccagatgtagtgagaatgcttgaggggagggatctcaacagatcagcttatggagccttagcacaagatatcaaagcgaaactcctcttacttcaggaggtaaaggttggctgggtccgacaaatcaggcgtcgcataagttagcgcagaatagaatttttttaccagtgcttggtttaatgtatgtaacccctcattcttagaggcggcttttttccccttattaaatccagggaacttcattttccccccttattttactgtagaaactagcaagtgcagaggattcaacccaattttgtatatgagaagaaaaacaatgcatatactctatattatatttcccatttttatctcagaaggtacaaactttaccctgtatcattagacaatatatgattttgatcaagtgcttatagccgctcaagaagctggcattgatatcccatcacaacaatgaatttggagctggtagtaagagttcaggagggcctcattgaaccgtttcgggtcctcctgtggggcatatggccggtgttctttatgattttccaacctagcattcgcacgaaagtgttctgcatttgcattaattcatcttgtgtaagtgaaattacaaggtgcagcctcagcatgtaattcccctgcaattattttaatattttttttttgaaaaagagagcaaaagctttgcttcatactctatcatgttccataatactcgatgttttggacagggttaaattcaaacttttatatcattaacgaacaataacattaaaagtacttagttcaaagtcagtaaaacaacattacaaagtattataataaaagtaaaatatatttatttattataaatattataatagaaaattatagttaaatatgtattttgaagattatgtggttcaaatcttaaagaattgtgaaaccggagagagtatgtattactctaattatattagaaggaataagtaccgacctcgctactttaaatgccttctccatgggaaatatctgatcatgctctcccccacaatacaagaacttgctgaaaggtgagacagtcagacaaagaccatttgataaaggtaaacttgggaagtaaagcactcttgtaattattcatcagctgctaatcgctatggaatacctggggaaatggagcgagatggaatttgtctttgtcccccagtgttgtccccttgatgatgagctcttctcttctattttgtcggtgtagagatactgcaacacagtgttacctgttactgttactcattctttttgataaataagttactgatactaaagtcaagaagctgtaatcaaagataatgactctcaagaacaattagtgcagttgattacatgattgtactcatcactgccagaaaatttcca

SEQ ID NO: 1320 - DNA, 713 bp, Oryza sativa
agacatgggtatatgagatgacccagggtttgtaaccaaatcatacctttctcggccttttggctaagatcaagtgtagtatctgttcttatcagtttaatatctgatatgtgtaccatgtgttcactttgatattaaatttattttagccaaccatgtcctcggcgcctagggttcctaggcgactcaaggtgggttctgcgtgggtagggtttcaatcttctctcaaccccatcggtctcatgcctgatcggatcgatctcttcggtctagatcctgagtcggatcgatctcttcggtctagatcctgagtccacatcccatccttcctctgtgtccacggttagattctctgttttggagccgagccaaaccttgctagccggggaggggtagttttagggttcggagggcaccatggaggcgatgcaggcactgatgaagcgcatgcaattgtcggaggcagagaagaaggggatccggatctgcgaggcggagtctggaagtatgggatcaggggatccgaaggcgatcgggaaggtcctggcggagaaagtggtgaacgcggagggtttggcgcaagcactggggaagatctggtgtctgattaggggaataacgtgcagagatctaggcgagaaccatttcctgtttacctttcatcagcatccgggaagcggcatgctctggaggatggaccctggatgtttggt

SEQ ID NO: 1321 - DNA, 1527 bp, Oryza sativa
ccacaaaaggaaggaggtctgcccgtgtctcgaagtcgccgggggcgaagcggggcaccgcaagcgaatactctgacgcggacgtttcgccagccgctctctttcccttcgcctcagtcagcggcgatgcaattggctgacgaggaggactgccgaaaactttcgccgcggccgtcacgatcctttccgcggaggccgaagccccagcggcagtgctaccacccgctccagtgccgccaagtggaggagcgggagcggctgagagatccaggctgcggccagcgggcgaagtcagagtcccgtcagaggactcatcgtcgctaaaaactcgagcgatatcgacaagtcctttctttttagccgccttcttgacggggcctcccttcgccgccttgccagaggagaacgcaaccagagccttcgccacgtccaagtctttttggcgaaggggggagctattcgactccaccccagtctcgttatggccaggacttggagtgggggtataaccgggagtttcggcgcgtccctcggtcacctcgaccgcggcattttcgaccgcggtctccgtctcttcttcctccccctctccctcttcgccgtcaagttcttcgccatccttgtcgtcagcgtcagaatctgatgaaacaggagccctacgcttcctaggggcaagcttaacctgaccgcgcggccgcttccgcgaaggccctgcttcgtcaccagccttatggggattcgcccgaggaggcaattcgccgttaaaaacccggttcgcccgaccagttgcctgccgtgtaagcatttggctgtactcaacgaccgatacgtcgccgatcatcttacgggcttcggcttcggcttggtcaagggttagcactgcaaaggaaaggaaaggagtcaggttaaaaggtcaagcagagagagctaaagcgcgaaagtatatggcgaaaacagcagacttactgttcattccctcagggaggaccagcttaggcaagccatcaacctcttcgctcaggttaaccgcaacctgccatgactgggagaggggaaagatgcgaagcatgcagaactcctccaccaggtcgcggcagctgaggcgggaacagactttccttagcagggcgaaccgggcctccatagcgccatccacggcgatcctgggttttcgattcggcgcaataaccctgcgccgacaccgaagagctttcgctgaatcagagccggcctcgaaggggatggtgtggtaaaaccacctcgccatccaatggcggtcccacttcgacatggcagcattcgctggccaaaggtcggaccgttcggggcgaacattgaagttcacgctcccgatcaccgtcttcttcgtcccagccggagtaatcaccgtcttggagttcacggtggcgaagaatatggcgccgaagagagcagcgctaggttcgaacccagaagtccgacaagcccaatcgaaaattgagatccgaaccagcgtcgatgggctcaattgggggagctctacctgga

SEQ ID NO: 1322 - DNA, 1664 bp, Oryza sativa
ggcttattactaatgaatgggctttaaagtgggggaaattcaagttgggcctgattttggcccatcttgagtagtaacccattaaaggcccaacttaacatttgctttttctttcaaaaaaaagaacattgacacggtcatggaaaaaaatgtaaagatttgattatattttttagataataaagatttgattatatgacccgataaaattattttcagtgacgcttttcagtggtgaaactaaaatttgggcctccttttagcccaatcttgagcagaactcacttacggcccaacctatgaaccatagcccacatcactaagctttcctttccttttctttggtagagaagtacaatatgataataaccattaactagtactagttaagtatgaagtgatgcataacactataacagcataagtacagtatgatactaagtttctctgacataatcatgtcataaaatgcttcaaaatccaaactgtgccaagtacaatttcctagtcattactctaccttttcactgatgatgatgaaaaggtcattaggatgatactatatatatagtatatcatatgtgatgtgtgcatcaaaaactcctagctaactgagatgcatgcatatgagaggtgtcaatctacctaggaaaagctacagggcactcaccgaatcgagcaggatgttggaggccttgaagtcacggtagatgaccggcttctctgcgtcgtggaggaacgccaaacccttcgcggcgccaaccgcgatgtttaatcgggtcgaccacggcagcactgcaggaatctctgcagaaaaagaagaaaagaaaagaaaatatcttcagaaatctcagcaggatcaacgtcagctaaagccgcgcatgtcatcattataattaattaatcgatagctgatagccatgttatgtatacacatcaatcgaataagaaagctggaaaaggaaaaacaaagcagtttatgcgtattgttgcagcagaggagaaaaaaaagacgatgaacagtactggctagccggccatgcgtgttgtcgcctttgtggaattttggtttcttgttctttctgccttctgaattttcaagaaatgttattattgtaatttggagggattcgatatccagtcaacgagttaggagatttcgtcatgaccaagaacaaatcaatcagcttgagccagtgaggcagctgggaagattgcagcacactagattactatgtcaacctgaaattgatccaacaactacaggtgacctcactttcatctgacgtctgtaatctagcattagaaaacgtctagtagcataatctatagcttgtctcgcaagggtgagtgaatgtataattgacccttacctaatgaaatactattttccatgggttttgcaagctcataagtgagcagagaaggccagtcaaattcagtttggtcagaactctgaactctaataagctaaagaagttggctagccaaacgaaggaaaacatatccatcatccaagctgaaagcctcaaagacgcaaccaagttttttgagtagcaaagctacccatttgaagtagacttctgaataatggctttgcttctctctcattttgtgatatctataatccattattaagttggaatataacctcattttctcaa

SEQ ID NO: 1323 - DNA, 896 bp, Oryza sativa
ctatcatgggttataagcactgaccacatcttagaaaaaaaatactttcatctaatggatttgcatggatatatttcattacttatgtccattatatgaaacaaaccgatgagaaaacactaacattgatggtggagttgaccatgtttaaatcctggttctccacgaatattatgcacgcacggataaggttttcaataggtatgtaagtgtgatacacatgtataaccgagcgagtatgtgttttcattttaaaagaaaagaagctaatggcttaacacctatgcaaatgcatgagtatattaactttccaaatctaaaggtttactaatacgaggtgtaaaacaggcacgagtgtggtgcgggtgtacagggatgtgtatgcatcttccatgtaatcaagaatgtacactggtgtgaatgtgtcttcagtgtaatcaggaatgtacgtaagatgtgtatgcgtcatccgtataattagaaaaaaaaactagggcttaatcagattgtagccaaaataacccttatcaatttttcggtaagttgataatgttaccaaaattttggcaggattttttttatgtatttaccaaactttggcaagaagctaaatgtatacacacctttgacaattttacccaaaaaatggtatgatttgaaattgcattaatctaaacatgccctaatgaattagtctgtgtttagttccaccagtaaaaaaattttactaggtcacatcagatatatggacacacatttaaagtattaaacaaaacaaattacataatccagatgtaaactgcgagacaaatttattaagcctaattaatccatcattagcaaatatttactatatcaccatattgtcagatcatggcgcaattaggtttaaaaaa

SEQ ID NO: 1324 - DNA, 1648 bp, Oryza sativa
atcttgaaactgcaggctccagtttggccatcccaggctcccagcacacccgctcaaaaagacagaagtttagagagagagagagaatatgcggtaattttttttagtggagttggttacatacaaatttcttataaaaatgttgattgtgccacgttatgaacgaatcttgattttttttttataactcgcgactaattaaataaaatgttgaaatcattataaggaagaagtttatatataagactattttttctattgcaatgctctttatcataaagacgaacgacctgtcaatggtcatattactattaatacgctgaaacaattggtactagggattagggaaaggaaaaaaagtttgaattagacctccaaactagtgagtgagtaagaattaccacctagactttagattggttttgctcttatgtgatagactagtcaatattttttaaaaaaaaaattggtaggacccgtccatctcttcttacaggtggggttccactgatttattatgaaaattattgattgagctgtcataatataggaccaaaactattttggattgtgttaaggggattttaattcaataaaaaaattcaatattaatattaatatggcgttcatgaaaatatttatagttgagagtgaaaaatgtatgattttcgtgtctagaggttaatttgcactcatccaataatttagagggtgtaatagttgagagtgaaaaatgtatgatttttgtgtctaggaggttaatttgcactcgtctaataatttagcgggtgtaatttggacttttttccatacagaaatgggcactgagtcaaacaacaccacatcattaattactgcagtagactgtgagcctgtgaagatggtataaatgtatgctgagcgcctagaggcacgccgaagccagacaggcagacactaaccgtggagtagtctgatcgatctatagaaatactaagtagtagaacacagtactgtagccaaaaactaggccaagagagagattgggcgttctgagcgtagccaaagacatggcaactgatgcccacataacacacttcgcccatccacaacaccgccttctcaagaccccgtacagcagcgcctcgcgccatgtctgcgacatctgcgaagccaagctctccggcctcgtcggctaccgctgcaacgcctgcgacttcgacatccatgaggcgtgcgccgactacttcaaggagaccatctccttcttcgcccacccgtggcacaccctcacgctctgccgcatgcctcctgagaataaaggatgggtatgtgacctctgcatggagcattgtcccccaggaaatttcgtgtaccgctgcatccagtgcaagttcgacgtgcaccccctgtgcacgttgctccctcagacgatccgcagcccgcttcacccacaccacgacctcaacatggtaccttcttcagggcactgcaatgcttgccctgaacgtttgcccgtgtggcactacatctgtggcccttgtacgtctccgtcttatcggctacatatcgggtgcgtctctggcgcgccaagcggtgtcggtcagggtagcggcagcaccaccaaccagaacaacagtagcagccgtggccagggcaccggcaacac

SEQ ID NO: 1325 - DNA, 1383 bp, Oryza sativa
tgcacggtttttcatggtttttcacggttaccgcggtaaccgtgcttaccgccggggcgcggtaacccggccccggcggtttaagaaaccctgatggtgggtcaagccttggggtcgacctaccagtatccctaacagttattctttattataggtaacggtattaccatattatcttattgttctcatcaaacacatgtgttgaaaagataaactaatagtagtgatattactcgacgagaaaagaaccatgtcaagtgattaacacattccacttccgagttcttacaatggttcaaaagacgcttctcttctcttattttcccctttctttgttgtctcttatctaactttctatccattgggatgtggcaatcttactgccaaaatgttaaagataaaaccaatgatgttttttaacaagaaaaaaatatttatcgacacttgtctggcttactatagtggtttgaaagacaactttctcctatttcatctatgtcacgtgattcctttagggctccaaccgtgtgtccggtgtgacatgggactcttaaaatagtaaaatccccttgtgatgcatttgcatagttcatctacatggagattccacaacaaaaacaccaggacaacacatcaagaaacaaaaatctaatttctttttagcttccaaaaaaaatctccttccttcttggaccaaaatggcgataaaaccccaaaccacagcccaacatcccagcataacaaaccaagagagaaacaagcctaaaagaagcaaggcccagcccaatagcccatcaagctcaccattcctcgcctcctagggtttcctcctatccaatccaccaactccgcctcgccgcctccatccctcccattcccgaacacgtccccaaggtaagccggcggcggcggcgatgacgacgagcctgaggaagaaccgcaagaagcgcggccacgtgtccgccggccacggccgcatcgggaagcaccggaagcacccgggaggccggggcaacgccggaggcatgcaccaccaccgcatcctcttcgacaagtaccacccgggctacttcggcaaggtcggcatgcgctacttccacaggctccgcaacaagttctactccccggcggtgaacgtggagcggctctggtcgatggtgcccgccgagcaggcggcggaggccgccggcgccggcaaggcgcccctgctggacgtgacgcagttcggctacttcaaggtgctcgggaagggtctgctgccggagaagcccatcgtcgtcaaggccaagctcatctccaaggtcgccgagaagaagatcaaggccgccggcggcgccgtcgtgctcaccgcctagggtttggtcctggccctgccttttgttc

SEQ ID NO: 1326 - DNA, 1805 bp, Oryza sativa
gaaccgtcggagcacattatccagggctgctcgacgggctcgggttcagaggttgacactggggtccattcggctacaaagtcggctagcacttgagacttgacagcagtgcgcgcaacgaaatgcaaatcaaacggggatagttctgctgcccatttactaagcctcccaaagatttccttgcctcgtagtatttcgcccaaagggtactgtgaaggcaccattattttatgggcctggaagtagtgcttgagcttgtgcgaagccatcaccaaggtgtaagcaagcttttccatctcgatgtatcttgtcttcgcctcttgcagcgcttcggagacaaaataaactggtttctggccgaactctgtttcttgaacaagggcggcgcttactgccgctggtgaggctgctaagtacagcagcagttcgcttcctggattcgggcttatgagggctggtgggctttgcaagtattgttttaggtcgtcgaacgctgcttggcattctggtgtccaactgaactttcctgcgccccggagggtcttgaagaatgggagacctctttcggccgcttttgagaggaatcggctaagcgccgcaattcggcctgcaagcttttgtacatcatgtgtgcttgatggaggcttcatttgccgaatggcatcgattttttctgggttcgcctcgattcctctttcagaaaccaggaatcccaacaacttgcccgcgcgaactccgaagacgcacttctcaggattcaattttatgcccgctgtgcgcaagttgtcaaaagtctcctgcagatcggacgcatgatcgaaaaccttacggctttttacgacaatgtcgtcaacataagcttccacatttcgccctaactgattacaaaggaccttgtacaccaatctggcgaaggttgccccagcattcctcaagccgaaaggcatcctgaggtgacagaaagtgccaaacggggtgataaaagcagttttcgggatgtccggtgggttcatatggatctgatgatagccggaatatgcgtccaggaaactcatgagttcgcagccggctgtcgaatccacgagctgatcaatccgcggcaaagggaaatcgtcttttggacatgccttattcaggtccgtgaagtctacacacattcgccatttgccgtttgacttccgcaccagtactggattcgccaaccattctgggtggacgatctcctgaatgaccccagccttgagcagcttttggacttcggctttcgccgcctcttgacgatctgcggacatcttacgcagtttctgctctcttggcttggcatccggcttgactgctaggtgatacatgatgaggtctgccgaaaccccccccccccacttcgtcagggccccaggcgaagatatcaatgttcttctttagcaccgctaggatgctctcagcttcttgtttgcccatgccgtctcccagcgatacgagctttgtggggtcggcatcgtcaacctgcacttttactatcttgccgtgaggtgtgggttttggcgcgtgttttggccggctgtggagttcggcttcgacattgtgcatggccctgttgactacggcttgatcgcctttcgacgcaggcgaaggctgaagccccttgaccactatcactcccgctgggccgggcatcttgagtttgagatagttgtggtgggaaatggcttcgaacttgttcagggtcgcacggccgaggatggcattgtagttgtacgggatgtcgacgacatcgaacagtacttgctcttcgcgtctgttttctc

SEQ ID NO: 1327 - DNA, 732 bp, Oryza sativa
cgcattttgtcgagcacctagctagcacaaagtatcattggcccaaaaacaaaaaaaaagaagaagaagaagaagaagaagaagaagaagaagaaaaaagctagtacaaagcacacctccctcgatggcagagagtgagagaggagaagaagatcagatcactgacgtttcaggacgcagctgcgccttcaccttatgtaggcgaggtggccgaaccttgccgccgggatcgaccggccgaacaccttgccggccttgccgacgagccctcttaccaccaccttcaccccccgcgcaacgccgccgccgccgcccttcgccggaacagccgcacggccggcgactccgccatcacccgccgccgccaccgccgccaccttagcgccatgaaaacaccgcagtgggagctccatctttctcctgcaagaagacgacgacgacgatctagctagctatggacaccgtgcttttatcagctacgcgaccctttctttctttatacggcgggcgctcgtcggagccggtcaaagacagcgtggcgtcgcgaagtcggcgccgccgcccgtgccgggtcgtgtcgtcggacgaacacgttgcatgcgagggcacgacggcgacagtaacctctaaaactaactacacggcaagagacctcgtcagataccaatgccttgtcaacggccggtaataagaaaaataatccaggttgatgtgatcgtcgagatcgatctg

SEQ ID NO: 1328 - DNA, 1284 bp, Oryza sativa
cctacgattcaatatagtgtcacagtttgagatctcaaattcaaatatgtttggtgcattaattaatgtaattcaatatggtatcagcacaaaagacctcgaattcgaatccagctaagtccttagctgcgatgcaattagataaaaacataaaacctattaccgtttcacacttcaggttttaggaggcgtatataagtgaattctccacagtttgttaaaaataaatgataataaatttatctgctctaaactatgaaggtatagtatcaagttaattattgatgtccacaatattgataggtgaaaaaaaagatggaagccctatttttagccttttctcttagtaatatcagatttgatttgtacgtcaaaagaaacaaataaacaagcaataaaattgacaaaagacatgtttcaactaattagtttgtacagctacaaattgaagaaaaaccaacaaataaggaacaaagagattaacaaaggttgggcttctatatatttgcccagctgcaggtttgatccgatcctacgatcataatatctatttaatttttttttcaggaggtatatatatagacctacacgactgatccatctcaataagtaaaacttatcagaatgtttctgtatcactaaaaaaagaaaaagaaattaattgaaaaaaaattcgtttccaattttttttcttttccaaatatttttctctgatcactcggtgtcgtcggccgccgcattcaggtcaatcttgggcttcttcccgctgccgtcgccggcgccggcggaggcttcccggggcttcccggcgagcggcgggacgttgccggcgcaacgcgggcaccgggggtccgcctcggcgatgagcacgtaggtgaggcaggacgggcaggcggccgcacgcatggacgggctcgcgggcgtcgcggcggcgccgcctgagggcggcgagcggtggcgcttgccgatggaggaggaggacgaggaggtggacgccgacgacgacgacgacgtggccggggagccacgcgcggcggcggcggcggccgacctcccggccgtggcgcgctcgagcgcggagcggaccatgtcgagcgtgcagaccgcggccgacgtagacgcggccgcggcggcggaggacggcggcggaggcaggttgaggtcttggtggccgacatggacgccctggagccgaggagtcaagaacgtcttccctgactgcaagaagaacaaaaaaaaaatcagtaaactccatttcttcaagatcaaaccaagaacatggca

SEQ ID NO: 1329 - DNA, 1139 bp, Oryza sativa
agctctcagacccattagcagactgctttggcatcgtgtatatgtgatttaacttgctttcatcaagtacttgatttggatttttatgtgctacaggttcctaatgtcaaatgggaggacgttggtggtcttgaggaagtgaaaaaggttattctagatactattcaggtaaaattttcttatgttcatcaatgtttattgtaacttaagaatatgaagctgctttagtaagtttgtgaatagtaatttgcctcttttctttgctatacagttacctctgttgtataagcaccttttttcttctaaattggggaagcggtcaggtgtcctgttgtatggacctcctggcacagggaaggttggtttacggtgtttttctattttatactttgtttttagttaagctttaccttttcgtttcttcccatctgtccaaagaggataagcacatagaaaagcaatgtatacgtgctcattattattatgtttcaatttgcagacattattggcaaaagctgtagcaacagagtgctctttaaactttcttagtgtaaaaggtccagaattgattaacatgtatgttggagaatcggagaagaatgtaagggacatttttgagaaggtaaattgatttacacaaccatacaattgccataagatgtgcatatatgcttacggttgcaactcttctgtcaacctcaggcaagatctgcacggccatgtgtaattttctttgatgagcttgattcccttgctcctgcacgaggatcctcctcagattccgcaggtgtgatggatagagtagtttcacaggtatggttgttttcatcactgaggcagtgtctcaatgttttttttattatctctgttcaaatattggactttgtggtctcagtttcccctttcctctctttgactctttgttagttgcttgtggagattgatgggttaagcgataacagtcaggtattatccttgttcataccaatttgttttcctacttgttttttttttcctgagatgctttgacatgaaggggaaccattttcccaattcttttctaggatcttttcattattggagctacaaataggcctgaccttcttgattctgcacttctccggcctggccgctttgat

SEQ ID NO: 1330 - DNA, 674 bp, Oryza sativa
caactccactctaaacccaactcctgaagctaaatttaggagttggagctgtaccaaacaggccctaaatgccccctatgtgattttgctgtcttctcgctcgacctcaggtcatctctgtgactccgtgtctgccaaagtaccacggcggcggccgaatcttgcagccgtgaggccgggcggtccaccggtcggacaccggcggctggccgtgtggtggcgcggcgtggcttgcgtgtgttgtgtcgtcggcgggggatttacaataatgacactgcaaatattaacttttgctataatgacactagatccatatttcatagacacatatgggcccatttatcatccactcagaatgtcaaaacagcgaagctccgatatttgccactcccaatattgcaattttctcgtcgcgggcgcggcaaccatgagaccgcggcgtggcttcgcagacgcaaacgtgggctggattttttcgacaggcggcgtgtggattgtgttgttgggctgggcggggccgcgtctgatctgctagctgacccaacgcatatgggctcccacattccactagtttgtagtacattttttggttcctaaaaagttttttttttaaaatagtctttgataaaacttgaagcagtaaattacagttttcagttctgttttgctaatcg

SEQ ID NO: 1331 - DNA, 1559 bp, Oryza sativa
ttcaaaatcttttagtcaaacttccaactttttcgtcacatcaaatatttggatatatgcatggagcattaaatgtggacgaaaaaaaaccaattatacaatttgcatgtaaattgcgagacgaatcttttgagcctaattacaccatcatttgataatataatgctatactagccatttactactaatagattaattagatttaataaattcgtttgcagtttagaacggaatctgtagtttaacacagcctcagtcggtttactgatttctctgaacctctctctcctcttctccctcgtgtggactctcctcttctctctctcctctctctctcgcgcgcgcgtcgcagccatggtggaggcgacgcggcagcggaggaagccgctggtgctggcctccacgcaggcgctgctcgactcgctgccgggggaccgccgcgggtcggcccttccgccgccgccgccgccggagccggtgcgcatcagggccggggtgctccgcttccccaactcctcctcctcctcgtcttccgcgggcggaggcgagttcggggaggccgcctccttcgtcgccctcccctcgtccgcgctccgccggctcgccgtcgtcaccggcacgccggtaagtggactggtcccctccccgcgccttctcggatcaaatatcccattatctcgtctcagttagatcgttatgattgagtaattcggtggaaaatctggtcagtgaattggattttagtcgattttggatggtcacatatggggtttacctgtacactgttctgaattctgattagttggatgggaattgatgattagcttagccaaattgagctgtaataagtacaatggcaagtgatgcatagagcaatggtgctacaaaatttacctttgtgagcatacgattgcatttatgttacacttgattcaggcaatctaaatgatgatagaagtgcgctagtgtatactcctagcataaggttgggcagtatataggaatctattgtgctgaaagtaataaagggctttcaatctgcaggtgcttgtgaagaatgctgacaataatgtcggaaggattgccaaagcagtagtacttgatcacccatgccttgatgattccctgacagaacatactgagcctgtggacgcagcctctcccttggataatgccatgggtatcttaccctgtcgctcttttccaacaaacggctttccgcccttggatgaagaggtcgcttatgttagcccacttctggcattcaatctgggagtccatgtctcttgtctcaagcttcttgttcaaaaaggagagaaacctttcaagttctgttctaaagttgaagatagtgatctggctgctggtgaagaaagtaatcctattcttcacttagagattcttccatcccctcaagtgccgaaacatgctttgcatttgcgggtttctgttgtgaggattcctgaatgtggtgtgtttgcttctctaaaggcaaattcagccatggaggaagtgactaccaagatatgattgatcaagctctgaatgagcactttaag

SEQ ID NO: 1332 - DNA, 552 bp, Oryza sativa
ttgctctgttcttgatccagaaatttagtgcatttcaaatacgctgtgctcattttgctatttatctcaaaatattttccagatgtgatctgtgatctgtccaacctttgtgtactcgggctcattccacagttaacaaaaaagatggaagattttcaagattgtgactgcaaaagccttgttgctgttcctggttctgtggttctgcacctctttaggctgtttaatcagcaggataattcctggcagaagtacacattagcctactttcttttggtcaggaatgagtacttctctagggattcaaggaagcattcagatgggaagaaccaacttcttgactgctgtgatgattcagaattagatttggatgtgctgtatgctgatttggatagtaaagaactggagcttaagttgcagaaacctgttgtcaagactcaatcaaaaggtgactcaagtgccagtggatcaaatgattgcttctttcctggccttcacgacgacctggctcaggactgccttgcttgggcgagcagatcagactacccatcg

SEQ ID NO: 1333 - DNA, 832 bp, Oryza sativa
tgatccctttgagttttcccgaacgattaaccactgcgatctgcaagcggccggatccgcaggatcaggccaaactcctcgtcgatcgtcagtcaaaacgatcggaaatcgatgctgcacacacgcacgcacgcacctcagctagcaataactctcgacgtacgacgtcgacgtgctcactcatcaactccttcaaatcaatgcgagcttagctagcttagagactaacacgaattcaacgttctcaacttaagtctgatcgatcgatcgggtcgagcagtagtgaatgcgtgagcacgacagagcccgagtcattctagctagtataggtagatgcattatgcatgtagtatggctaccactgctagtttatttactactatacgtgctcacgtacgccgatcatatcatatcgtgttcaagatgttcaatgcgatcgcctgcctaattctttctccgagagcgacccggttttaattactggttacttgcacaggttgcgcaaggatgtcatcgccttaattatggggatgaaatagtctgaaaaccacgttgttgtttgccacgtagtttggtagtagatgatgaacgaatgtttttagtcggttactgtagtttgtattcaatcatgcttaatttgttacctcgtcttatggcccatctggtgtacgctaaatatgtacctaaacttagctttgtcgtgatacaatttgagtaacttatgcctaatcacgacctgtttcggcgaatagcgatgaacacccgcaaaaacatcacatcgaatttttttcacaaaaacatcacatcgaatttttggacacatgcatgaacc

SEQ ID NO: 1334 - DNA, 922 bp, Oryza sativa
agagccacgaagtataagttaatctcaggccaactttaccgttctgggatgcttcaacctctactccgttgcgtttctttcgccgaaggtgagcaaatggcgaaggagatacaccaggggctatgtggcgctcaccaagctgcaagaacggtggcctccaaggtgtttagacaaggggtttactggccaactgtgttgaaagtctgtgcagagcagattaagaagtgcgagagctgccagcgtcatggctgaagtcaaaccgcgccccactatgacttgcagcccattgcgccaatttggcccttcgccagatggggactggacatcattggcccaatcccttcggcacgaaacgggtataagttcgccattgtggctgttgaatatttctctcggtgggtcgaagccgaactccttggtgcaattacttcggcagcagtacagaagttcgtgtggaaaaacattatctgccggttcggagtaccaaaggagttcatcaccgacaacggcaagcagttcgactctgaaaagttcagacaaatgtgcgaagggcttaacctggaaataaaattcgcatcggtcgcacacccgcagtccaacggagcggccgaacgaacaaatggcaagatcctggaagcactaaagaaaaggctcgagggggcagcgaaaggcaaatggccagaagagatgctatctgttctttgggccctgcgaacgacccccacaagaccaacgaggtttagcccgttcatgctcctctatggcgacgaggcaatgaccccagcagagctaggggctaactcaccaagggtggtgttctctgggggcgaagaaggacgcgaggtgtcgctcgaactattagaaggagtaagagtcgaagcactcgagcacatgcgcaaatatgccgtaaacacttcggcaa

SEQ ID NO: 1335 - DNA, 1296 bp, Oryza sativa
gtggatccccccttttgtggattttcagctcttaattcaaaattggagtgttagaaatagatgatttaaagaagagacatgacgattataccttgcaaaacatacctgcttgcgttaatgggcctactggactggactcaatcctagtgcaccaaagaaaagatttagccatttataagggcttatttttaccgaaaatcaagaccttcatcaatagtcatacactactccctctatttttaaatatagaaaaaaagttcatttcactctcccgaactatttcattggatcacttaaccccctaaattatttttttcttatttcacccccaaactattagaaatggttcatcttaatccttaattaacagtatctatcaatcctacaaattaaattccattacaaaatatgacttataaagcgaggaaaaaaggagatgccattaaagattaagatgaaccgttttcaatagttcagagtgtaaaatgagctgagaaattgtttaggggttaagtgccctggcgaaatagttcgagtgagtaaaatagactattttcttaaataaatgatgatgttgaccattcatattgtataaaaaaatgtagcatcacttattttgttgtgattttgtttatcatcaaagatattttaagtatgacttgcattttgcatatttgcactaagttcttaatacaataaatgaccatgctcaaatattgacaacgcgatgtaattaaaaactaaaaaaacggagatactagtactcctatgtcatataaaaaattttaataatagctataaatctgaatatgtgtagattaaattttttatgggacgcagggtgtaaattggatattatatagttgaaatatctagtactaacacacatacacccatctgatcaaagagtagatatatctgttcatttccaatacataaaaaaaaaagaagagaaattggtccatatatctccaagctagcatttcgtagcttctagctagcatgatcacttcaccgatagctagacggatggatggaacccatccgtatgaacatgacggggcaggtgagaagagatgggatcgatcgtcgtcgtcgtcgcttgctcgaagccgctctgcgctattcatccccgttcatcagttcaggtcacagacgacgacgacgacgacggcgaggaggagaacatttatgggcgggtgatgtgtgcaccgaaactgggttatgccttgcaatttattgcaagcgctagcagtacgctcgcctacgtcctcctcctcctactgccgccgctag

SEQ ID NO: 1336 - DNA, 2338 bp, Oryza sativa
  unsure (1)..(2338): unsure at all n locations
ctccacctgaggccgcctgctatggcctccgccgccgccgccgggaacggctctccttccgcgccggaggactccacaggtggattctgcgtcgtcgattaggcttttgttctgttgcgcttcatgtgatttgctaccatgctatgcttgacatctccactagcagtaggcagtagcagtagctattccaagagttcttactctcttttgtgaaagctaatcctatttaatttgattttttaaactctggtttgtgttcggaattctcagcgttgtccaggataggagaagtcaagagggtgaccaaggagacgaatgtgcatgtgaagatcaacctggatggcactggtgttgccgattgcagcacagggatacctttcttggatcacatgctcgatgtaagtatggttttcctgtggcagcgattgtgaatgaggatttctcctatatagatagaatgtgcttgtatactgttgtgtgtagaaatgtttggtttttgacttaggggcttgtctaaagcaagaatatcagttgaaccattcgaagaggaaaagcaattgcttagtgcggaaggggaaacaatacctattaaactaacgaaaacatcttaggtcaaatccactaaatggttgaatagacgctcttaagttgcattcacttcagacgtttttgagtgccactggtgcaatcttattattgttgggagaaagtgatgtgttggggccattaaagcctgaataggtcctacttgaaaaaaatctgccgcttttcaagttccacgtgttttagctgctgttcgctaagaactgttctatcaagcaattagttcactatttgggaaatgctatttagttttgttttcctggtatgatgtgatacatgtaacttccacctattaactcatgtatggctttggttattccacgagcatgataaatgaccacttcatgtgaccaagtcctttaacctcgaatcaatatttcaagagaaatcacgcaaaattatcaacatcagttgcgtgtagcaaattgccagcgcttcattcgaaagaagtgtttttgtctagttttctgcattttgaatggttctactattgtatatgtttctcttgtaggtaccagtctttacacatgctgcataaatatgctcttttagtcaaatctggccattaattctgtgtctataacttacagcaactggcatctcatgggctctttgacgtatgtgttaaggcaaagggtgacactcacatcgatgaccatcactcaaacgaagacatcgctttggcaattggaacggtaattgttgctttcaccttatcatttctgcttctagaaatacttgtaggatcattatgaattgaaggttagggtatccataatttcatacttcttttcccccttcatttgtgcaaaattgaacgcgttatcaacacactatttacattgttgattgcatgctgaatcatcagtactgtaaatgtctgcaagctgtgtaggtaagcaaaacgtctagtatgattgcttttttatttttggtacttgtaggcactacttgaagcacttggagatcgaaaaggaattaatcggtttgggcattttacagcaccacttgatgaggcagcggttgaggttatactggtacatgctatcatcctggctttgctgntacatactgcaaatgtatatacttccctgcatttctacgtttgtattcatgtggccataattctcttatgccatgcaagcacataattgagttagagtcctgcaattagtcatgaagtttttaatgatattataattgtcatgagtatctatcgttctggtttactggcccatctgcactaatggcatttgaacacttgcactgaatggtaatgtttttgtagcacagacccatctatcacactataacgtcattagcaagaagatgactgcagtcatctggcctttgtcatatatacaccaattatttgccattttgggttcatcttagcttaattttttttgttagtgcggatatccatgtctaccacttcatcagtcaggctaattgataatgtgacttactctattatttactattcccccatatctaggatctatctggtcgtcctcatttgagttgcggcttaagtattccgactgagagagttggcacatacgatactcaggtaattcctgaaattatgtagctattatcctttttttttgggaaaaacttgtgatggtttcttttcgtcatgccagatccaatatggcttatccttaatcgtctaatgtgacatggctattgggttgtcttgcatcattcgtattcatcctctgacgttctt

SEQ ID NO: 1337 - DNA, 1938 bp, Oryza sativa
  unsure (1)..(1938): unsure at all n locations
tcatataattgtagtagtcaatgtgtcaaaaaggaaaaaaaaaagagatcatgacatgctgaaggctgactctcacccactgaaatggataagaaattcacaagttgaatgcatggcttctcattattttagaaagaaaaaaaatttgagtggngtttatggtttcccatttctcaacttgcatggacaattaataataacaattaaataatgatgccacctgtatatatttttctaggtgtagctaagcgatcaatacgcagtacaaaacatagacttctatctgcttgcaattaaaccaaacaaatttgctgatttgttcagaggtcaagttgatcaacaactggatggacagtactgtctctataccgaaccaagtggtacagattcaattaactgcagcagcatttgcaacgccgttcttccaattgatatacatcgattgatcgatcgagaccagaagcaaaaaagtaatattaataaatgaacganaagaacaattgtagcttaattagcgtacgtatgcttttgtccaaatgctgaaaacccaacattgattatggccattgccagtagtcgtatatgcagtctgcaggacaaacgtactctcgctacgctgctattaaaacgaggaattaattactactgttgcaacaagtacgtactccagagcagtgtagcttgcttctgttaattaacagaanaatgcattggcaagcagtagttgcttgtagtggagcagtattcttcagtcattgtagtaccaaaattttgcagttaattgcagagcccaattaaaacactgcagcatcatgttcagaatatcaattctgtacttgtgtgacacccataattttcgtctgaaaaaactgtgatactgaaccagaaccagtcccatttgcttaggcgttagttatctctgtacctgatgctacaatcgaactccttaattatccgatgatggatccacgtcaaactggtaatacagagtcatgagcagcactgtcgttctgcagtgtactaataaggttttagaatttatattccatgggttgcaaattctctgaaaaactatttcaaccttgtgacttgtaggtttggagaacctttgactgatcatgcctagtaggtcttttcgtccgaattaaataaattaactactattacaaggttgaaaagttgctctaaaatatgctattgcaagttctctacaaactccattaagagcgaggctaataatatagctgacttgttggctataagatttttttaagacttctctcagtccatccatataataattagctctttacgattaatataggacacttgtctctcacacagagttttttggttcttgtgtctaagccgactgtaaatttacagaccgcttctcttctcttttctcctccacctcaacatttagtcggcttataacctactattatacttttatacttgctctaagcttgtgacttgtaagcttggagaaagattgactagatgcatgcatgcacagcacccggtgctagttgatgactgtcatcatgctgatggcaaaaacatctccataattgtataatttgtgtttaatttgcatggattatgtgaggagatattcaggattagccgaaagaagagagagagagaagagtcagaagacaagttcattgctccctacaaaagcagcaagctgcgggtaggaaaagacaagtcttcaataataagcctgcacaattaatggttccatgaatgcagagtggttcctagttgaaaatttatgcacacacaggaggaagggagaggtggggtgaggtcgtttttatggatttaatgcaccccccatgcttgcaaaggaacaaaacacttgcacatttatcaacccttggtgatctaagcttccaccaaatccatttggctgcagttggagttggagga

SEQ ID NO: 1338 - DNA, 744 bp, Oryza sativa
aaggtgactatgagtactaacaaaagagtcgttgaacaagaaaagcagagaactatctcaagccagcattggactgtgaccaaaattgtaaaaaccattgtactaattttctctgccaaagacagatgaaaattaactggtacaagaatgattatcaatccaaacatataagttcagaaaatgatatacttcttaacttgtacagaaagtgggaaacttaacaagacataatttacagctttttgcacacctgagttatcagatttggcagcataaaaagtggaaatcttaagacagcaaacagtgaaagtgatgtgaacgcctttgctggtgtcaagtcacctcccagcagagagtatacaccaaatgaaaccacagtgacaataacggggatactgtttaggatgaagctattcagctgcagcagacaaggaaaaatacaaaagataatagtgagccgacaataagggatgcaacaactcattctcatatctattttaagtttgagtaactaagtaaattattgtaaacaaactttataggaccaggaagcaccagtacaatcgatactatagcatgcaactccaaaacttattgtgtaataaggagagttcatggatgcacgattaaaaaagagatcatatatagcagaatgaaattgacacaagtgaaagataacttaaatacaaaatggacataccgcagcaagcaattgagcgctgcggaaccatgaaatttcatcat

SEQ ID NO: 1339 - DNA, 662 bp, Oryza sativa
aaaagaaacaaaagtttgggcaaataaatactgaattagagtattgatagactagcatgcttatgaatggcaaggtcagtgcaaaagagagcatctagttactgaggtagtgaggtcgatccatagaaagatgtctattacagatgtctccgtagttcataatgaattgatgatttggtagtaagcttcacaatactattctgaccagctcttattggtttccatttttgtcacataattttatacagttgttaacactgcatgtttcctctaatcttatgatgttgctccaaaaactaatttttcaaattttggcaggctgagagaccaacattatcaaacgtcaatctggatgtacctatgggcagtttggttgcaatagtaggaagcactggggaggggaagacttctcttatttctgcaatgcttggtgaaataccaccagtgtcaggatcgaatacatcggtggtccttcgtggaacagtggcttatgttcctcaagtttcatggatcttcaatgcaactgtgagacacaatatctccatttatgttgattgttatattgaaccttttatggcttctacagatataatgttatcatctctgcaggtccgggacaatatattgtttgggtctcccttccaacctccacgctacgagaa

SEQ ID NO: 1340 - DNA, 673 bp, Oryza sativa
ttccccaaccaagatgtaaatgaccacaaaccggatgtaccatctaaactcatagatgtaaattctgtctcaagtgcaatcattacaagcatacaacaccaagcagcaatctcaatgatagatgaggtaacctgtagaggcagaattacgtgattgaaaaggtcaagggatgcaagaattcggtagaagtaaaattctgaacaagtgtgcttaactctacgtgctgatacacttatacttgggacatgttctcacctcaaatggagcaaggctagtctccccatccaagttcattatggaggtgccagtagcgatccgatacagtgattcagctatgcacaacaccacaagcaggccgagcatatagttgtagtatggcgaccgcaatttgtagcgctgcaccgtgtagtccctcgtcgtcctccatatccgatagaagcaaacaccgaagagtgcaaagtatgagatgcacaccaccaaggtttcagtgccacatggtgtgtatgcaccaaaagcattctctacatctgaccacaccccgccattgaccggctggcagtaccattccagtggatcaaaacccatgtcaaaccgtccccttagcaaccctcactcagttttgatcttcccctggattcattgagcaaaccgatgataaattggcaatccaatc

SEQ ID NO: 1341 - DNA, 1259 bp, Oryza sativa
ttgggtggagtatgggtaggaagggtaccttttgtgctggccgctatcgacttgagaagactttataaattggggagatcataagaaagattttttaggatcgtccgcagatacgccttagatcttcaaagatcacagcgaagtattataatgcatcaactgtagagaaagatagcaggaaaaaatattagtagtggtatgatcatagataggtagcccctgatctaggggcaagattccatgtttggtcagtaccattaagcaagccaaccaaaaccatcaatattacacgtttttgaccgtttgttcgtttctgtacgatatccaataactgcacagaataagtactacaggattgagaacatggcggcacaatttgtggtaaaataccaggatagcctaaaatacacttttgcccataccttggtatcttcctggagagtggacacaccatggagcaaatggaacttaggagaggcacctgggcttaacagtgccacgtctccaaccccacagatctaccaaggctactactactactactactaacatcatgctctagctggtacatgcttctactttaagttgcctttaggtagttacttatagtgccacctaagtttgtcaacctaagtgcagacacttttaaagcttgacagttatcataacttcagtttaaacgcaaagcaatgtgacagaaagaaccattggttcaggctctgcgatttcgtgggagagcatatgcatgggcaagtaccgctggtcactgaagttttcaccacctgtgtcagttgatcagcttggagtgaattttttctcaggtttttttacatgtcatgtgccgttggtacctggccctgtcgttgctgtcggtgagggctcgaaatctgctccaaacctgcagcagcagatgcgctagaaagctactactaccactgaattcttactcacagttaagtccactgcaggttcagttcttcggtccctttgaaggtggcggaggcattgctcccagcatgggcgcttcgtttgatgttcggaaaagtgctcgacctggcaaagaaatgctgagtaacaggtttctgaatatggcaagttggagtatatctgtacgaggcacacattaccaaatgtaaagtaattgcgtaatggaacatggaatatcatagccacctttttggcccatagcatgggcgtcagactcctaggatgctctttctccaccacagagaggccactggcgttggcgtcacttgcta

SEQ ID NO: 1342 - DNA, 889 bp, Oryza sativa
aactaatagtctgttctgtgcttgcgatggttcagtgttcttcgaaggtgatgtccgtgatgagctgttgctgatgaccctcacacgattgtgagttcccagaagcttcatccttagctttgtcggagaaagtgcaccagcctacaggaacaacaaagcagccagtaagtctttctccatggaagttctattaattcaaagtactgtatctcaaattaaacttaaaattggtgattgcagaaagaacttgtagaattctttagaagttagaaccgctaacagaaaacacctgtatcctgccaagattttaatcatttctgagaagttagtagaaggttcaatttgttgctacttttactctggtctggaacaacttgtaacttgtaagggtattttttttttcaaaagtgaataattaagtagtcccatttagcatgtattcaacgataaattcttcagaatgaggttttgcactacctaagtgaagagttgttttttttttctgtagaaacaaacttcgttagcttcgctttcagtgagaatgacctaaaatgtactatccttcaatacttttctcattttatacccaagccgtcttatttcaacactatcttcttagaactttaagacaatagtttgaatcgagatacaacattcctaaatggtgtgcagccgaaatgggcatgccgaaatataatttctgaagaaacaaaaaaaaaaaagtgaattagaaatgagtcaagagtgactatatcaagaaaacgaaatctttcacgaaatcaatgggaaatgtcaattaagggatttaagaagagtcacttgtgagtgactaaaatgaagtgtggaggaatcgagcaaccagtaatgaagagctcggctaaaacgaact

SEQ ID NO: 1343 - DNA, 923 bp, Oryza sativa
atatgaggcaggctaaaggacatatcggcaaatcccagttcactgcttccaaatgattcacagtccacattattacgcttgtaagcttcatggagctgcagcacatattccagatgccacaagacctcacccatcgatggcctgcttctcccatcatcagcaaggcacttctccgcaatttcaccaaacttcttcaaggattcagatgaaaagtcaccgtccagccgtggatccactattgcatccagcgaacgctggcgctgccatctcattgcccactctgccaagttgatttgatcctttggtagagtggggtctataactggtctgccacaagcgacttcaaagagcaccactccaaaagaatacacatcagatttttgtgtgagttgctgcctccggaagtactcaggatcaaggtacccaaagcttcccttgactgctgtactaacatgggtctggtccagtgttgggccagttttagacagaccaaaatctgctatctttgcaacaaaattctcatccaacaagatgtttgtagtcttcacatccctatggattatacctcggtctgctccagtgtggaggtagtgaagcccacgagctgcaccaatgcaggcatcaactcgttgcttccatgtcagaggtgggaggtcacttccataaagatggcttcgcaatgtccccttggccatgtattcgtagactagaatcatttccttctgctcttcacagtagccaatcattgcaacaaggtgccggtgcctaagcttggagagcatctcaatttctgtttcaaattctttcaagccctggccacataatggatttgcacgcttgattgccactgtagtaccctcatcgacctcacccttgtaaaccttgccaaaaccaccagtacccaataagcaaagcctcatcaa

SEQ ID NO: 1344 - DNA, 665 bp, Oryza sativa
gtttgcgcttgccgctagccttgcctcttcacacagtgaccttcttgcactggaggctgctgagggaaacaacatcctcaggaaaacaaaggatgcagtaatcactctacagaatgtcctcgaagggaagcacaacaccgaaattgatgatacactcgctcagtatgaggttccatctgataggtggtggtcatcgctatacaaagtcatggaaggtacgttgatcacttcattttaacacctttctcttgtgcgatgcttcagagtagcatgtattgtgtgcaatataagtttattacactagtcccagtgtaaactggctaatattgatccgtcagagattctgatgaaaccaatagttaacagtgagtaccggattggtgcttggtcgatgcaaaagtccatatgttaacatgaagagaactgctgaaatataacgatagggataagattttcttggaccaacaaacatactaacacttgacaaaagcatgtcctccacatgccattgtcatgatctctttagtattcaaatctaaccctatcaatctgaccttttgatcaaatatgtatatctattttttttcaggacttgccatgatgagccgattgggtcgcaaccgtctacagcaaccaagttataattttgaaaacaacagttctat

SEQ ID NO: 1345 - DNA, 1197 bp, Oryza sativa
ctccagattctgccacatcgcaaaccatgaatccaccaacggccgacatgagcgcggcatggcgcggcgagctagaacgcaacgtaccgtacctggaggaggttgttgggagggaagcgagcggcggcgggtgggcgtgcgggcggcggggcgagcggctggatggggcagtggagcgcgacgtgcacggcgagcgacacgaagacggcggcgaggaggcccagctgctgcgccatgccgccgatcgacccaccaatgtgtagccgacgacgagctcgatcgatcgatcacgctatcggcgtcgactcgactcgccctgtagataagctggaggtgtcaggcatggcatacacgtgacgagtgggcacacacctgttatcgttagcccaagccacgtctgttttggacttgcccattattgcaccacataaaaggttctggtccaaacaaataaccgaaatttacttttctgaatacgtaaaaaattggaatccatagataccgtggtttaaacctgtaatgctcccctcgttccatttggaccatttagaagcctcaggtcactcatggattctgtaaaaggcaaaacgcttgtggactagagttaccaatccacttgttgactagccagttaaatgacatagctttatattccattcgtttcaaaatataaggtttctttgattcaaattcataacacaatataaacattactccctccatcccataatataagagattttagagggatgtgatatttttcaagcacttcgagtctgaataggcctgtccagattcgtagtactagaaaaatatcgtatccctctaaaatcccttatattatgaggcggaaggagtactacactaataactcatatggttcccatcatcatgaattccaaagcccagtcggatacttggaaaggtaatctaaacaattcaaaattcaaaaattgacaattgaagtgattaaactactgctaaacaactagaaacaatccttatattttagaatggctagaggaagtaattagtaccacctttgttcctttttacttgtcgttttggacaacacagttttcaatgcacaaaactgatcactactttttctaattatatgtttaaaaaagtattaaaattcatatataaaagtgttttcatgactattctactactaatagtcttttattgtgttaa

SEQ ID NO: 1346 - DNA, 2439 bp, Oryza sativa
  unsure (1)..(2439): unsure at all n locations
gcaactatgtaaattcctcagtacaacctagaccctagaagtgagaatctgtaacggggctataaatagccccctagggccatgtaatacaggggagaaaattcaagaaatcaatatacttcgtttctttccaaccactgttaagtaaccacgtctttcgacgtatgcggttgtcgtttcgataacagctggcgccgaccgtggggacctccgagcgaaaccactgagagcgaatgccaccgaagaaggtcgtgaaggagaaggttacaaggcgaaaggaaagcgacgccggggcggacatggccgccgaagaaggagcggaaccttcggcatcaatcgccgaagtgggaggagccccgtccgcttcggcaccggcaccgtctgcttcggcgctgatcacagcattgctgccttcggcccctgccacctctgagcaggcgccaagggtggatgaagtggcgaaggcggctgcagcggcaagggcgcttcagaccagggcggagatcctttcggcaggacagctgctggtgccccctgccgctccgtcgcagccaacagtggcccaagccgcactccctgccgtgcaagttcaagtcaactccgaccctgaaacacaagccgaagccgatatggaaactattaggcagaacatggcacgactccaagacatgcttcgccaaatgcaagaacagcaacaagcgtacgaggcggcgaggcggtccagggtcccttcggcaccaantcctccaatannttcggcaggggtattgtcnnccgnnnctcaagtctnngtccacaagtnngcagtccctagcnnccgtntccccgncnncgncnnaagtctcacaggcattcggtgcacttcgccgggcagccggcagccgcagcagtgcaccaggccccctatggacaagctcagcagatcgcggcccaagtgtagcctcaaccacttggccaggtgtcgcaaaccgtagcggaaggggcttcggctctgcaggcgcaattccaagctttccttcagcaactcaatcagccccacaacatttcgagtacagctccctcgactcgtccagaggggagtacaggtcaaggtgcacctagttggttgccgccgaaccagccgaatctgggggcttcgccatggagtcagacacctcagtacgacttcgtcaatgccgcccaggcgcaaactgttcggccgcaaggaccgacaccaggctttggaacaagccaagcaccagcccaagtcgccatgacatggtcgcagccagttttcgacccatccatggcgacccagcaagtattaccaatcgcaaccgggcagccgagcaccatggctcaaactcacgcgcaagccgtaatttcacctttcgccacgccgtacccgcagcaaggtgcagcaaacagagcggggggcgagaaggggctgccgctgagtgggggaattaagaaccgcccaattccaccccagttcaaattcccacccgtcccacgctactcgggcgaaactgacccgaaggagttcctatccatctatgagtccgcgatcgaggcggctcatggcgacgaaaataccaaggcaaaggtaattcacctcgctctggacggcatcgcccgttcttggtatttcaatctgccagccaatagcatttactcatgggagcaattgcgcgatgtttttgttcttaactttcgaggcacttatgaggagccgaagacgcagcagcatctgctcggcattcgccaaaggccgggagaatcgataagagaatacatgcgtcgcttctcgcaagcccggtgtcaagttcaagacataactgaggcgttagtcataaatgctgcttcggccggtttgctcgaaggcgaactcacaaggaaaatcgccaataaggaaccacaaacacttgagcatttgcttcgcatcattgacggttttgcaaggggtgaagaggattccaagcgacggcaagccatacaagctgagtacgataaagcttctattgccgccgcccaagctcaagcacaagttcaagttgccgaaccacctcccctcgcggttcgtcagcctcaaacggcgatccaagggcagccgccaagacaaggtcaagctcccataacctggaaaaagttcaggaccgaccgcgcgggcaaggctgtgatggccgtcgaagaagtgcaagccctccgcaaggagttcgacgcccagcaagcaagcaaccatcagccggtccgtaagaaggtccgaaaagacctttactgcgctttccatggacgctcttcgcataccacagagcaatgccgaaacatcaggcaacgtggcaacacgcaagatactagaccacagcaaggagcaaccgtcgaagcacctcgtgaagcagcccaagaacaacccccggtcgaacaacgtcaagatgcacagcgaagagtaatccaagtgat

SEQ ID NO: 1347 - DNA, 701 bp, Oryza sativa
gaaaatgtcgaacaccatcggcaggatggtgagccagtaagcctggtcgcgtgtgcacaaggacgaaagtcctagcggtgctctcgcagcgacggcctcttctgtgtacggctcccagatgacgtcgctcggctggagacggtcaaactcgaacacgaagtccgggtaaccacgtctcacctggatgtgagcgtaacgacgctgcaataaacatgatcggaattagacatgttatgtgaagaaaaaaaaagacgactgataaacttataacgcagcgaagttgcactaaccccacgtcgacaccagtaagtccccatcgtgggaccgtcctctggccactgcgcgctgcgaccaaccccgtagggtgcgctgtccaccactggtcgacctatggcaaacctctcggctgcccaaagctgaagcaacatagggcagccagcgatgatcgctcccgcgtcagtcttcgtgcacgcctcacagagggcacggtacgtggctgctagcacggcagaaccccagctccactgcggcacgtcctgtggctgagcatccgcgatggaccgtgcgtagtggaccagccggaagtccacagcgtgcccgtgggtgctagtgaacatcacccacccgaacgaccacaacaggtacgcctcaagggagcgtcggaccgagtaatcatcagcgtcagggtgcagaaggtccgc

SEQ ID NO: 1348 - DNA, 716 bp, Oryza sativa
caagagtacaaacaaacaaaagtgtttagtccgaacactcatcacgataacattatgatacaacaccgaatagttcgcaatactactagtacaacaatagtcggaggtactcattacaacaacattgaattgaaattacacgatagaagtatttagtccgaacactcattacatcacaacagcattttatttcctaaatcgaaagcattgttacaccatggaatcgcctgctgcgcgacgacgccttggccttgcgcgcctgcttgttgttccttcaccaggtggtcgcctaccatcacttgcctgtccagatggactagcatctgcgccgcttggaacttatgcattcttcgggcatttcttgtaagtatggccgcgcagatcacacttgctgcagcgtaaagtcctcccacctgcttctgactcatccatatcatttctgatgcgtctagtttggcgtcgaccctttttcacccttaacttagatggatctggaatataaaaaacttgggcactcagcgttgtgtaagatcctgagatcccgaacccatatatctcctcactccatgtatgaaagattgcttctttcctgaaataatttgagacgtacacattgggagatatgccacaatcaccggcagcagcaagaacgtgtgagcaaggaaggtgatgaagcttcggcttcatacaactgcaggtacatccaccatccgcct

SEQ ID NO: 1349 - DNA, 703 bp, Oryza sativa
cactcttgtgaacatgagttcaaacagatggctagccatccgtctggaaacattgggtggcatcatgatatggttcacagcaacatttgctgtcatgcaaaaccaacgagcagaaaatcaaaaggcttttgcctccacaatgggtcttcttcttacttacaccctcaatatcaccaatttgctcacggctgttcttcgtcttgctagtctggctgaaaacagtttaaatgctgttgagcgggtaggaacatacattgagttgccttctgaggctcctcctgtcattgaggatagcaggccacctcctggttggccatcatctggtgttgtcaagtttgaagacgtcgtgcttcggtaccgaccagaacttcctcctgttcttcatggcatatctttcatcattaatggcagcgaaaaggtaggaatagttggcagaacaggagctggtaaatctagcatgctgaatgctctgttccgtattgtggaactggaacgagggagaatattggttgatgattgtgacacttctaaatttggaatttgggacctacgaaaagtactaggaataataccacaggcacctgtcctattttcaggtttgttgtgaaaatacatgatatatcttctcgtttgcttttcttacatcataaatgttttttttggtactattgtccaggttctgttcgatttgggctgcaggaat

SEQ ID NO: 1350 - DNA, 503 bp, Oryza sativa
cctgatccctgaagccctgttgcagagtagatttggagctgtaggcttttccagcaggtgttaattcctggagacatgtaaattgtcaccagcacattggcgtgcatgtcgtaagtagatttaccgtcctgactccctccctaaaggtgaataacaggggagtttttctgttcttttttgcaacagcatgaccatattcttgttgtactgccgtcctcaaggacatcgtctgttgtgcaaaatcttattagcattgtacctgaaaattgaaattttgatggtcttgtgccaatgctagtgttctcttcaaaaatccagtgaatgtgtcaattaattaatcttttaacttctggtcagcatgtatccatgtggagttgtcttcttccactgctaaacatttactgcctcttctcctgacttactccctccatcttaaaaaaacaatctaaatgatgacataatacaatatagtacaacgaatatgaatggtcctatccagatcc

SEQ ID NO: 1351 - DNA, 512 bp, Oryza sativa
aaaaaggcacggagacatcgagttgttgctcaaggcacacaagtgcatcggtatgaaataatgtgtgttgataggagcaggcgtggtatctatcgcaagcaagccgtgcaggaatgtgtcttgaaggcggatggtggatgtacctgcagttgtatgaagccgaagcttcatcaccttccttgctcacacgttcttgctgctgccggtgattgtggcatatctcccaatgtgtacgtctcaaattatttcaggaaagaagcaatctttcatacatggagtgaggagatatatgggttcgggatctcaggatcttacacaacgctgagtgcccaagttttttatattccagatccatctaagttaagggtgaaaaagggtcgacgccaaactagacgcatcagaaatgatatggatgagtcagaagcaggtgggaggactttacgctgcagcaagtgtgatctgcgcggccatacttacaagaaatgcccgaagaatgcagaagttccaagcgg

SEQ ID NO: 1352 - DNA, 797 bp, Oryza sativa
cccccttgccgccctccgcgaccccccttctgtgctgcgggggggccgcctgcaaatgggcggcgagggggcatggaattttgcaggcggcccccttgctgccctgggggagggcgatttttgcctctccccctataaagcccagtccctcctctgtgaaatttcattatattcactaaaaatccaaaaaaaacaaaagagagagaggggaaggcagcagaaggggagcggcgaagccctgctggttcgctcaattcatcacaggtatgctcccatacatcttttgtgcatttgtactaatatgttatgtttgagtatatatgttgcgttttagttttagttccatatattttagcacatctgtagcacacagcacatatgtgtagatccagagcatagaatataatagtatgaattgagacatagacagtagtgttaattgtaagatgtagtttagtttgatctggagaatgtaacgtaattttagaaatttagagaacaatattgtagagaatgtaacttagggcgtagtacagaaatgcgaggttaacgcagttattgttttcatcaggcacaatgtcaagtaaggtcacatttcagatagttcacggtgaaggaaatattagatttggtccagatggtgttgatctgtcagattttgtaatgacatctaagggcatcgataggcctgcggagagaacatttcagtcaatttatagttggttgttgagaggatttagaatagaccaagaagtctacacaatgtcagtgtcagttgtagtgagtcgtgcaacaga

SEQ ID NO: 1353 - DNA, 827 bp, Oryza sativa
tatagttaagatcattaagcaaataattctttgagagttatctcttcttgatttggtagggtgtatagcattgactttattatgatctccacaaataaattattttaacaatcggtaaacatatagatagtcatgtagatatgaatatattattgagggtgtacaatcatctatataataaagtttgattaatcacttggcagtaacttttcatagcaacaagtgtgtaccttcaattacactattaaaagggacactcacttgtaatttatggttgtcccccacaataagaggttggtgatttactcccaggtagaatatgcactcacgacagttagcaatacaaatccatttagcagctgcaataatatgaactctttcacaatgctccaccttaacaacctgacaacacaaaacatataaagtataattgtcaaatgtacttagcactttagcagaacagaggtaataacagcaaatttgaagtgacaataaaaaagtgtttcttattttccacttggggccctttattctttgttaatgtacagcctatcttatattatgtttaacagtccaactcaacgcatgattaaatctatttgataggaattttccaggaaaagactgtaaaagagtagcaactagcatgtcagtttttggttcacacaacaatgtgtgacatctttcactgtctattgttattattatcatcacctcctcttctatttggacaaaatactcagcactcatgtaccattcaggtgataccaaggcatacacaattgaagtctcaaacagatccggtgcagctaaaatagtctggtggc

SEQ ID NO: 1354 - DNA, 695 bp, Oryza sativa
gatcagatcgatcccctttctactttacagtccttttccccgccttgcttccgcttcacacgattgccaccgccgcctgctttctcgacgtcttcgcatgtgggagccgccgctcctaatgcgccatcctccaggaatcattgcctggctccctcgacaccccaacatccaggagctcgccgttgagggccgccacgtcctcatggcctccgccccatcggaggcggagccctgccgccgcctcctcgccggaggcccaccgaaccccctccacctcctcacgaaccaaccgccgcctacgacctgtcccatctatggggagatgaattaaacccgcctccgtgaaatcaggtcagatatcaccaattgctccgtgacttgttcgattgcttgtagtaactctttcgtgtatttatggggttaattttattcgattttgagttcaaatcgaatccgcatccaacttcctttcctgttgaatctggtatcctccctgcctgtctttgttcaattttgtttttgtttgcctctattaaaaatcgatttgttcaattttgttttttttttggattatttgtatttgatgcggactcctacaagtcgtgcagaaagcatgcgcactgaatcggtcaaaattttggaggacggacgaaaatttctgtgtgacgaacgggaaaatttgttatttacgcgaa

SEQ ID NO: 1355 - DNA, 25720 bp, Oryza sativa
tgcttcctccggtggcagaagcggccgctcatgtcggtgtcgtcgtggcagccgcagccatagcaatggccaagctcccaagtgatcacccatggtgttcgacggttcgacctcgagagctccatcaatggcgtctagcttgctctcaagctaaaggtaccccactccatccatcgttcgcattggcaaaaaaaagattggatcttacgaaggatgaactgatcatagtctcagtgcttcatgtatcgatgatctagcattctagctagggatcaagcaatgatcctagctagctaagctaagctacctgccatttttcatggcaactcgagcttggatttgtgatggacacgttgcatgagaaggcgccattgttgggagaagaaaaagaggatcttttgggcattcaacttggtgagccagcttccttctaccactagctctagcaccaaattcttttcattttttttttgcttggcaaatcttgatttttttttcctttagttactcctacttttgtttagctttgatacccaaatctgatattggtggagttgttatagattgttggttttgacactactactactacataatatctagatttctagatctgtgttaattactatgttaaaagggtttgtgcatgcatgcacgctcttgcaaaattaggtcatgttgcatatacaattggtttctttgatctcaaataatgaagatgatctccctattgtggctcaatggattgggctcatttttaaattttatccttgcatttcacttcctctctctgctgtttgatgcgcttgtttgtattataactaatcatgctttggccaccactagctataaactaatgcaatttggttggtctttgttttacttaggggggtaatgaacaatgatcactcttgtgtgctgcgaaaggccagtgcattcttgcacactgtagctagtaattaattactatatttataccactcttgtgtagctaagctagctagtataattctcaaatgtgtgctagctaagctatagctgctgcattaagagaacaaaaaatagtagaatcatgtctcctgctgcctaattaaggagaattttattgtgttcttgtcctgtgtcagtgtgtctatgccccagatatgctgggaagctgtccttgggagagcatggaggaaatggcatgatcccatgcatcaatggcaaccctaattcctgccccctgtcccctctaacaaaatcatgggatttctcaagcccaagtacccccttttggtggcacaccctgcaatccttaaatctctcacttagcttgttctctgctgcctctcatctctctgaagatgaccattatttatttttactccattttggatatatgaatctctctctctctctctctctcacacacacggaccatttttactccatttttactccattttggatatatgattcctctatcttttttttttgaagactttgatttctctatcttgattttgcattgggatctttgaatgcatgaattcttaatttgttggttgaactgcattccatatttaacacatacataggatttgttaatggttccttcattcttcttgcattacggccgctttgtttaattgcatactagttggatcaaaggaagagcgaaaagacagtgccattcatggaaagttctttaggttgaccacttatagtctaccagtcgtaccaacctttctcccaaagttgttcttattaggagtagtatttagagaaacaaagttaactacaaatcgaagcactttttttttgtgtaaatctgaagttatcctagctcacacttcaatttaattattgtgccccattaaattcattgtttctgcatatataccattttatggctaggaacttaataacagtaataatttattagacatgtccttaccaaatggagttcagacttcaaactaaggaaatgattttattcatgtgtgtcttggttcttgaatttatagcacataaatagcatgactctcagtaataaatcatctgcttagatatcataaattgcatatcgaaagcacggaccatcttttatccatgctcaataaataaatagcggagaaaggatcaacattattgattgcattctttcgtcagtatcacttttagttgattttagcacatcagcaggcagcagcatagctgtacatttttacctaaccataactgactaactactaagtatttgctgacaatattatatgaaaaaggctttttgctgatgatgactatctaaatttaatttgtgaatatctttgtgtgattcctagctatatatatgtgtgtttctttaaattttgttgattttgtgatcaatgcatacgtcatctgtagtcattggatatatatatcacatctacaacctctagaaaaaaaaatctgattttgacttttcaaaatcaatatatcggacctattttgatcactcaactgtgtatcatgatatgtatattatatattcaaaaatatgtataaacatgtaatattattataaacatatatatgaacaaaaaaaattttaattactcgtgtatcgttccatatgtccaaaaatatatacactttagaatatttttttttgtcaaagttactccctccattccaaattgatctacatatttcataagtacaccaagattaagaaaaactaataattatctcatattatatttactctagcaacaaactcgatgcatgcaccatccccgctatttcctagccaatagcaaattaagatattgcatgtgggttataaatacttgtgtgcatggatgtatgcatcaatgtctatttactccaatgcataatccaatgcataaatagcaaatagacttaatgaatgaacataaatatgtagattatttaggaataacctaaaaaaactatatgtagatcaatttcgaacggagggagtaattaatatctattgattgcacaagttctaaaattaattactgacgtatatattttgtggccaaagggatgtgacattgttctagggctaattattatctcatatattcttccggagattttgcagaatttttcatacgcaagcttgattttctcctaaacaatttaacgtatagtttggttaattagagcagaaaaacgcatgcaaaatctccaaaaaggccaaaggcaaagtactgtttgacccaaaagatttgccctagtataaactaaattaaccgaatatgacataagtcaatgataggatcatgacatatttggtggcatccatccattttctttaaccattcttgacacatacgtgtacacacagttgccaacagcaatgcaagcatcatgcacacgtaacatcacatcggccagctagcataagctagcacaaattaaaggcagatttcttactgaacgagcaaaaacacacatgcaattactacgttttctttctcaaaacacataacctactgtatagcacttttcgaaagatcgacatataaaattgacaaaggtaccacgtaccactaaaaagaattattagttgcagtaatatgtagggcttgatcgaacacctcgggtgagtaggtttaactgagtgtatttagttatcataatttttctacctttttctacacatatttttgtaccttttgttttcatacttactcctattttgcaggtatatatttttataaaattaatggctgttgatagtacctttttttttcaaaatcaaacataaattctttagttgttatcaagcagagtagctgtatttaattggttcaaacagtcgtgcagcacaccatacgaaccacagattggtcatatagagtctggctatcaaatggtgcttatatatatagttagttaactggaaacatacatgactagtatatatgtatctttttgtagggttcttaattaataagcttggtcgctactagctagatactgtttctaattaaagaatacaattttcgtagagacaaattaataaaagtgttagagcccagaggtcggatccacattatccaatatacatatcttgtatactaaagcttttatggtagagcatgatcaatcttccttatcatgcatactctaacaaggaggcagctagaaagttaattaattaagcatatgaaaacaaaaccatctcctaattaagcttctgaatactgaatcatctatctcttaattaagattgaaattaaacttagtcatgtgacagacaattcgtgcgtgcaaaggtttccgaacaaattaaacccaagaggagatcgtccgtgcatgcatgtatgtgctatatgcttggacggaagagattaaacaagtggattttaatttgtagagaaatcaattaatttttctgtcttggctagttgtaaaacttctttctttgaggttgtttaggttcatcatcagagctttcctcagaacttcgccataaagttgtagaactaacgccatagagttatatccaatttaatttgcattaattgtactataacacagaagagtacatgtatgccaaaaatatgatatgtgtccaattccataagtttgcatgcatgtacaattttaataattaactccattttgtacagctcatcagcaaactccatacacgtggcacgtagcgattggtctaacggtgtcgcgcaaggtagcttacctactcagctagcaacacgtctccatgccgccggctcgccacgccggccgccgtgggcaccggccgccggcggctcgggcttccgtatacgataatatctacggccgtgggccttgcggcgtcggcgatggcgccggcgggtgcccgtcctctccgcccgacgtcgtcgccacgatctcctccaggtccggcagccgccgccgccgcggagctcccctcgtggtggtggtgaccgtgatggtggtggccgtgatggtggtggtggtggtcgacgtcgccgccggcgtcgtccgcggcgtcgtcggcgccgcgggtgctgtggcgtcgcttcatgagaaaggggatgcggaggtgggagtgcggcggcggcgccgccttcttcttcctcacgtccgtcgcccagctgtgcaccgacacgtgcaccgtctcgccgaacgcctgcagcttgatgtccccgcccatctgagcagcggcgagcgtgacgtcagccccacgtcatcggagtcacagttaaagcataatatacttaatttttttattatactccctctatttcatattgtaagttgtttgatttttttttatcaaacttttttaaatttgactaagcttgaccaagttttttaaaaaaaacgtatttaatttttttataaacttaatctaacttaataaagtttaacttaaaaaaaagtcaaaatgatataatatgtaatggaaggatcggagtagtagcaaagagtaattgtatgttaattacgtgggtaacgatggcgtatagcggcagcgtgctgtagctgcagagcacctggacgatgattctgcaaaagttcatgacagaaacatcacattactgttcagttcaattcaattcagtgcagaaatatgtactaaaatttttttttagagaaggtaatacagaaatatttgaattttttttaagattccaattaaagaaaagcaatcaatttctagcagaaatcagatgtaaagctcagacttttagtactgacccaatagcaagtctggggagggcataaatcttgttctccatgatgcatgaatcaaacccatatgttgcctgcaattgaaatttaccagcttgtttaattagcaccatagttttatactaattaaaattgcagaaacccatatgaagacataagagtactttctgcaagataaattaaaagtgcaggaaaaaaaagaatgtaatgctgtaaaacagaccagaacccagaagaaaaaacccatctcaaaggagttctggaacaggatgaagtggatcaaatggaggacaatcctaggcttgctgaaccagaagtgctccttgcatggctttgtccaggggtttcctgttgcttcatctgggcagtctgctgcctcttgtgccagcctagtgcttatgagctccagctttgtgccaacaatgagtaggagctgcagatgtgccccaaaagttggaattcctcaatcattaaaactgaaaagagtgtgctcactgttgacatatatgttgagttgtttgaagttcatacttacaattaagggcaagaaagacagccagaagtatgtgtgccaccctgcattggatgcaaatgaaaagtttaggggatagccacctgaatagatgatggaaactggatagtttcattcaatgacaaaagacaatcctagttcaggcattcaacagtctgatgcagatcaattgttgttgtgatccatgacttgttctgaatgagtgaaaatggatcatgttcgtcaactggaaatgctgtggttaaagtctaaattgtggtactagaaatagaataagtcgtatggtaacttaagtggatatctcccagcaaaaaaaaaagaaaaaaaagaaagaaaagaaaatttaagtagatatcagtgtgatggaattcagttatccaaacaattacatgagggcacttgtttttaggtttatgggagttaccatttatattcagtagcaggaagacaataacgaaaagccataggtaccagctgcatgtaattgcatagcattagatacagtaaagatgatgtagtttttaatcaagtaaagttagtattttaaccaagatactaacctgattccaactacttctttaaaatcatgctcaagagcacgaaccatgtacttgtggaaatcaaaatcaggacggtttgggtagtgcctctggggaaaaaattatgtcctattagcttcaaaaatagtacaatgacacttatgattgagctgaagttactcagagatgcatctgacctgaacaaaagctgatctaagtacttgataatcaggtttaccaacagaatcataaaactgcttcaagaatgagatctgaaatcatgtatgaacaaaatcggctgtattagaatatagctaaagtaagttgaaatttgtatttgagacacagaatttctgcaataactatgcagacagtatgcattgtcctagtacaagacacatcagtgtttcgtcatgatattgccatgttgcagggagacacctcaaataagaaaaaaaagtaatacagtactgctgcagtttgtacccatgctattcatatctttgatgtcaatagcttttccgtaccttaattaaccttatctgacaatggaccatctacaggtattctattcctttatcacaatggagcttgcgtgtgtcctgatcacacatttggactttatgaattatgacaacttactcgcgagggctctacttttatattttgctggttatcgacatatttaattcctaacttacatgatcttatatagtaaaattttatttttgagttctagttctgactcttgagtgtttgattttttttttaaaaatattttttgtaaaattcactagaggtggatgtctttttttacatgataagtggatgccacaataaacgaatcaccgttaggtgttctaggaaagcatatgattacttatcaattcaaggtaacatttaaccaacactactctaaagagtagtatgattttctggccggggtgcggttgaaatccgaattgatcattggtggaacagcgaggcaagaacagaataaacagagaacctattttagtcttgttgtcatcctcctttgtaaattgtaactgacgatttaataatggagttacaaatagtaattgataagcataataggtggcccgggttacttacggcacatcttacaacaatgaatttcatccagcctggcctctttggtcgctccttggttcttccttgttgaatttctttctcccatttctcccattttttcatctgcagaatttaccatagatgagttgattttactgatgcaccgtgaggagcacatatttatccatacaaatagttttaccttggctccaccaagtaacaatgttgtaacacaaaatacaacatggacaataccaaggacaaagataaagatgtgcagctgatgcaaagcctcttcagatagcataggaacttcaccctacagaagcataagaatgtgatttcggaacgaccaatctggtaaaaaattcatgaagataacagtttcttgtttgttctactcttcaagaaagaaaagatacccacaagaaacaaattctttagtgaaaaataacaaagctaaacaatccagagtggacacttcgtggtggagtttatcaaaaattcccaaaagtttaagaaaatctctccatagttcacatcctacctttcgcttgcaaagtttggaagcatcttctgtggtctcggacgtctctctagtaatgcatggaagcatgagatgtgcagcactctccgggatgcaaatgtgattgataaatttttggaagacgctaagcaggaaggaaatgaaacccagaagcatcaactctgcacaagtaatcaacaagctggatcaggcagtgaacaaatggcacaaattattgtggcataagtaaactggtatgaaatgttctggccatcgtgtcatgaagcattttattttatcatttggtgacgataagatcatcttttcaggttctgctggcagtaatatgtgaaagaaacagagtgaaaattgtcctttgtatccaagaaataaattgttgtacaggcagcaatctaacattctaactataagaacttggatgatattaccttctttgactctctgaagagcagaaaacagtgcttcttgcccattgaattttagcacctgatgaacaaggatacaacaattagtaaaaaaggcaaacttgttttgagcgaagttattgctgtaaaagaaagtgatggctcaatatactgcaggaatttgcaaggctaaatctctgcttcctacagagtaaacttcaatttcgagctgtctaacatctgaatctaacctctctctctctctctttttcaatcctacagttgtatcgcccgagttcatcatgagtaaagccatacgagaaacagtgcagtgcagtgggaagtgaagcagcaagcttgaacaacaattccaggtcactgacagatactccctctgtattctaatgtatgacaccgttgactttttgactaacgtttgactattcgttttattcaaaattttcgtacaaatatgaaagtatttatatcatgcttaaaaaaacatttgatgatgaatcgagttacaataaaataaatgataattgtataaatttttttaataagacgaatggtcaaacgttggataaaaagtcaatggcgtcatacattaaaatgtggagggagtagttaccagcaaattccatggtatatactatactatcaatttgaatgagcaggtgatgttcttcatcgaatctgaatgcttagtaccagaggattttaactaagaacaactggaaacactactgatttgagccgcaaagataaaaggggaggtaattaattgaagcaaattaagattggcttgccttgccgaggcggtggaggaggcgctcggcggcgagcgagatggcgacgatgatgaagcagactccggccaccacccatgtcggcgtcagcgccagcgactgctcctcccctccctcccccgcccccatctccgatctccctcctcctcctccgacgaggcgatgcgcgcgcgcgctacccgcaccatgcggctgccgttaaaagggccggggggcgcgcgcgcgcgcgcacgacagcgagcgccatggatggcgccaaaaaggcagcctcgctttcgaactcgttttttgtggcttctgtgctcttgcgtgctactccctccgttcaaataagatggacggtcacgttgtacacggagactcggttttttttttattattattattattattattattattattattatggagggaggactcgtgtactagtgtactagtactactgtggtggcgctcgcggcgacgtgaggcggcagaaaccggcagggcgtcagccacactgtggagtgtggatgttgatgcgtgcatgtttgaatgctcttttcaacaccaaataaaaagaaagaaaagaaagagagaaaaatgtatggatgctgctgctgtgtggtgaaaatgggactgactgacctcatctgctgatatttcatctgaggctgagctactgaattatttatctattgaaacaaaaaaataaactactacatacatcccaaaatataacaaacaatgcaatacagaatgtgatacatcatattactacgaatctgagcatatctcatatcaagaatcatcgtactagaaaatttctatattgtactatgttgacggatgcatactgaatcattcatatatgtagtgtgtatatcttagttgtgttggacttattcatggataattcttctgaggaaatgagattgaactagtgacttaattacttcttcaatttcatattatataacgtattgttttctccgtccatggtctagattcactaatatacatataggtttaaaaacatttataacacatatgtagattcatccctcgtatagattcgctaccatacaaaggccactctccagccacttggtttatcatgtcatggcctgagcagtaaacttaaatgggcagattatcgagaatatcaagtcgatcctcttctaggaggacagatggctacaggattcgagccttcgctcttaggcacctgagctttatgatcgcgtcccggtgcgtgtccgccgaaagctcttggtcgctgatgcgttggccaacaaccgttggatccgcgatctccatggctccttgggagtccaggcaatgctgcaatacttgcagatttggtcgttgttgcagacaacaactctctcaaaggaccatcctgattctttcatctagaggtgggagagttcggggtcgtactctacccggtcggcttaccttgccctcttcccaggcaggatctcattttagcacctaccaatctggcgcttttttgcccctctcagtgtcgctacttcctatggtttgtcgctcaacggagctgctggacggctgaccggttagagaagcgtagtctgtcgcacccaacctattgtgtcttctatgaccaactggaagaaacaatcgattacattctgattaggtgcgctgagtccctccagctgtggtggactatcttttcgagccttggccttcttcaatgcttcccctctgacgctgattccttccatgagtggcactgctctttccggctcaaaattctgagggagcgtcgtcgtgggttcgacactattgtgactcttggtgcctggtccatttggaaggaaagaaacaaccgttctcgatcctagcctgaggttgtcgcagccatgtcgcaagagacagcgctttggcttcttgcccatcccccatcgccaacactttctagttagcgtgtttggtcgttcggccgtcacattgtaatcacgagaatagacttaagtctttgctttcctttttttcctttccaccccctcccccctccccccctcttctttgtttgccgtttatgtaacttttatttctcttaatgcaaaagtgtacaatgctcttttatgtattccaaaaaaaaaagtaatcgagaatattctataacctttcaaagagcagtagcgatggttatgacttttttacagccactgctttactagctttcctatggccgttgttatgtcctacactcctacatccccgattccccgtcgtagttagtcgagcagggtccaaatggtgggttttggttttgataaaaacgatcaaccatccatatcatggataacgacaatatcatttaccgttaaagaaaaaatgacaataccatttaacatatactggtataattagctactttctttacatagataatactcgtcgtttggaattggctaatgtcaaactttggcctagattagctcccaactttttcttcaaacttccaactttttcatcacatcaaaacttttctacacacataaacttcgaacttttccatcatatcgttccaattttaatcaaacttccaatttaatttggcgtgaaataaacacacccttttaaactttttaactataaatattttaaaattatttgttttaaaatatgaagactatatgtatatattagtcttaaaaagtacatcaatgaaattatattattacaatatttctatttatattatgatggaggaaagtggtcaaaattgtttttcgagaccgtttacttatctaaaacaataagtattatgaacttggtgggtgtgagcttattttcttatatagctcttgttcaagttcagaaatcttttttaaaagaaaatatagtgggtaaaaaaaatgatgattgtcagggttacgggttaggcataccctttacccttcgatatatgttacatatcagtatggtatacccacgcgcatacagatacttcttgtatattctatggaaatccttcacggaatctacggatgggaagaatcctactcggacaagattgggtcgttgacgtatcgaatagggtctgatatctccaagttctacttggagacctccagatctgtgatataaaagggaccccccggtgagggcttaaaggatcgaatctcagagccgacacaacccacgtagcctacgaagccggagcctgcaaggagccaagccatcgagatctagtcgaatcaactcgactacgatttcgccggattcgacaagttccattgttccctttgtaacatgtgttttccaccatataatcccacatcaactggattagggctattacctatcaaggggcctgaaccagtataattcttgtcttttgttcgcttgatgtcgtactacgtagatccttgtaccaacgtaccccaataccctctatatccggtctacgggcatcacctatcgacagtggcgcgccaggtaggggcacttggtactcaaggttctactactatgtcatccagcttcgtcgacaacggcgtcaacaccaacctcagccaagtacaccctgctttaacgatgctggtatggactcaagtcagcgaaatcgtcttcccggtttacaccacaacgccgatctcaaccggtcccccaatgaccggaaacgagaacgcagtgtctacaaaccaagacgacttcatgtcgaaaaatcctcccgctgagacggagaacggagcatcgacgacatccgagctcgagaaggattctgatgcggccaaaccttgttcttccgacatgaatcgcgagctgacaaagatgacttccgaagccacaaggtcctggtgtcctatccacaaaaccaggaaacacactttgtaagcctgctaggttttcctcaacgtccgcgctgaaattcgcgcctgcaaagagcgtggaattcagcgtgtttctccaactcgtgatgtctattgtcctattcacaagacaaagaatcacgacctctcaagctgcaaggtctttcttggcgccatgaaagctccgtctccgaagtcatacgtccccatcagggataacgacaaggaacaaggagcgacttcaacttcagatcgatttgttggggtaatcgatatcgatcctcacgaatcatcagtcttacaccttctcgaagactatgggtcatcgataacgagtgcgccgcgggaggtattggctatcgatgacgttggcacgtcagcgcatgccaacgcagaagcgggaggacaattgactactccagcccagcacattagggccgttcaagctatactgagggaaactccctacgatcccgttctgaacgatgacctcgagcgttggacagaatgactacgggaatcagtgaccaacctcagcaacgcgtttgaagaagccgctaccgcagcgcactcggagcagccaccaactggcgatgtcaatggtgaagacccagaacgaagggaatcaccccaacgagctacccctccacctcgcggcactggcgatctccgagatcacatcaacggccgccgagaggcacgacgtacacaagacaatgtgaatcgttctcggcgtcatgtctcttcacggcgccatgataacggaaatcaaagagaccgctcaaacgaggaccgagaccaggacaaccaccacgatcacaacgatcgcgaacgacgggtgccagacaatacaggtcgaggccatcgccataacgaagacgatgacagagatcggcgccgagacaacagtgggagacgacgacaggattcccgagatccaggccgacatcctcgtaatcgtacgccggaaccaagcgacccgtcgtcatcgtcatcatcctcgtcctcctcatcatcagacagacatccacgaaggacacacgaccgccgacaacccaccgcccccaacgctgggtgtagggctttcggtcgttccctgcgtgatgtccgatggcctgagagattccaacctggagcaatagaaaagtatgatgggagcaccggcccagaggagttccttcaagtctactccacagtactctacgctgccggagcagacgacaacgcgttggcaaattatttaccaactgcgttgaaaggttttgcacgttcatggctgatgcatcttcctccctactcaatctcttcgtgggcagacctatggcaacagttcgtcgccaatttccaaggaacatacaagcgccacgcgatcgaagacgacttacacgtgttgactcagaactcgggtgaatcactgagggaatatgttcggcgcttcaacgagtgcagaaatacaatccccgaaatcaccgacacttctgtaattcgcgccttcaaatccggtgtcagagatcgctacactacacaggagttggcgacaagacgcatcacaaccactcggagattgttcgagattgttgagcgatgcgcccacgcagatgatgcgctaagacgcaagaacgataagccgaagaccgggggagacaagaaaccagccacggacgcatctgagtcaagcaaaaagaaaaatcgcaaaaatgggaaaaggaaagctcaagtggaagttcttgcagcagaatacgtgaaccctcccaagcgcccagacccacaaagtagcaacacaaagaaagcatggtgccccattcacaagacggacaaacattctctggaagattgccttgttttcaaaaaatcgctcgagaagcacatcgcatttgaaaaaggcaagcgagtacgcgtggtcgagaagaacgaggaggaggttcctcacgaatcggatccagcgtatccagactccgacctccacgtttcacacatcttcggcggttccacaacgtactcctcaaagcgagaatacaagaaagtggaacgtgacgtctgttcgacatggcagcgggctgcacccaagatgaagtggtctgagcagaagatagagttctcggaagaagaccaccccaagaccgccgtcatcccaggacgatatccgatcgtggtcgaacccactattcggaacatcaaggtagcgcgagtcctcatcgacggtggcagctcaatcaatcttcctttcgccagcactttggacgcaatgggaattccgtaaagcgagttgacaccaaccgatcaacccttccacggaattactccccaaaaccattgggcaagattacgttgcccgtgactttcggccaagccaacaacttccaaatagagcagatcacctttgatgtcgctgaattcgacacagcttacaacgccatcatcgggagaactgcacttgcgaagttcatggccgcatctcactacgcgtatcaagtgctcaagatgccgggaccgaagggaacaatcactattcaagggaacgcaaagctggcagtgcagtgtgacaagcggagcctcgacatggtcgagcaaacgcccagcccacccgccatgactgagccacccaagaaagtgagcaagacaaacaagacgccgaaaccggacggcaccatcaagatcgttccactctccagtgccaaccctgacaagaccgtcaagatcggggcgacactaaacgagaaataggaactcgcgctcatcaccttcctccccgataatgctgacgtgttcgcttggcagccgtccgacatgccgggggtccccagggaggtgattgagcacaaactcatggtgcgacccgatgccaagccagtaaagcaaagactgcggagatttgcaccagaccgaaaacaagccatacgagaagagctcgacaaacttctcaaagctggcttcatcagagaagtacttcatccagagtggctagccaatctagtcatggtgcggaaggccaacggaaaatggagaatgtgtgttgacttcaccgacctcaataaggcatgccccaaggatcacttccctctccctcgaatagatcaactggtggattcaacagccggttgcgagttgttgagcttccttgacgcttactctggctaccaccaaatcagcatggcaaaagaggacgaagagaagacagcattcatcacaccgttcagggtattttgctacgttaagatgccgttcggactaataaccgcagggaatatcttccagcgcacggtccagggcgcacttagcgaccagcttggcaacaatgtcgaggcatacgtcgacgacatcgttgtcaaaaccaagacaggcgactcattgattgccgatctgcggcaaacgttcgacaacctccgacgatatcgcctcatgctcaatccagagaagtgcatgttcggagtaccgttgggcaagctgctcggattcctcgtttctagcaaaggaatagaagcaaaccccgagaagatcaaggcaatcaagaacatgaagtcgcccacaagactcaaggaggtacaaaagctaaccggatgcatgacggcactgagcaggttcatcgctaggatgggagaacgaggacaacctttcttcgctctgctaaagaaacaagacaaatttgtatggacacaggaagccgaagaggcatttgttgcactcaagcgctacctatcaaacccccctgtacttgttgctccccaacctaatgaagaattattcctctatattgccaccacaccgtattccgttagcaccgtcattgttgtcgagagagagaaagtacaacgaccagtctattacgtcagcgaagctctccacgacgcaaagacaagatacccacagatccaaaagctactttacgcggtcatcatgacatcaaggaagctacgccactactttcaagctcacagagtcacagttgtctcctctttccctcttggcgaagttgtgagaaacaaagatgttgtcggccgcattgcgaaatgggtagtcgagctgagccagtttgatgtccactttgtgccacgaacagccatcaagtcccaggtactcgccgatttcgttgccgattggactatgccggataacaaatcagacaaccaagttgataacgaaacatggacaatgacgttcgatggcgcactcaacagccaaggagcaggggtaggatttatcttgacgtctccctccggagatcaattcaagcatgcaatccacctcaacttcagggcgaccaataacacagcagaatacgaaggactacttgccgggataagagctgcagctgcacttggagtcaagcgactaatcgtcaaaggggactccgagctagtcgcgaaccaggtgcacaaagattataaatgctctaaccccgagttatccaagtatcttgcagaagtaaggaaactagagaaaaggttcgatgggatcgaggtccgacacgtctaccgcaaggacaacattgagccagacgacctagcacgacgtgcgtccagacgagaatcgctcgagcctggcacttttctcgacatcctgacgaagccatcagtgaaagaggttagcggcgaagttagctcggacacccccgacattagctcagaggtcaccaaggtagaacgtgccgtcgccgacatcgagaccacagacgactggcgcatcccactaatcaaattcgtcaacagcaaggagttgcctgaggacgatacagaggccgagaaaataacccgtaaagcaaagatctactgtatggtcggcaacgatctatacaagaaagcgccaaacggggtacttctcaaatgcgtctcgaccgacgacggcagacaccttctcctcggtatacatgaaggcatatgtgggttacatgccgccggtcggacattggtcgggaaagcttttcgacaaggctttttctggccaaccgcccttaaagatgcatgcgacatggtctagcgatgcgaagcctgtcaattccacagtaaacacacaaagctacccgcgcaagcgctccagactatccctctaacttggccgttctcgtgctaggggctagatatacttgggccattcccacgagggcagggcggctacagattcctattcgtggcgatcgacaagttcactaaatggatcgaagcagtacccacgggggaaatcaaggccgacaacgccatcaaattcatcaaagggatattttgcagatacggactaccgcaccgcatcataactgacaacggctcccagttcatcagcgtcgatttccaggattactgcatcgggctaggggtcaaaatatgcttcgcctcggtctctcaccctcaaagcaacggacaagtcgagagggcaaacggcatagtactacaagggataaaaacccgcgtctacgacagactcatgtcacacgacaaaaaatgggttgaagaactcccatcagtactatgggccgtacgcaccacaccgacaacgtctaacaaggaaacacccttcttccttgtgtacggctctgaggctatgcttcccggcgagctacgacatcagagtacacgagtacagaagcactgcgatgaggaccaggaggaacagcgggacatcgatgtaaatcttcttgaggagcatcgtgaacaggttgccgtccgagcagccagctatcaacaggcccttcgccgttaccacgagaagcgcatccgagcacgcataccttcgatcggcgactacgtcctccaacgagttcaaagccaagcagggcgaaacaaactctcaccaaaatgggaaggaccttacacgatcacacaagtcttgtggccaggcgcattcaaaatcgcagacggcgacggtcgcgagttagcaaattcttggaacattgaccaactacgtaaattctatgtatgagtcaataccatccatacctgtaagacaccttacagtatcaatgaagcctatttttaggcccatattacaatcaaagtgttttcgcctgatgatcccttaccctgatgacacctcgcgttgaaacctgtccttatgtccctttacgccgtcttgaaaaggcctctgaggaacctaagggatcttcggctggggacgcccagagccgataaggccttgtcagatcctgtagagacgaaagaccatgtaagatctggtcatgtaagtgttctcgccgtgcgtattaaccaagccgtaaaatcggaaatcaactttccaacttcacggttgggggctaggatcagagcttatttaaccaaggcgggtcaaaggtccaagagccttatcctccgagaaaatttctccgacaacaaggctgggggctagggagagtgtacgactcaaacggctgactaaagtcgttaactgagaacgcactcttacacacgacattcagagtaagagacatttgttaaagatagatttctttactatttcacacaatacttgttacagtttttacacaaatctttcgctacattacatctttttcctaagatatttgtcacagggtacgaaaactaccaagaaggccaacgctagtccatagactggaagatcttctcggccaatggcgacatcgacctcgctagatggtctatctccgccggagtcctccgagaacaagcaaaaccctcacggagaaattcgaggtccaagctcgggcgatgacctcgtaggcaagccaacacgtgccctccggcgtatcggctcgatcgacgacactcctgcttcaaggcctcgtcgatacgcttgccgatgccatcgagttgggcacaggccccgttcagccacgagatgtacccggccgccgactcctcaggatctccgcggaccactcgaagttctttacagactctggctatggatgtgcagcaactctttaagtacgagttaaaccacacctcacgacctcggagcgtttccacagcctgctctttcttcacggccagcatggttctctcgagttccgccacttcaaacttcatcttccagtattggatatgacgatcttggctagcaagggcaccctcgagatctgcataatgtgataaccactaagtcaagctgtacgcctctttcgagaacatggctgatctagtcgggatggcatcaaggggtgaagggactactaacctgaggaagtcgtcgttatccctgtctccgtatcaagggtctaatccacattgtcgggcgacacgtgtggttcaaactcgagtactggaattatcgccagtgactcgggctgcccgcgctgctagacatcctcgtcatcagcatctctacaaaggacaagagttcctgaggtcaacatacaaaagtaaactaggatgataatcgcccgcacgaaggaggttagaattcaagttttacacattgtgtcttggaagtacaagaagtcctactcttcaaatagggggagaacagactcccccaaatcaccgacttcttccatcacctccctccgcgtgtcactagccgccccctgatccaagatctcgcgcagatcgagttcaggacgcgacagctttacacacgcgaggacatgacacgccccagtgtagatcccgttcgacgtctccttcgcgatcctggctgcatgcttggaggggatctcccccatcgccgtcgccagttccgcaagggaggaggtcagcgagaactcgtcgggattcaccaggatcgtaaacttgatgccgcactccccggcgagctggtgcaggccagtgtaggtgacccgcaacgagccctggatctccgataggttgttcccgagttccgacatgcggtcctcgagcctcttccgttgtcgctcgttgccggccaccaattccctcatcttcgtgaggtcttcacgagctccagccaactcgcgcaccagccggtcagcacgtgcgttcgccagcgctgcttccgacctcgcctccgcaatctcgcggccaataccgcgagcacccgcttcgaggaggcgccccatcttgacttagagctcctcccaggtgaggacggcagctggtggatcacgacctaccgcgggatcgctgactgggccgctaggcgtcgccttccagctcccggctgcgggcacgacatccgtcgaagccgcggcaggcgacgcactggaagtccctccggacttggcttgcgcagcctttgcccgcgcctccctacaggacgaccatgggtcagacaacgcttgaatagaatcacggaaatctaaaaattcatctacttacttctcgccgatcgtcacaatacgttgtcgtcgtggaggtgggggtgacgcgtccgaggcctgaaagacaatcaacgcaaagtaaggcaaaatccttctggctgcacgatctgacgacaggataaattaccgagggtgtcggcgtcttgcgacgatgtccgcttacagaggagaacttcctcccctttgtcgcaacattgccaccgctagtggtggcagcagcagcatcatacgcctccttggcgaccttctctttcagagacgccgccacctgatggtctgtgagtggcccgatgatgtcagtcagaggaagagcctacgcttaatcaagtcataaggtgatctcgaaggaaaaatgcgtgatgcttatcgggtgcacttacgttgatagcgtcatcacgctcggccgcccccttttcacaaagaggcgtggggatgttgctcgccgttgtcggaccgctgatcatcacctggccgacacggcgctccacggcctcactgttcagacctgtaaatcgagaaccagatttcgatgagtcaataggaacgcgaacataagcatgtcaggataaatgcgagaaagataccccgaggagaaacccgggtcgcgtcctccggtccggaataattataagctggataggcccgagcctggagtggctggatccgcctaccaacgaagtctgcaatgacttcataccccgacaagccccgtactcggagatcatcgatgatgtcgataaacggctgaagagaaggggtcaaggggggctttgcggtccaagacgaaatcttgtccggttgttctttgggaacaacgaagacagggttcgaatctttgatctcaaggtagaaccacctattccgctatttgctgcgagaagaagggcactggaaggggatataacgcgacttcaggccatcctgaagtcggaacccgacgcaaccagataccctgttggattccatccaacacagttcatagtaagagcgaaagagatcaagaaaaggctctaccccaatgtaggcctcgcaaagatggggcaaagatgctaagaaaggcaatggaattggggttcaaatggagaagagaaagaccatagaaattcaaaaccaagagaagaaactcggaaggtggagggagaagaccgcagagaacataatcttcgatcgcaaccatgcgacccaagatgggctggggattagtacctcctgcttctctctccatggttccacggccaggaaggacgccgtcttcctgaagcttcttcagcgacgcactggtggaagatgacttgctgaggtccattgctgattcaagatcgccggagaaagggcctaggttgatgaactagggtttcttgtgacggcgaagaaggcgaagagcgcttacaggtggaatgttttcaacacggttggcggacttcaaaatggatctccaaaattcctttaaataggcgcactaccgacggtgcgaattccaaggacagagagagatgcccgccggaaatttctgggtccgttacgcgcggcggttttctggacttcagtttaaaattcgctcgtgaccgttgggctttgaatggcgtgctcgactacggcctgtctccgcgatcctcgcaccgggaacgacaacaatctcgacacccgaagtcgtgaatggttacacgagcccattttaagcagaagtcgggggctactgtcagggttacgggttaggcataccctttacccttcgatatatgttacatatcggtatggtatacccacgcgcatacagatacttcctatatattctatggaaatacttcacggaatctacggatgggaagaatcctactcggacaagattgggtcgttgacgtatcgaatagggtctgatatctccgagttctacttggagacctccagatctgtgatataaaagggacccctggtgagggcttaaaggatcgaatctcagagccgacacaacccacataacctacgaagccggagcctgcaaggagccaagccatcgagatctagtcgaatcaactcgactacgatttcgccggattcgacaagttccattgttccctttgtaacctgtgttttctaccatataatcccacatcaactggattagggctattacctatcaaggggcctgaaccagtataattcttgtcttttgttcgcttgatgtcgtactacgtagatccttgtaccaaagtaccccaataccctctatatccggtctacgggcatcacctgtcgacaatgatggttcatgagttaagattcgagacataggttcataggttcatgagttaaactctcaactttctcatattctaatatgatcaagaagaggcaagatgtttatgtctttactgccataaattgaaattatgataatggttggatgcgccaaacggtgttcagaaatagtggtaaaaaacagtactagtaagtctagtactccctctgtttcaaaatatttgacaccgttgactttttagtacgtgtttgacaatttgttttattcaaaaaattttaagtaattatttattcttttcatatcatttgattcattgttaaatatactttcatgtgcacatatagttttacatatttcacaaattttttcgaataaaacgaacggtcaaacatgtgctaaaaagtcaacggtgtcaaacattttgcaacagagggagtactttcctcttaaaaaaaagtaagtctagtatttgttgggccaaattttcctccataagcatttgctctcagcccattgcagcccgaaaatctaacaaatatgagccattgattcatatccttgatcaatggtgaagattaccacatcctttgtgataggaagaaaaaccctagctttcatggagagagttgagataacaacaaccattgaggacgagaagaaaaccagcaaaacacaagagagagagagagcggagagtatagaagaaaagttacagtttgttcagcttggtagctcttatccgatcttcatcaagtcagcgattggaggttcaaacgtgattgaattggcaccaaacttggtgagtttgttccttactttgagcactttaatctggctagtttatgcaaggattggttgagtagagtacctgatttgagtagtggtttatcagctcgagttgctacagttacattatgcaacatttggtggaatgtcagtttgaagggtcaaatggtgttcaattgtgttgttttttggacagcttggaaatgactcataggccatcatttgtaccaagtttcgtgcaatttgcatatgtggtttgggagatctcagttgagaaccaaaaaggatctgctatttctctgcttgtttgttgatatacctcttgttagttttggtggttgatgttgatgatgtcaagtgtgtaacttgatgttatagctgatgttgcgatgtgcatttagatgttctagtgaagactccatttgtgcccattattgtttataacagaagcttggagtgcatcgttggtcccatggttttttactcctcataccgaagaggttttccacgtaaatcaccgtgtcttgtgtgcatgtgtctattgttgttccactgctgatttgctagttgaaactgtcctcaaagtttatagcaagatgagggttgattgtgtaaaatatgtttgccggttggtaaattatagtttgcacagtgaagtaatttggttcagccccaacaatatttaaatttaaagaagaaaaagggaaaaaaataataaaagaaaggcagtacatcaatagatcctagccgttcgatgcacgcatccagcggctgtaaactgctcgaaacggaaaacagtcgagaggactcatctccactcttctcctttgcttcgaactccggcggctttgcgacggcgccgtcgcgatgggctgcctccgccgcgcgctccgcctaggcctacgccgtgggctctcctcctcctcggcggctccggcggccgcggagcaggctgagctccccc

SEQ ID NO: 1356 - DNA, 1105 bp, Oryza sativa
atcacatcgaaggtttaaacactaattataaatattaaatgtagactattaataaaacccatccataatcttagactaattcgcgagacgaatctattgagcctaattaatccatgattagcctatgtgatgctacagtaaacattctctaattatggattaattaggctttaaaaatttgtctcgcaaattagttttcatttatataattagttttgtaagtagtctatatttaatactctaaattagtgtctaaatacatagactaaagttaagtccctggatccaaacaccacctaagggtattgcaacgatttgtatgtattgctgctacagtaaagcatgaggcttgatttgtactatatccaatgctgacccttcaatgcttctagtacaaagctagaaataataacacatactgtataatagtacgtcattcgaactcaacaagaacacaccatttcattagctggactgcaaagagtttaatcaaacaccattcatacaatcatactacagctaatcacagtttttgaatattctactacctaaagctgtcaaaaagtcgggctacatcacaggattgcattgtatcatactaatgccatgtcaattgacgaagctcggctagaatcaacttatgctgataacgggcttcggtttctcatcgtccttgctctctgtggtgacagccgggggcctgcgttggtgctgcacaacagctagctgatcagaaaagagcaattccttcaagcagtggagttgcttcctctctttctccatcagcagctccttctgctcgaaacgacgtattttatcctggatttccttcatctgaaaataattttaaacaggagatatcaagaagtcaatataagcctcgaaattcaatgtggttatctcaggaattttcgtggcgccctacctgaacacccactatgtcagataaagactgctctatagccttccgttccttttcaagttgtacttgtgcgttggcagacgcctctttgagcaaatcattggctgaaagcccatctgtgcaagaagattctgtacaagacactaatttagtgaaaagatcttttcaaaatattgcaggtat

SEQ ID NO: 1357 - DNA, 970 bp, Oryza sativa
tcaattctatataaccaattttgccttgaagatatgtgtgcaaaagaagatcaagctgaagggaaagactttgacacaatctgctctaaggttttcctcagcagattctaaaaatattacagtggagaactatacatttgatcaagatgtagctagaagagaattgtgtgatatgatagtgctgcatgagtaccccttaagtatggttgatcatgttggctttaggagatttgtagctgcatttcagccactattcaaatttgggactaggaacacaataaggtatgacagcatggctggaatttgttgatttcggagcataaatttctgtgattttttttatttctgttaataattcatttctgtggtttttttatttgatttcagagcagaaattatggaccaatatgagtttgagaggaagaaagccattcaatacatggctggaattcaatctagggtggctatcactactgacttgtggacttcgagcaatcagaagagaggttatatggctatcacagcccactttgttgatgaatcttggaaacttagaagtattattatgaggtattttcttgtgactgacagccactaacatgtacttcattttttatggttagaattaaatctgaatacatacatggtttatatgtatgtaggttcatctatgttcctgcgctagaccgctatatgaccaatatgagtttgagaggaagaaggccagtagggactgagctagaccactatttggatgatgatttggttgacatccacacaaaaagttttgatgttttagattggtggaaggtggctggaattcggttccctgttttgaggaggatagcacgagatatatatgcaattcctgttagcacagttgcttcagaatcagcttttagcactagtgggagagtcctagtgagcatcgcagtcgactcacttcgaagttgttggaagctctaatctg

SEQ ID NO: 1358 - DNA, 1298 bp, Oryza sativa
gaatgaaatatggactgaggcgacgtagacgctgtgccataataaaaataaatttcaaatttcagtgctgaagttactggaagattgtcgtttacattgcaagtcacctatggcactgcttatcaaaagcataaaagaatgatgacgagtagagagttcagcacgtagaaacacaatagcggtcaagataaatcatctagaaatatagaaatccaactgccatatctgccacaatagctaataataccaatagaaaaaaaaataaaagagtgtggatacaaacattttcaagtatcatctgcgatgcatctaaaatgtctgagatgcttccaatccctccaccgattgagactccctgatacaactccaatcagacaccgcaattcagaaacacataaaaaaaatatatagttcataccaacagcagtttgtaccgttctttccttcttctcatcttctgaaggcaaccaatttgcatctcttaaagcctcatcagctgcacatagagcataggctataaatccggatatagatttattgtcctggaaacaagaaggtcaatcaacagttcaaacatcaaagcatgatacagagtttaaccatatgagctattcagcaccgccattacatgtttacagccatgcaaacaacattctgtcagaatattttggctcctagtaggagaaggaaaaaaatggcagaagtaattctatctacacattttgttccaaactaggacgtgcatatttctataagtatgcaatgaaaatatgagtgggagcacaaattaacaaaaaaaaaaaaggaaaggaaaacattgagaaatcaagacacttgtcactcctggtggcactcaagataaggtcattgccattgtacagcctaccaggaacaacattagtttttgtattatgatgatctatcacattactagcagaaaaatcgtgttggataaagaattatagataacctcaaataggaaaagtggtgctagaggtagtatgggcaatcaatatctatgtacatattggccatgaaatgcggttaaacttatcatcgccacaaaatggggtgaaattatgatgtaaggacagagcaaaagttgcattcctatatatttgcaagacctaaacgttctccaattttagcatccaacaaggcctgaacaaatcactccactcctcagtgcttgaatcccaatgcagcacagaaagcaatctactgcaccaatccaatctcgcattaacaactagtagaagcacattaacaaagcattggaattattagggctaatgaag

SEQ ID NO: 1359 - DNA, 896 bp, Oryza sativa
caaagccaagtgcttctccggctaacgttgttggtgcaggttcgaagcgtcgccccccccccctccaaggctaagaccactgcagctgcggctgtcaagagcagaaagcctccagtttctcctacaactactgcagctgcaggagaccgcaacattctactttcttttgggtaagcaacacaagaactcagatcttaatttaaacttcgcattggcatggttgtaatgtatttttgtgaatatgttgtgagtaaggaatagaagaacctagacatgtatttggggctgagatgctactcattgcatatttttttacatatgtttggcatattaatggatgtttgactagacgtgtaatatgtttgatgtagatttaaaaagatgtccgtagctagtgggagtggaagctatcaacgtcaatctccattatctcaagcatcacaaccaaaatcagagtctcttccactctccacatctccacaacctgaatctatcaatgactcagaacctattgaagttgatggtgacgaagatgaggccgaagaagaaagaattcaagagagtgaagtatataggcacagtcaaagcaaaatgtatgcattgctccaagaagctatcaggagccacaaagaatgggactaaacatcttcatgaccatttgaagataggcaaaattggttatatagcattgaaagttcacgtttttggttttatagcaccgaaagttactggttcactttaatagcatccaaagttcaccctgttcccatttttagcacttccgtcaattttttccgtccgtcttgatcgttactgatccagccacacacatgatatgacatctacccctcattgacatgcattatacttgtacttgtgaggggtagaaacgtcat

SEQ ID NO: 1360 - DNA, 661 bp, Oryza sativa
ttaacaaagaataaagggccccaagtggaaaataagaaacacttttttattgtcacttcaaatttgctgttattacctctgttctgctaaagtgctaagtacatttgacaattatactttatatgttttgtgttgtcaggttgttaaggtggagcattgtgaaagagttcatattattgcagctgctaaatggatttgtattgctaactgtcgtgagtgcatattctacctgggagtaaatcaccaacctcttattgtgggggacaaccataaattacaagtgagtgtcccttttaatagtgtaattgaaggtacacacttgttgctatgaaaagttactgccaagtgattaatcaaactttattatatagatgattgtacaccctcaataatatattcatatctacatgactatctatatgtttaccgattgttaaaataatttatttgtggagatcataataaagtcaatgctatacaccctaccaaatcaagaagagataactctcaaagaattatttgtttaatgatcttaactataaggttcaccttcacactttagagcaagtttaatagtagagctaactactagctataagcccatttaaaaataatattagaggtaacatgtatagtatattagctataaggttgcctcaaa

SEQ ID NO: 1361 - DNA, 1362 bp, Oryza sativa
cgtgtagctgaagaacgtgcagcatgtcccttctatcgacaggaatcttgttagtggctcccgtctgactagagacggatttaagttggtttttgagtctaataaagtagtcgtgtctaaacatggatattttattggtaaaggttatgagtgcggaggcctgttccgcttttccctttctgatttctgcaataagtctgtgaaccatatttgtggcagtgtggatgatgaggctaatgtttggcactcacgtttatgtcatattaattttggcttgatgtctcggctttccagcatgtgtttaattcctaagttttccattttcaaaggttctaagtgccatagttgtgtgcaatcgaagcaacctcgcatgcctcacaaggctgccgaggagagaaacttggcaccactagaactcctacattcagatctttgtgaaatgaatggggtgttgacgaagggtggaaaacgatatttcatgacgttgattgatgatgctactagattttgctatgtgtacttgttgaaaacgaaagacgaggctctagactattttaaaatttataaggcagaagttgaaaatcaacttgacagaaagataaaatggcttaagtctgatcgtggtggagagtttttctcaaatgagtttgacttattctatgaggaacatggcatcatacatgagaggacgcctccctattctcccgagtctaatgggattgctgaaaggaagaaccgcacattgactgacttggtgaatgccatgttggacacggcgggactacctaaggcatggtggggggaggcattgttgacttcgaatcatgtgttaaacagagttcctaacagaaataaggacaaaacaccatatgagatatggattgggagaaaaccatcactttcttatttgcgcacatgggggtgcttggcgaaagtcaatgtaccaataacgaagaagcgcaaacttggacctaagactgtggactgtgtctttctgggatatgctcatcacagcattgcctatagatttttaatagttaaatccgaggtacctgacatgcatgttggtacaattatggagtctcgtgatgctaccttctttgagagctttttcccaatgaaggatacacatagtagttcgagccaaccctctgaagtaattcccagttcaatcacaccaccagaacaaactgaacatacacatgaacatgtcactgaggaggatgtcagtgaagctcctcgaaggagtaagagacaaagaacggctaagtcctttggtgatgatttcactatgtacctcgtggatgacactcctaagtcaatttcagaagcatatgcatctcctgatgcagactactagaa

SEQ ID NO: 1362 - DNA, 1242 bp, Oryza sativa
ttttctgggcgagacttccactgaaaaagttcctatgggcctgtttggagaactatcccagggatattttttgggctaaagattatcccaccaaaatagccccctaacaaaatagccctcttgctgtttggatccaaaggctatttagctattattgtaccatcccaatcatttgcctccactaaaagtatacagcagccggatcttctatggctaatccaatacaggcacatacaagcatacacaattccttacaagcacaaacacataatttgtctcaaatatataagcaagtatgtaaaacaatcgtgtcacataaaagatacaattccatacaataatcgtctcacataaatatacaattacataaaacaattgtctcacataaatattaaaatccatacaacaattgtctcacataaatattaaagtccatacaacaattgtctcacataaatattaaagtccacacaacaattgtctcacataaatatacaagtcctcaaaccgtaaaaaaaaattacaatccattaaacaaagcatttgccaagtcatcgcggaagaaattcatgttgctatcctcaacaagaggttcatcttctggccagtcagagtgaggtgatgtaggcattggaaaataatctgcatccgcatcacacctagcaaattccctatccctaattttgctctctcgactgaaattatgaagaaccatgcaagcaacaattattctagtttgttttttttccgaaaacgatggcatgtccaacaacatcctccacttcatcttcaacacaccaaaagaccgctctatgacattcctaatccgggaatgtgcatggttaaaggtttctttcataccttgtggcgggggcccgtttttccattgctccacatgatacctagtgcatctatacggtgaaaggtagcccgggcggtttgggtaccccgcatcaaccacatagtacttccctgcatatacaagcacacaatgaggcatataggtacaagttaaaatgatggaaagatttgaaacaaaagttgcattactttaccttgtggtggatgtggaaatttgtgagcatgagttgtcgttgcatctttgaacactctcatatcatgtgctgaaccaggccatcccgatagcacaaaggtaaacctcatgtcaaaatcacaaacagccaatacattctgtgaggtttcattgtacctattcaagtattgtattctcttcgtctttgg

SEQ ID NO: 1363 - DNA, 3269 bp, Oryza sativa
  unsure (1)..(3269): unsure at all n locations
atcaaatatttagacacatgcatgaagtattaaatatagacaaaaagaaaaactaattacacagatttgacaatgtgatttgacaatgtgatgctacagtaaacatttgctaatgatggattaattaggcttaataaattcatctcgcagtttacaggcggattctgtaattttattttgttattagaccacgtttaatacttcaaatatgtgtctgtatatctgatgtgacacgacaaaaaatttcactcctacatctaaacacaaccttactcatgttgacaatcttcccagtttacacgcatgtcacatttttgcagagggagaagttggaagtacctaggaaaaagtgttagggtctgtttggataatggaaaatgggggatgggattgggattgggaaataaatgaagggttatgattaaatgaaagagggggaatgaatggttaggatttaaagatgttttttggtgggtggaaaattatttaacatttccattagacaaacattgcctcggggtggtcaaaattacaacaaattcaaaaatacctagtctaaaatgaaataattgaataaatggattgccgaaagttaaatttcggtaataaaagattgccaaagtgtaattcacatcgtaaaatcacactttcctaagcctaaatctgtagtactacgtaaagtaacaaaaaaaaaagttgtactccgtatggattgtgtaattttacttcttttgactttaattttgttgttatatatgacttttatcagtttgaatttttttcatgtattttttttcaaaaattaagaatcataaatttatttcatttaattttataatttttgtatggttaaatatcttgttcaaccatttatatgggaaaaaaggagaagtagtgagataatggcattttggtacttttgaaatatgccaaggatttatagatagtctccgagtgtgtgagatagtagtcatattcttctatttcattttatccacatagtatatttgtttccttccttctatttatcatgaattcgcaactctcaggttaatccattactaaagagcttattcaacttattcatataattgtttactcctacttcaaaaaatacatttattcatttntaagctattggttaaatttattttcaaaagtatttgatttattccttttcgaacggtcaggccgttgccgacgttttatattaagaagaaggtgttccattttaaggagaaaacaggaccaaaccttacagtgtctagttaattaggaaaaactgagcgaaaactacaactacaacaccacatcaatagctaacctaacttacactaccatgacggagcccaacataagacatcggtcaagcttgccatagaggcgacacggcaacccacacatgttatcattgccaagcttaccacccaagcgacacatcagtttcgacttcactgcaatgctaccccaacgccaaataaacaaacaaaaacgacacccatgaaggacatcagcccaaattcctacacacagttagcatcaacaaccctataaggagatcgcggtgtgtgtcatcgttgccaagtttcgtcgcacccctacagcaaagcagctccgactctacccagtagtaaccaaacaaggatgatgaatacctgccacaaagcaagaaatgaaaccaaggcggcaaaggcctcgtcaaacacactaggcttgtagagcttcaaaggcattgcaggagcccaccaatggctaccgttgcacgcggaaggttcttggtgctaagagaagtcaacgccaaaacgacacctccaaggagggaaacgacgcctaatggtgccgtcgttgtcataccggcccatgccctagcaaggctttcgccagtgattcccaatcaaatccctacacaactgtcctgcccaacgaccgttgttggaccaccacgctatcccttcagcgcccctgtgcgtatagtaaagtagataatggtataataaagtagataatccgagacgatagtttgtccaattatctaaatcgaagcatgtgaaccgtattccagcttttgcgtgattgaactccgaaattaggcgaatcatattgatttcagatttgacaggctagctcaaagatgtttattaacgtgtgcttctcgacgccactgtcagccgtttggggtcgagctacaatttgagcaaaggacaccaccggcctttgttgtttaactgacagtattaatacgagttatttaatgcatagatcaagagattacatgcctcccatagttccatcgacagtgatactaactatgagttaacaattgaaccagaaataagggccctttaaatcaaaagatttatgtaaaaattttctaggattctttctatatgatttttttatttggccctttaattcaaaggattgaagcttttcgaatcctatgaaattcatatggtcatgggtagcaccttaggtcttgggtttaactcctcatgggagcaaatttcctaggatttaacggcatcgtgctttcagtggtaggtcaatctccaggatttgtcggccaagtcttcgaagatactcataggggtagcgcttacgtgcgtgcgtttaggttgcgtgcgtttaggagtgaatgtacgtgcgttgtgagtctctaggttatattgcgtaattctaaaaaaaaaaggtaaaaatggagattttgtggtaaataacagaaaatgatgttccctgccgatgtgaccaaaaatacacccatcgacatttcgatgcaccgatatgcttggttttaagttattacaataaatacacctacttaacacccacttaccaagctcatgccatgtgaatgtgatttacttcttttgatagaacaccttttctgattctacatcttttgcaaattacaatacttaacatccacagatttttgtacagtgttatgttcctaaatcctaatcggtcatctacttcaacatctactcgtaaatcctctactactccgtaggctgtagaagttgaaccaattacccgggcggccggcacgttccctaatcgcccgatctaaacaatacacaaaaaagtctcgacccgtttcgccccgaccggtcgccgcgccaccacccactccccctcaaacaccggcggtggtcatgccgcctccgcctcctcctccgccgccgccgccgccgtctcctcctcgccttcctctcaccgcccaccgcctccctctcccgcccgcgacctcgccccccgcctcgctcctc

SEQ ID NO: 1364 - DNA, 2892 bp, Oryza sativa
gggcataattgcctaatcatccaagaaaagagaaagataaacagggaagtaggttttttacatctccaaccactgttgttttactaagatacagaaaagaagttgttattcgtagggccaaaacctatggcatgacacactgccatgacggttcacgaagttcatccaataatttgaaccaccaatttttttattttgaatctactattccccctgttccaaaatatagcaacttagtaatcgattagacatgttgctatattttaggacggggtgacggggggagtatataagaagaacagcatgtttgatacatcaaggcccttgtttttttcttatatctgtagatgaaatatccatgcgaaacttctcctctggtatagagataaacatttcccttaactcgactggaatgtccaaatcttcaaggaccttcaaaataaatagagaagtataggatcagaccttattttccaatgggtgtagaagatgaaaactacagtgaatgcataccttgaaaactccttcaatatttcgaccaccaacaagaaatgttgtacctgtgtttttacattcgagaagtatctctagcattctattgtaatcacctccataatacttaggctgcaacgagtaaacttcattcagtacgagcaacaagtaaagcagttaaactgtctttcagaattcagcaattggcttgaaatattgtgtttagttccatctaacttcttacattaacaagcctagctgcagtgtctgcaccgattacaaatgcactgcctggaaatagctccgctttcttgtaaaagtatggttggttagatattatcacattcttccctgcatcagaaagaagaacaaaaccatcgatcaattggagtttcctacctacagaaaggtagtacattcttatctcaagcatcaagccccccaaaacacaaaatatgtgaaggattattggttagctgaagacagatttcagtaaatagaaaaggagttgttcaggttgtcgcttttcaattattatttcatacaattgattataaaaacaaactgaatcagaaacatgaatttcaaatctataaagacaccccatctgttcgctgttaccaatctaattggtgtatcatatcacattgagactttcattcatggcagtgggtcatacctacttttctaaattgctcaacccggcgcttgatttctgcgatagatagtggaggtttgtcggcattgattgctgatatctcaaagcatggaagaccatcatcacacatgctacaagaagcagatttgtggggaggaaatattagttcttactctcttgaggtcagaacaagcagactaaaagctttatatgtcatgttgtgcactttttatgcacatgcagctcgtggaaccaacgtcacacttatagttttaaaataattgaagcgtcaaaatggagaggggcaatctagtccttgatacagacatacagtatgtatctttatgtgacttgtaatttccagtttaacagagtgccttttcattaaattacttctttgttcatttctattcttgcttcctcgctaatttttaacatgaaaaaaaatccagttgtgaaaatgctatgatctattctcttcagtgttttcacatgataaaatcacaccttgatgcaacttctaacagcctaaggtgtccatcatgcaggggattgaatgaaccaggtagaattattttcctgttgaagtttttatccattgaatctgcaaggaaaaaaagaaatagatttaagagagagaaaaacccaggacggctgcaaactagtattaagagatactacttgtctgctatattttgggatggatgtagtatgatttaagagtgaaaatgaaatattcaagtgtgcacacatagcaacatcgagtgacaaagtataccagaaaagtgatacactttcatgcagacttgcccatcaataacttgctggagttcttggtcttcatcaaattgttccacgctttcttttggaagttcaggttcttgaacatctgactgaatggttgcaggaactttgcagccgtctgcaattgcctgcaacacagtatattcttacaacggagaactaactggaagaataccaattagcaagaaggttggcctatcctgacgggattggttgattgtatagctgaatcatgaccaagtgaaaggtttggtcaattgtactaggttatcatgaagtccaactcaagtgcatgttgccagtgatgacataaatatgtgtgacagtgtgagtacacctagttatacataacaaaccttgagcagaaagtagcttgaaactttatcttcttcctctctgctccgtaaaccctgggtagaaagaccatgttaatgtgatacatcatagctaagtaatgaggttgttatgtttatttctattgttgcactttccaaaaatgtgcatatggtaaaatgtgttagtaataaggcacaccatataatgtgaccaactcataccatttttgcactttcttaaaagaaattctatgttaagattgaaaacaaaggatagcaatacaagtacctttgacaatgtaacatgtgatgtcctgaggcaattttgtgttcgtgttgacacatagaacctattcaaaatcgctaacaaatattataccgtgcattgaagaaatgggaattaaatacatctctgcaaaagcagagaatatggtgtggtataacatgtcttaaagcccatatgtccgactttaacaacaaatgtaaaactactaattttatgtcagcaagtagttcatataaatggcatgtctgcttctgtatgattaatatcatgctatgttgctatttgatgtgcatgccatgtttcactaacttaatctg

SEQ ID NO: 1365 - DNA, 1114 bp, Oryza sativa
catgcttgatatcttcagccagaattatataagaacaatattagtttgatccatcatgcattttatttttctcactaatccttattatataaaaagcattaacattttatgatgaattttagatacaaagagaagtatcatggtaacatcattctgttccatgaactaatcatcagattcaatccatttacctttgccctgagaatacgtcccaaccgttgagcttcttgacgccgtgaaccagcatgagatgaaatttgtatgatcacatttgcttctggaatatcaatcgagttatcacccacctaagtgacagtagatatgcagttaagatgatgatggttgaatctacaaaagtatgttttgaatcagaatatcagttactgcacctttgaaaggaaaattgtattcacatctgagctgttcttgaattgatgcaagaattctcgtcctctcaacatggctgaatgttttcaagcagatataagcatataactaatggacacaaacattctgtataaaatgagaatcaccttgtggaaccataaatcattggtttacggagcttcattgcgtagctagttagtgcaaatagattatcggcaaacacaattatcttgtccccacgttgttgctcatggaatcgaattagaaactcgcaagctctgaatttgtttgggttcatcgcatagaggacctgataggccagggttagtgcaatcctcgaagatgacaagatttgataaacaagcacattgaccaataaattcatgtctggcatgtacaaagcacaagaaaaccaacattttaatgtaagatgatttggttttctcctaagtcaaacttctccaagtttgatcaagtttatatatagaaaaaatgtaataagattcacaatgccaaattaatttcattaaatccacaattgaatataattttataatattatttgtttggtgttgaaaatatagctacgtctttagttatttatgaacttagtcaaacttaaagaagttttgactaataacaatagcaaaacattttacattctaaatggaaggagtatcacaaaaagctatactagaaattggaacatgtggactttatattgcaa

SEQ ID NO: 1366 - DNA, 553 bp, Oryza sativa
gaagctacttcctgttgcatgtttaggacctttattgtgacaatggactcatcatctagctggcctttgaagactttaccaaagcttccactccctagcaggttatcatcactgaagtttcttgttgcacggacaagttcatggtatgagattaactggtaattcagcaagtctgcatctgagggtagtggcatctttcctggcttattcattttccttcttaccaacatacacaagcaaaatgctaaaataaaaaatgccacaactgcaggtaatatgaattttagtagccgttgtattgaccttgagtgagttttgctctggcatgattctattccttggctcggaaggccacatagtgccttgtttcccatcaatgacttgacagtgatgtttgagaacacacctccttctggtatctgaccctccagtctattgaaagataggttcaaattggcaagataagtgagattggccaaggactttgggatgacacccgaaagcacattggaggaaaggtctaactcctcaatacttagtaacttgccaactg

SEQ ID NO: 1367 - DNA, 556 bp, Oryza sativa
tcatctattaaaaaatggagggagtatatgtgcatggttgagtgcctgaaatgtattactttgtcaaagggtttctgattttccgttaaactatttgattttgacctttggtggtgcaggccagaatccatgcacgagtacaatctaacaccccactcactatatgctgcggtctcagttgggcttgagactagcactataatcagtgtcatgagcaagctctccaagactaaactgcctcgtgaaataattgattttatccatgcatcaactgccaattatggtaaagtgaagcttgttctgaagaagaatcgatattttgtggagtctccattccctgaggtcataccatacttccgtgattaaaaaatattcttttttgtctattattttctatttatgtgagctgcgatatctcatctccaggttttgaagacgcttctgaaagatgatatcatttgcagagcacggatatctcctgaggttattcatctgttttgtgcacttgaatagaattcttatggcaatatactagtagcaaagtcgtgccttccta

SEQ ID NO: 1368 - DNA, 2665 bp, Oryza sativa
ctttatatgtattataaaatccaagaagcattttaagctcacacagctcactagttgatactacgagtatttaagtattattagcattcatgtgatggcacagttacatggaacttaatagatgaaagaagataaccagatatccactaaataatcgaacagaaatgcacaaactggaccatataagtcattagttgattattatacacagccatccttcatgtgtaaggaaagcagccattaagacaactatacgtcctacatctattatcagtgtcactaactaatttcatcaaaatttatcattagataatcattaatcaagtgacaatcatttcacatgacatttttgcaagttagctaagttaatttgttttcgtgacaataaaccacaaggacaactttacttttttttttactgaaatgaatggctttcggtatgattatttaaacagttaaatcaaggaccgtgcactagaatctactagtgtaggcatgtaacactaacaaaacaagctcaaggattaaaaaactaaacaggagaacatgcaaaaaaaaaagaaaaagaaaaagaagaagaagaagaagatagatgagtacattttgtatactttgaactctagaaaatggtaaagatggcatataactataaggtgagctcacctcaatcattgcctggcaaggactccttagaaaccctaaaaaagctgttttcagggaataccgcagacttgcaggatgagctccttttgcaacctccaaactagggtcaaaaccaagtagcactggcagtatgcgttcgtagtaaacaggtctattctttgcaatagctgcaagactggaaagtgacaaacatttatatttccaaaagataacaacatagtttgcaaggttgtactgatagtaagataacttccaacaggaaaaagacattccgaacattaaaatcttaaagtagcaggcaaccacatggacatagtacagttgcaagctttgctcattggtaaacctcatcactgcccatgtctgttgcggccaattatataactgaagtaaagaacacaaaagcctaaataaatgttacggtacccacttcacaaagtacaacactatggggatatcactatagatgtgtgacaggtcagagacaacataagaaatagctactgtgcataaaatgaaactgaatcagaaacaacagtttataaatgacacaaatagctatccgccaatccatatatggaggcgacaactcaaaacgagcagaaggtagagggaactggtacagagtcttacgaattaatggtgccaactaggaaggatccttgatgagcacaagctgactgcagtatatccacaaggaggatgagagccctgtttgcatcagcttcgagaacagcagggttaaggctgggatggaattgagataatcttgaactatcaaacaacctcctgttccttcctgtttgtacagcgaaaatacatttcattactttgattgcaggaccacattatgcccattaattctttgcaaaaatctgccttaaaataccttcagttggctgcatccggtcacttttggattgaggtgcgaaacacaggatccatgtttcaatgaactttacagcaaacagtttagtagcaactgggacagactgttgtatatcacatgaagaatagcattagtcttggattgagcagaaacaaagaactaaaccatcaattcaagtttcaaagtagtcatttttttttttgcgaggaaagtagtcattagttacaaagctgtgtattttcagtaggatgagcaaagaagaggtagtctggctccttttcttcatatcatatcacaagggcagggatgggattactgtggaataattcccactttcgtagtgctctgtgctcaacatagtgacaaatacactccacaaaagaaagtttttccagagcactagatcatagttttacataaaataaagagaaacagtataataaaaaacctgatatatgtaggttttgtactttcattttatctgctaaatagtgcttgcaaatacacaacagaacaaccacagtatcaacgtattattgaaattacgcaacgcatgaacttgtatgctactaacctcatggatcagattatggactgcatctttaaactgcttcgtccaagcccacatctcttcaagccaagcatcaacccttccacacttattaatctacattcagcattaaaatggaaagtgagtaccaagagcaagctatcagtaatatcttagtgataacactttaagtagcatcaattcaatcaggagaaaattttgaaagggagacattacttcatagtgattctacataacgttttgcattttcagaactaaatgaaaacatatgggttttctctgaccctactgtgtaaaatactaccttaaatcttcacgggtataatcacaaaaccattgcttgtaaaatagtcaaaacaaatagctaacaaacaaatctatgagcattgtatggctcaattagtttttaactactgaaagaagcttcaagttgttcttgatcacatagagtcctattaggatagtaatattttttttataattacagtacaaatgtaagtttaatgttttaacatgtgatccagtggataacattttcctgg

SEQ ID NO: 1369 - DNA, 656 bp, Oryza sativa
catcatcatcttaactgcatatctactgtcacttaggtgggtgataactcgattgatattccagaagcaaatgtgatcatacaaatttcatctcatgctggttcacggcgtcaagaagctcaacggttgggacgtattctcagggcaaaggtaaaatggattgaatctgatgattagttcatggaacagaatgatgttaccatgatacttctctttgtatctaaaattcatcataaaatgttaatgctttttatataataaggattagtgagaaaaataaaatgcatgatggatcaaactaatattgttcttatataattctggctgaagatatcaagcatgctcacatttgcttaaatgtttttaaagcttgttggaatctgtaactatttaatttgattttagtatacaagttatatatgtaataatttattatcgtgttgtaaatacagctctggaatctgaaagaatagttttgtgtaaaattagttgcagtatgttatatgctagttatgactaaggaatcacgtgtccaatcagatgatggaagcattagatctcaaactgctgcagtcatgttctaagataatactttctattgaaatgtcattggatcttgataattactgtgacatcagggtaagcatcaagacagg

SEQ ID NO: 1370 - DNA, 18063 bp, Oryza sativa
tggatttgcccaatacaaattaatttagtgatgactctaatacaaaattcataccaactgtcaagtgttaacaaacatgattttaactgttgttaacgtacttttatatatggacacatgatgtaaccatgtgatccattctgtgcctcttcgtgaataaataggaaccaaataattataattaaactgtcatgagaaaagccctattctgggtacagtcaaatcttccaatacggaatagtcgctgtacaaaaacctccaatccaaatggggcttcactatgaaacaattctttgggtatttttcacttttttaagcgtttgaacctatgcccatccctgttgcttcattcatttggctgactgctgtgacaattttttgttttgaaatattgttaattttcttttataaatttagtcaaatctaaaaaaattacctcataaaaaagtcaaaaggacttatatgatcaaacgacctaaagtagtagatagcacaattctcaactcaacccagttggcattggcacgaaatgatatctatggatgcgtcaaattattttgatatttgtggagcgatttatttcatatccatcatgtttgatttcctccatcgagctaagcatatatataccgatggagaggatacagcaattatcaggtgatgttatgacatgtacagtacaggtgcagcttaatttaccatcagagagtggaggtgaatgggttcactcacttgacaagccctatgctgaggatgccgaaggaggtgtgcggccaatccttgtccttggccttgatcagcatcgccctgccccatgacacccaagcctcccatggcatcctcttgtcccagctgctcccccactccagcaacagcttcacccctgcctctatctgctcctctgcctcctcatacatctccatgttcagaagcacctgagcaagaaccaggtgaggctctcctacaaacgggttcctgccaatgcaccgtcgcaggatctcctccaccttgcgccaatccgtctcgtcctcgccgccgctgcaaactgcatcccagtagaggtcccgtgccgccttctggtcgtcggcggtgagcacctgggtgcagccattgaacaccggtgggatcaccagctcaatgtcctcgtcacgatcgtcttcttggccattgttgctatgctttcgttgagctatgtgtatctcttcctcgcgaacgatgaggctgtagagcgcgcccatgcgggatatggaggcagtccagaggccgggcttgccggtgcctggccagagcgaagtccaggtattgccactgaactcgaggcggccattggtgttgtcgaagaggcgatcctgccagtcgaagagctggtcgctgaagtccgccattgtcatgagaaggaaggttgccgcgatgcgcctcgacagtgccacatcctcgccagtccttccaattcaaagtacagacaaaaatcaggtgcaatctgatcgaagtatgtagaaccaacttcgaaatgcaactaagtttgtttgctatctatgcatggggttggtttgcctttgcattgtactcatgcactgtagattacagttacttgtggatgatatgatctaaattgtaagttacgttattatcgcagcagtaaacaaactagatactcccatgtttactggatatctccccaaattttattggcactagctgccaacatgagcttatgttcttttgtattgtcaggtataataaacaacagtctgtaaaattgtcaagacatctttctgccaaatcctctgatcgtataaaacatgtatgagaagattaattttgtcatgaattgttaagtgtttttttcctggtaaccaagatgagaacggctagacaacgggattccgtttcaacgggataagtgctgacgtcacctgctccgcatctagcgcttcgtcgctcccaactaccatgtctgaaaccaaagtcgcacatgccgctccacatcaaacatgcgctattccgtgttcccactagtgcaagtgccccagcttgaccggtctacatgcatgggtctcaacgactaggtctcgagagagctgcttagttgggcactttgagttgtgatatattaattgagtttgggcaggcatggccagatgtcttggcagggcaatatgcctcccgagccatggagcgaggcttgtgaaaaataaaaagattttttttgtcttgataatctttgatgatacactattatgtctggtactgagattgactagtgcacgttgggctcccacgatgcctgatttatatatggctcgcaagtaccatgtaccatataagatacatgtatgtatcatacgtgatactcaggtatcaaattatcatacctgatacccgatactaggtatggcacatacgagtaccaggtcagatatatatagataacgggtctgatactcaggaaccggatctggcactagtatcactgtatgaaaattgtttacagcggatgctctccaagcaacagcgtagaagatgatgacatccgacatgcctatgattttcactcgagctgttgtcgtgagatttaaaaacttctaaattctaaattctaaacgtcgaagatgaaattcacacggttttcggttgatgccatggtaaccgtcttgctatgtatgtgtacaccaattttaatacacgaaaatccacacattttcaaccaatccgaatcttcggaaatgcatctaggcaatttaaattcaaattttgaccaaatccttactaaattacgtagaaaatgcttatttttggaagagggcagctaccgtacgagattccgttgcaacgtagcagccacgggataagatctccactaccttgtctccttccctttccctccacaaactctctcacacaggagaagaaaacgagaggcggagatgaagttggccaggaggaaggggtcgtcgtcgtctccggcggccgtggatgacgacggcacggcgtcggcgaggtcggggcggcatcgagggtgatctcgccgcacctccacgacgtcgtcctccgcccgctgcggcgccgcctccgcgcgctgtggcactgcttcttccactggcgctctcgtcgctgccggcgccggggcctctcccctcctccctcgcgctccttgccaaggtcgccgtcgtccttgcccgctgctcccgccgcctccttgccggtgagcgtaggtggctcctcctccgccgctacagaagcagaagaatctggcgatctcggtgtctcggtcactgcaacgccggcggcaacatgctctggaacctctacctcctctccatcctgatacctggtaccttggtatcagtcggtaccaggtacctttggtaccgactgatacctttggtacctggtaccaggctagtacctagtatctggtaccgggtacccgtgatatctagtacctggtggcctggaggaggagagagaggaggaggtagccgcgtggtggagcaggagaaggaggtggcgcgcgaatccggtggtcggcgaggcgaagcgtggaggaggcagcggcgaatccggtggtcggcgaggcggggcagccgatgagaagaccgacgagagcggggagccagagcggcgcggcaagggaggcgagcttgagggcgacccttgccgaggccgcgccgtcgtcgtcctcctcggcggccggggtcctgagccagcagcggcttccccggcgccggcagcggcctccgcgcccccgctcccgctctccctcttgttcacctcacccgtcgccaagctcctcgtcgtcgccgcctcccccgcggcggtggccgccggctccgacgagcggtggggcgacggcgacggggacgacggcggccaccggctccgacgagcggtggggcgacagcgacggggacgacagtggccgctggctccgacgattttggggagaagagtgaggtatgatgaggggatcgattctgattacttatccgtcttcacgggatgtcggtggaatagattttctgaaccaagatatatgctgtgatggactctgtccgattgattcttcaccacacgttctgaatcgaacggttcccataatgaactcatcatctagggtcggagaaaaattaattctcgtaaccccatctggtgctgagcagtagaaattaagaagatttatttattgtaactaattaactaactcacctgatgtgtttgacagtgattccgtggggcgggaggaggcgctggatcttgagccgccaggcctcgccgtcgtggtggaacagcccgcgccgcgcgtcctgcagtgacgcctcggaggcggcgaggtcggcgacgaggtcctggtcggcgtagtggaagagcaggtcgtcgtggatgagctggtggcgcgggacgacgcagaagaggtggacgaggcgctcggcggcggcgccgacgatggggcgcacgtggtcgcgggcgacgtcgggttcgaagatggcgaggttgacgtaggagttggagtaggcggagtggtagaggccgcagcgcgcgacggcgtcgggggcgccccagaggcggaggatgcggtggacgtcgaggaggtgggcgaggaaggtgccgtgcttgtgccagcactcgccggcgccggcggcgcgcagcacggcggccagcttggggagcgccgggtccacctgctcctcctcgccgcgcaggaaggggcgcgccgcgtccagcgcgccggcgaggtgcgaaggcgaaggcataatttggctaggtgcggcagcggcagcgagaggagtgagagtgatcgatcgcgtgaagtggcggttggcaagttgtgcttgtgcacgatgatcaacagtttggtttcgattccggtggaccggattagtgtgtgtggttcacaccaaatctggtaggagcagatcttttatttcctcatctattgggctgtgggccgcatcatccctttcctctgggccgtaatagtaccttttcttgtttgcttgtgattttcatcttcattcttcagtacattacataatccacgctgacgtcttcatttctttgtttgctccttatttctagttcatcatcgcaacatgggatttgcctgcctcacaggaacttaatttgaggcgtagctacataggagtatacagtacagtatttgtttttttccttatcatctcgtcttctcatcatatatcaatcctctacatattcttatggctcagaggtaagtagagtattgcttctttgaaaaaaaaaacagtacatcaacgtccttgttaacgtattcgttttcatctgtaagcatcagcatatccatatttaactctatccaattcaaacatgcacaacagaatatatttggaattggactgtactactactaccaagtactccctccgtttcaaaatgtttgacaccgttgaatttttagcacgtgtttgaccattcatcttatttaaaaaaaattgtgaaatatgtaaaactatatgtgtacatgaaagtatatttaacaatgaatcaaatgatatgaaaagaataaataattacttaaattttttgaataagacgaatggttaaacacgtgctaaaaagtcaacggtgccaaatattttaaaacggagggagtactaagaaattgcagaatgggtcatgactacatacatggtcacataaaaacagtattcagtcggcctcaacatacatttctttctcagagtctccaacaacctcctccaacctttcagataggactgaattggagcaatctgacacgtgttgaagcctgattaattggacgagtaacaaactaatcagtaaattgatatgacgtactagtacattttgccttgctatcctttactacttgattggatgatgattgccaatcttagttcctctaatctcaagttacaagttggttagcttctgtcaagcttctcctcttgcaaccgatggtttcacaattaaggaaaggagctgagattcttaaatatctgtgaagtgtactgacatccactcaaaaggaaaattcttggtctatcatagcatgacttgaagcgtctccaaacggctggattaccagatcttatccagattagggatgaactaaaccttatcagaatgacactagctgtattgtagtgtgagaattaaatactcctgcacattatcattgttgcactggtgacttacagcaaccgttgctactccaaaatccagtgggcagaggttattatgctatgctacaaactacaatccgaggtgtgtgtttgccttctccagaaagccatgattctcacttgagttttcttttttcgccgggccagagaatagccggccaatgtatattaagagtaagaaaagaaatgtacaaggtagcgcgatgagtcaatgcaccaccattacagacataaaaagaaagctaaaatctcacagaatgagttgctacagagtgacacatggggctaacaagacctgcagctatccaagtctcccattcatcccccatggcggaacaaagatggagaatcgttgcctcgatcccttcgaacacccttgcgtttcgctctttccaaatcaaccaggttacaaggatcacccccgcatcgaacgttttgcggtcaaccttagcaacagatttccgggctgcaagccaccaatcagcaaaatcagccgacggcgaggagcacgaaaggcccagacgtgtgcgcacccgaccccaaacctgttttcagtttcactgaagagtacagcacgtagtattgtgttttgcaaggaaggaacaagcctttaatttttgcaaaattacattgacccggtaggagtgggcgtaaattcttatttgtaaaacgaaaatggtgtgaagagtgggacccacaggtcagcctcatctgctttccctccccttgctctcttctttaaaaccgggaaagccctttcacgtttcggcgccatttcgccttcttcttcacctgggtttcgcccccataaggccggtaagcgactcctccaactccatatctagcggccaatggatttgaacttgtcgtgcttgattcccttctcttctttaatttcgctcgtccaatcccactcgatcggttttcttcactgattctttaattactccgaatcgtctcctgcccagtttttatgcggttccttcaaatattcctgaatatctccgagggcagacgcaaaaatcgatttctttgtgaccaataatagaagctgattggttctggatacagtcaaactgtccgttctaactgaaggttgactttgcaatcaggtgctaacagtttctttttattgttattattactgagaaatggaaaagtgtgagaaaaaataataaaattttcatgaatgattcatgcaaggggagaaaaagtgcgaattctagttgcaagatcgatcgttgacgtgtcgtggtagggcatgtgagcttgcagccagtactttggttgtttgatgtcgatgtgatgctcgtgactcacttaattgcttccctctcttggttggcacttaataattcactaaatcaccacagtttaattagctagcatattcagtttctttctttcttctacctcccccccatttcgctttgcaccattcatcgatctgctctctgcaagacgtggcaccttcctccttgtgttctctgacttggtaatttccatctttaaattggtcttttgtctttgagattatcatttgtaactgattaacctatgcattcgtttgcatcctagaactagctagcttctcaattcttgccagattgttattgcttgctagtgcttacaattcaatcaatcgctgcctgccatttttttagtttttattgaaagcaacactacctttcttttgctaccttattataaatgcttgtatgtatgtttgtttgtttgtttgtacacgtcttacctttcttcagtttgttaccacttctgattattattcatgtccttgcatgtagttcagctataggttgtgttcattctaactgaattcacggacagatcaagctgcaaacttgcaggagatgggatgcttcaattccaagccaaacgacaccggtgcgatcagaagaagacccgggagcataggcgaggtggctgtgttcgtgcctggattgagagtacccgagagctcggatgagctgccccttcagccgctaggtgatggcctcccaaggaggctcaccgaacgcctggccgcgttgaggaatcggataattgtcatggctgctcatgaggcactgtacatgaccaagcccacctggaggatcaccatcactcagcatggttcatccttttatggctcatcatctgatgacaagaagaataatgtcagaggtgatgaactaactgtctgaatttggtgcttgcaggggggtctaagtcagctgatcttctgcaagctttggaggattacttgcccactcttcttggcctagtaaaagatggtaaaactcctcatgtatgcttttcttccttctctttgctctttgatgaaatccaggaaatttaactgtcagtactcctggttcttcaattcttttgcagggagcgagttggaagataaggtacagtttgcatggatgaaccaagaggatgacgcagaggtctacatgctgttatgcgtactgtttgattttctgtggcaagtaagagtgatacgactgtgattaatcgtctacttatttgtgttgtgtaggatacgtcaatgcccagtgcttggtatgaggtgctatcagttctacacttgatggctctgctgcgtttgtcccaagcaaattcccttcttgttccaaagacatccattgagggataccatgctaaggtatctgaaggtctgtaccatgatcaccattgattcctcgctgatgcagaattagtacttgttacttctgaattttgaagtagtacttgttacttctgaattttcgatgatgttccttacttctcagctgttgtccgttgcagcattttgactgttctgtgtttcccttttttacttttcagaaaacaaacgagcttcagtggagatatttctcaaggcagccggatacttggagtgtgcaatccagcatgttctacctaagatatcgccggagaaaaggtggtgtgtttgatgaacaatgttgcgttctgtagttagtgcaggtcggacaggagttattgttgctgactgccatttcgtgtaggaaaggtcttcctgtggacttagctgaaggaatcctgaaagctatctgcatgcaagccctgggtcaagtaaagcgtttctccatctgcttccttttattttatttttttgggtgaatctttctttcaaatcaaatagctagaaatcacatgactcatgtaaatagcagttgaaatgtccatttctaagcccaatcgtcataattttactagtataagtcaaatgccatggctttgcgtacatgctatagttttgtggcttttacttatgtctgaagaacatcatcctgacaaaatgtccatgtcacgcggcttggtgtactgtcaggcaattgatgttcagcttggattggcaattgacagtccaaaggctaccttggcagtgaagaggaggctggcatgtgagatggtcaagtgctggcagcaggtagtacttgttttccatatcagtgctatatctgaagtagtctgttcttaagtaatgctgttattgactaagtagtaactgacaaaggcacgtgtaacacttggaagcagcttcaattgttatttgcctcatctttgttaatcttgaattgatactcctggatattcatcattatggcctcactgtgaggcactgaggctatagggattattgctactaatgatgttcaacctctgctgagatcttagtctgggttttacctgttcctcaactgaactctgaacattgtctgaacgtagctttgcagtcagtaagcaaatgtttgagttcagaaactactcctagcagcctatgaggagtcacaaatcaaacgataaatgctcctgcagtttagtttgataaatagagaatcaatattcttttctgtataatctctttcatttgatctgttcaatctttcttgtgtactatttcattttcaggcacatgaaagcatttcggacctacctctgcttgatggctgggcagaaaagcacaggctctttgttacatggaaacacatcgaagcaaaagtatgtaaaacttctttcatattctgaaacattaatactacaacgaatgatgctgtaagcacaaacaaattaatggctgtcctatacaaattaacaagaagtacattaacacatagtgtagttgtgtaaagataatttagtcatgttgcaaaaaggacggttttgttgtgagtgtgttaatttcatactccatttacactatgataaaatctatctataactgaagagaaacatatgtggatcctcctgctacaaacaggctgcggcatactactaccatggactaatccttgatgaaggaaacagtgagaaatctcataggacggcggtggcagcgctgcaatcagcggaggagttgctcaaagagagcaaagctgcatgtgaagccttccatgcggcatctcctgtttcaaggcgtgcattccattcttttcagatgtagtgttatctgcagtgagctagcttaagaatctctaagatttctgaattttggtacctgcatgcatgtgaataataatgcagaagcccgccgctgtggggatcgatgaggtatcttcaggagaagatacacaaggagtcgtcgtgcaaagttcggatcaacaaggacctctacaacaaggacaacatcatcatccatgaccatgctgacagcgcgccgccgctgccggacttcgccgtggctctcaaacccgacgagtatcgccttcctcccccactcactgacaccaattaaggatcgagtcgacaagggagaaattattaaggtccaaggcatcatgcagatgcagaggaggaagaatcaatcaaataaaatctattatgtatattcattcatattgtgccatgtatgtatgcatgggtgtcacaccgcaccacatgttgcaagaaaaatgaaagagaagctagttactactacctccatacatatatgtatgacattgactagtataaatttgaactagccaacatcatataaaaaaacctggagggagtactagctagctagctaggaaaaaaaattaaaatttttataaaagaaatctcaaataatgtgtatcttgtgtagctgctctggccgaatctcgtagttattagaattactagtctagaaatgtcatacttattattatatcatggaaaaaacaaatactccactcgaacacaggtccagatatccggtgttgtggttgagggatatgaatcagattcggccactagttaagggagacaaagtgaacttttattcgggcaggccggacttgcattgatgtgatgggccagcggcccatactgaaagtgaaggagccgccacgtctgacttttctttcttctctctctctctctctctgcgtccgtccctccctcgcttgacttctctctccgcgtcacttctcttccacctcttgtagtagctgcttctcctcccgatcgagcagaggcagtagtagcttagctagcagatatatactgtagcgatggagtaatatgatcgtcgatcgagccgatccgcgcgatgcagattcgccacgccctcgtcacctcattaccctgggtaacaatcgatcctttttttcttttcttttttgcataatattacgcctttttgcgcttcgattaaattgctagtgcctgtagaccttgtcccttcatatgcctgactgactgactccaacaggcgtgaattcaatggataaagacagtgaattttgattagaattagtgtgtttgtatatgctgctcgttctccctccccgtttagttaatctgtttgttgtttggcactgacagggatggttatcagctcggcattgatgatatggaagggattgattatcatgacagggagtgagtcgccactagttgtggttctatctgaaagcatggagcttggatttgaaagggtctgtttattttccttcctccatcccatggcatgaattcactactaatcactctaccattttcttcaaactgttgtcatctatatgtcctagcttgtgattcacctgatcaatgttagtgtgtttgcttgcctggcagggggatatcctgtttttgcaaatgagcaaacaccctatacgaacaggagatatagttgttttcaatgatgtaagtccctactgaattgtcactggtttatcgatcaccataaaaatattttctgaatcatcaacaaagcagccctttctccaaccttgttttaatgatgctaatacacgtgcatcatttgcaaggcactaattaacttattgcgatttgcctctttgatttgtagggccgtgaaattccaatcgtccatcgcgttattgaggtcgttaagctttgtaatatccacaccaatcagtctccccttacatttgatctcaggtattatgtctgaaaattttccttgttaattatattatatctccttgtaggttcacgaacgacgggataatgcacaagttgatttcctcacaaaaggtatacttacacttattactattttctatcagtggttttgacctcctaattttgttccttgcatattaattaagtaatctgaatcatatatatctgttggctcaagtgatgagcatgaattaatttgtactgtgaatagcgctgcgttatactgatcgatgaactgtctcattatcaggtgacaacaatcctatggacgaccgaattctttacacacatgggcagctttggcttcagcaacatcacatcatgggacgggccatagggtaaaaatactttcaccttggcttaattgtctactggagtagtacttgtgaatttgtgttttggtgatgggctgattaatatactgttcttctgtaatgttaacaggtatctacccaaagctgggtgggtgacattggtgatgactgagaaaccagttattaaggtatgcacatttacccttattatattactggtctatatagctataagcatatactagtgttgcaagagtcctactgtgagctttgcatcggtgcaaagaagttaattagttcgtgttttgtctgaaatgtgttgtttacctgctgatcgatgcgctggggctgctgctcatcacatcaagctagtacaacaaattggtcggaacatgtttctaacactcagggaattggaggaaagcattggtttttggaaggctaaaaaaaccagcagcatacttgtgtttagaggagtattaattagctactcctacagtattgtaatgtcgagggattttgcatattcttccgcccggacggttgggttcagaatgctatccaaaacttgtttaacaatgcgggatgcatacggaacctcacttagcttttacaactttctcgtttatcataaattcgcttaccaaactattaaatattctgtaaatatttttatattaaaaaaatttaaaataaacttatttttcaagtttatagctagtacactaatcatgttttttttttcattttgtgtacggcaaaaagcaaagcttccgagcatagactaaggccttgtttgtttcaatttaacattactgtaatccagattattgtaatctttaacgacttgggaaaaaaaattcaacaacaactttgaaataaaatttcccttgcaatctggaccgttcagtctgtggatcagacggcaaggcagatacactcgtcgtcatcggctgctactagtagtagcaccttgagtaagaggtgattcccgctgatggcgccgcctcccgccggcgtggaggccgtctgcgccgccgtcatcaaatccacgctaacccaaccccacaaccaccaccacctgctcgcggcctcgccctccctcctcgccgccgtcctccaccgcctctccccgctcccctccaccgcgctcgccttcttccgctccctgcctccgccccacccgctcgacgcctccctcgccctcctccgcctcctcgccccccacccgcgccaccaccccaccgtccgctccctcctccgcgacctctccctccgccacccgctctcctccccgctcctcctcccttccctcctcgccgacccccacctccccagctggctcctcctcctctctcccagtccgcccgcccgcacgacgccctccgcgtcttcgaccacatgcgcgcgcgcgaggtcgtccccgacgcgcatgcctcctccgcgctcctcaccgcgctcgcgaagtcccggatgacggccaccgcgcgcaaggtgttcgaccaaatgacgcgggccggggttgccatgaacacccacgtgtacaacgccatgctgcacgtctgcttgaaggccggggacgccgcgctcgctgagtctctgatgacgcggatggacgccgccggtgtgccgctcgataggttctccttcaacaccgtcatcgcgctctactgcaggaagggcatgcagtacgaggccatgtgcgtacgggagcggatggagaatcagggtgtcaaggctgacgtcgtcacatggaactcattgatccatggcttgtgtaaggagcgcagggtgaaggaggcgagtcagctgctgagagagatggcgatggcaggggtggcaccggaccatgtcacatacaccacgcttgtgatgggtactgtcgagcaggcgacttggaggaggcggtcaagctgcgaggggagatggaggcaatggggatgctaccaggtgtcgcgacatacaatgcgattctcaggaagctctgtgaagatggcaagatgaaggaggtcaatgtgttacttaatgagatggatgagaggaaggtgcaggctgatcatgtaacgtgcaacacgctgatcaacgcatactgcaagagaggggacatgacctcagcgctcaaggtgaaaagaaggatgatggagtcagggctacagttggatcagttcacttacaaggctctcgtccatggtttctgtaaggccaaggagctggatgaagccaaggaagccttgtttgagatgatgggtgcaggtactacaaatctaactaaaatttatggctctgattggtagcgatagtacatcatcaagacttaataatgcatattgagagatcctttttgttataatagaaaagcatgcagcatctttgactctgttttatcagttatcaatccatatcagtattttctaatgatgtttggtatatcttgtgttttttccccttgtacgcaggattttcacccaattatagtgtgttgtcatggattgtcgatggtttatgcaacaagaataatgcagttgcagttctagccattcctgatgaacttatgaaaagaggatttccaccagataaagcagtatataggtctctgatccgaaggctatgcaagaaagggtttattgatcttgctgggaatgtgttcaatgaaatgcaaggcaaaggtctagaagctgactgtcttgtgtatgctacacttgcgtgtgcatatctgactgctgggaagccagttgctgctttggatatcttgaatgagatggcgaagaagcagttgtacataacaccccagatttacaactgtatgtgtacctcttatgctgatgagaagggatcgcttaatatgctctgggttcatgccattgagagaggcctaatcacaaagagcgtatacaaagtgatgcaccaagcaagaatgaaatcttcaaatcctgcagtctagaatgcgaggaggggaatgctcatatttcagggatgaacttttcagagactgtgaattgagagtgggctatagaaatagtcttgcactttggtcttttgatgtcgatgatgctcgtgagtcacttaattggttccctctgttggctggcacttaatttactaaatcatagcaattagttagcacaagcagtttctttcttgtaccttccacatgtccctttgcatcattgatttctgctgtctgcaagaggtggcaccttgtgttctctggcttggtaaattcccatctctattccctttcatcctgcccggaacagagtggaggcgtgatgtttgtgatatgtaggtagggcagattgctagtgcttacatttcaatggcctgcctgccatttcttttagttttattggaaggaactctatctttctttatcaccttaattatcaatgcttgcattgcatgtacgcctgtatacatattagttcagttttctatgtctgattgattcttcagcccaccaatcattcaggtttttgtccaatgctattctgctttaaattgatgtttctttttctgaattcacagacaaatcaagctgcaaatttgcaggtgatggggtgcttcaattccaaaccaaacaatgccggtgcgatcagaagaagacatgggagggtagaagtggatgtttgcgcctggattatgagttcctgaggctcagaggagctgcgtcgaggacttggataattttcatggctactcgctactcatgagcactactcctgactaggcccaggaggcgcacgatcactcttcatggttcattcatggcacatctgctaaattgattatcaagaagaataatggcagaggtgatgaactaactgtctgaattcagtgttttttttttcgccgggaaggctgaaggagaccatccgagtatattaagaaggagtaaaagttacaagaaaaacaccacaactgaattcagtgcttgctggactgctgatcttctgcaggctttggaggattatttgcctctgctcttctcagcctagtcaaagatgataacctgatttccccttctttttaattggtctgaatgaaatccaggagatttgtgtcagtcgaggttgaattcttttacagggagcgagttggaagatagtacaattttgcatttatgaacgaagaggatgatgcagaggtccgcgtgcacctatattgttgcatgtggtgtaggacaataggagtgatactgtactgtgtttgatcatctatttgtcttgtgtaccgtcaatgcccagtgcttagaatgagatgctacctgttgtcttggacacgtgacggctatgctgcattcgtccgaagcaatttttgtgcgtcttcctaagacatgtattgagggataccatgctaatataaggtatctgagggtctggagcaatatgtaagcatatgagatacagataattagactctgaaactttgtgtttgtattccatgataagtttgctgctgtgatatcaactgccctctaaattggaactgttagtttgccggaataagttcaccggaggtccctcaatttaacagcgagattttttgaggtcccttaaccacaaaaccagaaatgtgtacccctaaactcattcaaactgttcaccggaggtctctcggcagtatttttgcccggttttactgacgtggcatcctagtcagcaaaaaaaatttaaaaacacatggggcccacatgtcagcttcacatctttttttctcctcttttcttctccttctctcctcttctcttttcttttctctctcttctcttctccttcaggctgcgggcggagcagccgcgcgccgtggccgccgccgtcgtcggctctccaccgtcgtcgtcgccgtgggcgaggctatgcggcgcggccgtccggtggcggagcggaggcagcggagcgcggcggcggagcggaggcagcaggcggagtggcgagcacggatgcaggcggcgcagcggagggcgagcgcggcaacagagcagcggaaggcgcgagcgcggcggtgggccgagcagtggagcgcaagcaggccgcggacagagtagcggagcgcgagcgcggcggtggagcggcggcgagcgagcgcggtggccagcgagtttaggagggagggggaggcagccgacaaccaagaaacaatcg

SEQ ID NO: 1371 - DNA, 3912 bp, Oryza sativa
aagctcctcgtcccatccactgtcttccgcttcgctagctcgccctccgctgctttgcccaccgctgcgctcgcccgccgccgctcctccgccgcgctcgccttccgctgcaccccccgcatccgcgctcctccactgcacgtaatggcatatatacatgtgagtgtgctcagccatatacacatgcttggttaatatatacgtctgcatgttatcgggcggcaaaccaacaagaagctagctaggctatagctggtcgtctccatgcatgcatatatatgctcgtacgaagacgcatgtacatgcggccatctgtacccggtgtatatgcgtatgagctacgacgtcaagtgctaccgcgacgtcggcgaagacgacgagggtcaccgcgcccgcgccgaccaccgtccacgacgccgatggcacgccgagcgtggacacgctcctgctgcagctgcgcgagctgggcgtccgggagggccatgggatcaggccggcgacgctgccgccgccaccactgtcgcggcgtcagctggcacttcgagccacctatgcacggccactgcgacgcctggccgatgccgccgaacggccgcgccgtgtagcctcgcccatggcgacgacgacggcggccacggcgcgcggctgctccgcccgtagcctccgctccgccgccgggctcgcccgccgtccgctccgcccacagcccgccaccgctctgctgccgcgctcggccatcgcgactgcgcccgccgccagcctgaaggagaagagagaggagagaagagaaaagagaagaaagggagaagaaaagagaagaaaaaatatgtgcagctgacatgtgggccccacgtaccttttattttttttttgctgagtaggatgccacgtcagcaaaactgggcaaaaatactgccgagggacctccggtgaacggtttgagtaagtttaggggtagacatttctggttttgtggttaagggacctcaaaaaatctcgctgttaagttcctccggtgaacttattcctagtttgccaccgctcgctgggattgctcttcttggattattattattgggccttgagtttttgtacagacgggctgctctccgacggcccacctggttatcaatcagtacggccgggccaaccaatgtgcttcccgacggcgacggctgcgaagaggataagcaaagcagcaagagtgagctgctgctgctcagctcggcgatgagatgatgccaccaccagttcaaaccctacgcctcctcctcctcacccctttcccgccacctcctcgcctccgcttccaccgccttacggccacagggaggtccgacaatgccgccgcggcgtccggcaccacggcgagggagcgccgcctcgccaaggtgcgggaggagcgccgccgccgtcagcacgagctcgacaacacctatcccggctgggcaaggcactgtccttttaccctctacatactctgctcctggatctggattcgcctcccttccctgctcactcaaatccatcttctgcatcatcatcaccatcatccatacagatagatacagtagatttgtgggctggtgctaatgctgcctgctgtgcaaatgcagggttctggagaatgcctgcagggacgacgacgaactccgcgccattctcggtgatagcatcgggaacccagagctcatgaagcaaagggtggttccctaatttatttgagctttctttctcgccacttcaaacttctcttctagtaatacttacttgtacatttacttgtgtgcacgggtggcagatccaagaaagggtacgcaagaaaggcagggcacaattcaacaaatccaagacagggtctattgttgcattcaaagtcagctttcgagagtgagtttcaattccacctaagatttaatgactgataaaaccttcaatgtcatagttgagcatcatctagattttctcttctttttttttctcagtttgatacgatgatacgactttggactattaatacactaactcagtagctaaattgatatcatactcctctgtgtatgcatattagttccactgactgaatgccacttatctttctatctttgcagcttcaacccactaaattcattcatttggtttgaactctttggagaaccaacggatcgagatgttgatctgcttggcggtgtaaagtgacattgtatttctgttcctttggattctcattattcagaaagaaatcaccctgtcttgacatcaacatcatttatattctgcaggtgattcaggcttggtatgtcatggggagattaggagcttacaactcttcaaatttgcaggttggacttgttcaagtgttggaaactacaatgattacattatttttttatgactcgtcacctacgtagggagaaaacaaaacatctcatctttttatttcttgaaaattcctacgtcaaccatcatattgcctaattaaccaacaatgcgtcatatctaagatacaccttctgggtttcattgccaaagcatggaaacatgaaattaattattcacgtgtcatatgtgccttccgaattttgtggaattgtatgcactattgtaatttgtgaaccatcttcttttgatgaaacttgtgaatcttctttacatggctagctttggacttaacttatgttgccaactcatggtcacatagtctaagttaatagcttagctggcttccttaccagtcatttttgtataatgagccattagtaaactgtaaacatgcctttttggtgctacctttttatcaactgcttacacaattatgtaacactggtgtgttatctatgcaagctgacttgcaattttgtctatttcaatttcagctggccaattcaatgctggactatgacccttcatatgattctgatcaagcttctggtgtgatgccttcatctttccatgatatcagtgatgtcgaattccaagacaattggggcagagtttggtgaggattggaaacatttatagtctggaaattgtgttatgggttctacagtactgaaaatgcactcttcattcagggtggatcttggaacatcggattatcttggattggatgtattactcaactgtcttacacaattaagctcagagtaagtcatctttctctataccttatacaaaacagtagcagctatagcttcaaatctgatcctatagtctttagttcaattgtgattgtggagataaatctgatcctatagtctttagttcaattgcggagagaaaatgaaacgttatctgaattgtgagagtaatataccactgtagaaatttctggcactctgcaaacatgtcagtttgtcacatgcctgtttctgaatatgtcacagatcagtcctaatatgtagttcatcgcccatcacgtacattatgagttacttttttgtattcaaaatgtttgtgcattgtaattagcttttgctgtgattgtggctttgacaaaaatttcaggcacttgggcatcaaacaagtggtatttggtggcaaaaaaatgggcgactgggaagaggggatgaagaactctgattacggatacaggcatttcaagatatagctgtaccgaggagtgatatgcaatggtcatgtgagggaggccttcatatgtactccaggcctctggggattctccggcctatagtggcaagacttttcacttgaagcagagaaattttttggacgactgaccaagattagtgtgcctagattgatcttgtgctcgtgtgtgtaaataattttaattttcctctaggttgtattagaactgaatccaacaatccagtaaaatgtattgtagcaattatatcaaacagttacaaaatcatgagcaattactgactgtactcctcgaatgacctg

SEQ ID NO: 1372 - DNA, 7021 bp, Oryza sativa
catgtaggttggaagagaagtaacaagctcagaagaggatgggatgtgttcactaccttgaatctgttaccgataagcgagccaatgtgactgttggtaattttcctatcaccaatagaagattcgatgtcccactctaaatcaggcattgatgtaaatccgtaccagagttgatcagaaggaggaggtttcacatgcacacgcaggacacctcgaacagatgaaatttttatcgccagagagagcggcacctgtgcaagaagatcttaagatcactggtgaaatattcatattgttttaaagagaaatctccataactttaagcttctaaaataagtttgatgtacgatttcactggcagagatgtaccaaggctaatgttacagtttttaagagcaacttatcaaatacagagatgacctgagatgtgctcagaaacatgtaacacgtaggaaagagatgcatgaaggccaaaaggagaggtgtaaacctgtgagacatgatctgctatggaatgcatgatatttttccaccctgatatataggccgatgtccatccagtgctcttgggctgactaccatctgatacaaaagatcacacaaggtctggatcactaaacatatcttgattcttgatgcatcagaggactgggcaaccttctaaccataattgtaataaagcttacatcaagtcagtacaagcatacataagcaaaacaggaaaacaacaagctgatcatgccagcggtagatcataactaattggattctttttactcttaattgtaatgcagtcattggtaggacaatcataaacagttactcaaagaaacaaatgaaataaacaagaaaacacatatatgaaattgaagcatacctggttcacctttttcttcaactgaggaaactgaattttgggaatctcgaaattggttaccgtattgttcaatactctcaagaagatctgattcaacctctccatttgagtctgtaccaaagttacttttcattatgtccttctgtaactctggttcctgaacctcgagtcttgtttcaatgtgcagtagtattccactagaatattcaaaatcaacttcaaaagcccataactcattcaaatccagtggaaggactctcatcgcgtgtacataaggtggaagctttccaaggctgaagtcagcaagtgtgatgtcaccaacataaggtggggtcctcatgcttgataacgttcgctaacaaaataaaattcaactaattaacaagtacagacaagagcaggttactttgtaaacataagcagtatatctaacctgaatgcgtgctttgatggccttgtgtatctcatcgctcattttagcatcaaaaaacaaccgtgaagataaaaggttccaacaaagtgtaccttcatctgctattctatcatcggcatttacatcagggaaagctgaaggttgtccaatttgacccagagcaggagacgttggactgggtttcactgtatcttgtgatgaactgctattggacttgtcatcttgtgaacccattaatccttcaataaacggtgtgccctgatagctgcgtaatttatccaatatctttctttctccttgtgtagatgatccggaacttgtcttaccctctaacggaacctttgtagatgccttctttgccagctttttgagaaagagacggaccttggaagacccatcagtctttattgccctgtccataacctcatggtcctcactagaaaatactgtaggctttaggaaacctgggtattcagaatttaatgatgatatgtaattattgaactcctcgctcagcttggcatgccaattctttttctccttgtcagcagtagctgcaagacgaagtgctttacaccatgattccttctcccaggaagtttcagcataaagatagcataccttgcttccattataaatttgatattccttgctttccagtttaataggataccttttagccctgaaagttaagcaaaggtactaaagttacacatagagtgaagtatacgagcaaaaaaaaaaccctagtagcagaagtaaaacagctgaatgaaaggagcagaacagaaagctgcttggcaagtacttctaactgtcttctaaagaagtacattccgtctctataggagttccttcaagaaataaaatccatataagctggctccaacatgtacaaatacatgatttaccttcaaacaaaagcatttctacatgcctctgaaattttatttggcaaatcgcgacacaaggttaaacttgactgtaaattcacaatgtgtacaactggaaactggataggggtaaaaaaaagatgagctcatgatgaaaagtatcattttctcctgcaccaaatactgaccatttgcgagagggcatacttgatgctgaaacagcaaatactgtgcaattcagaagcttaatggttgtgtggaagccatcaggaccagacaaaataagtgaacgccccttgattttagccgacctctttgcaggaaaaacctccacaatattctttttttcctttgtttctttagggcctccaatcgatgagcgttcattactagctttaggtgtcttttctggctctagtatccacagaaagccctgtaaacatacagcatctattttaagcaggatcatccttagtaactaaaaaacatggaggctctaaagaggaatctaaatgaaatgttattgcaaatatagtatgccaaagcaatttggatgagctctggattgcaatggtatttaagccattttatccaaaatgcaagtatattttccttgaaccatattgttcaacctttataagctcaatgttgagtacccatgatgtaaaacagaactagcataaagatgcagtgcaaaaatatgtaaaaacaaggaacatcatggtgaaaggaagttacaggaaaaaaaacgttgcattcatgaaaatataaccaggtcgtatgtatattggtcagtggtgaacatgtatcagctgtgataattggaaccaaaaggaaacgattatgtttaggtctcttcagcatgtaacctactagttcatccatagagaattcattaagcttagttgtggagtctactacatgtacaagtacaacacttgtgatgaagatgagaacatgtaggtgtttccgcacaggagaacaatatacactgagatgagcaggtgtatgagctgggcatgccaatggatagaatcatgggccaaaaactaagtagaggtcaatgccaggagcaaattagaatttgaaataaaaaaaaggccaggaacttaagaagtaaacatatatggcatgcatgaaccctaggagcaatttgcttggataacaaaaggggaacataaaattttgcgatgaataaccagaataacagaacccaatcactgatattagtatttggaacaactgaacgatccaggatgtacaaaaattgcggtctgaacacaaaggcatgtcgattctctagttgaagtgcagcaattggggaaaaagaaaccttgttagcatatgaatgcacagtagtagcattttgctcctcccaagtaagtaattagcagtggaagcaagctgcaactatttcatagtaagataaaaaaaaacaggagatcgaatcgagaggtgatccctagctccaaagctgcagaagcagttactgttactagtattccagcgcgccgcattcgccctatcccctatcccctatccccgaggagggtaatcgaagcgagaggtacgtgagtggaagcagcctgacctgcttctcgtacgggaaggggcgttcgccggggagctcgtcggcgtccggcgcgggctgcggggcagagtcccggcggcggaggcggcggacgagccagaggagcgcggcggcctcgagcgccgccagagccaggaggccgaggaggaatcccagcaggaaggcgagggccatggcctcgccgccgaagacgtacggcgacggcgacggcgacggtgagcgacgtggaggttgaggacctggttgtaaataatttgtaggagtgggagggaccggaatgtaaagagacaaggttggggtgggggggaacccgatacgcaagacgcaaggatggcgcggtcgctggttgggtcgtctcgtctcgtctactttacacgatggcgcgtgggtcccacgcggtgtctctgcggtgggtgggacccacttgtcggtgcccccatcactgcaccttttcttttttctttgagtggttcgttcgcttcgttgcttcacgccacgcgttgggttgggtttgaattcttcgtctttgcttgctgctgcaatcatactactagtacagtatttgcttcaaacgtccgaattaattaaattaggctactaatttgggaaaaaaaatagagaggacaagagttcctagctacctataaattaaatacttccacggataaaaaaaaagttaatgtttagaacaagattcaatcactcttaatgggcgggttcggttgtaagaacagtgaagcaagcaaaaaaaaaaaaggcagcggctgcaagcaggcccaatattacaaccagcttatattagaacaagttataaaacctagtaacaactcatatacatttcaaagtaattatcttcatgtcatcccttttgtttcaaattaaacatttgaaaaattatcaatgaatggaattttataagtaaccgaatcttattccaaatgttgaatattatcaaccgaatgggatagtccatattttcacgtgtttttcatagacgacgtggagggctactttatttgagattttctctcatccttggagagaagggaaaaaaaagcaatttacactctcatttctcatttacatccaatttatctttccagctctattgtcgatctttttccctgtcaagtcattaccagcaacaattcctacgtagttcgtacctgttcataattctatgaagatagagtgatgtagtctactccctccgtcctataaaatacgaatctagacatacgtttgtctagatttatagtactagaatgtgtcacatccggtactatatttgttttttatgggacggaaggagtacaacatacttgctgttgatgaaaaaaaaaaagtcctttaaattcagtatagctcgcaaggtgactgacaaaacaatttcctccatcctagtttggccttcttctagcaccaccggaggctgagtatcgagtataattaagcttaagcaacaagcgtcaggttcagaatgcagattgccggcagtgagacgtgaagaagatgaagtcaggatggtaagctcgcagctgcttgagccaagaagacgctgcccagaagagatcagagctcctcgacgatgtccacagcttcccttccgctctgtacgtcgccagcccaaacggcgaaacaccaacaacgctcctcccctcctcaacattatctgcaaattagcccatgcatttccatcatcaacatcgatctaattacactgtcagtaatgcacatatcacagccacaagattaacgaattgatgttatataggagtatgtaatatgtggatggattacgtaccttggaaaactgaggagagggaatgataggttaggaaacacgtagataaccccttgaggtttccacgagctgggatatgataaatcgggtacctgaatgcatgcagattattgttgacaagattagttgagttcaagtcaagcatctcaacaagctgttcctttgtttagttttctgaatatacattagatgtaatgtgcaattatgtatgcatttgaacctctagcttcagagcaataatttaacaatcaaagaagtgaaaatgatgtgtaaattcaagtaccatgctacagacatccagctcgaaggtgaaagttgtgcactgctgagagatgtcaagcatggataatgctgagccagctctgccacctaatcaataacacaacgtatgcaacaccaaacttaattagagtactaatgtggtaagttatttgcattgatcacattgaagactgaaacaaaactagtaaccttatctgctagcgggactctctcgtagggcgagctccactcgttgtactgaaaattcaggcagccggcaccttgctttgcagaaaccgattcagagctatcatggcttgagtcgtcgtcatcagacatagcagcatcccatgatcttgataacttgtcgcctgtactatcatcactccaagaatcactctcgctccctgcgctgcctctgtatgatttcatcgaatggcattagttcgatcagatcggaaacaattaataggccaaagaggattaagggtttgcagtaaagtaaaacaatgtacaggtaggttgcatacagctacaagagacatgagattgagaggtagagagagtagcaacgaacctggagaaagcaaggagagacttggtggaggtgtatatctgaatggcagataagtagggaacaaaatgttgggtgatggtgttgccggattcaagacggacaggaacagcaaggccatacgcactgctctcagcgtaatgctcccagagatcctcaagcgcgaagtaatcgacctcgtctttcttcttgtcgagttgccaaactttgctgggatcttggaaacattcctacattattgaatattgaaagaagaagaagaagaagaagaagaagaagaagaagaagaagaagagagagaaatagagatgataatttgtttgctgaaagtatgcaagggcaggagagatgttaatttgagcagaatgtataccatggaggcggagcgccagcgcaggcatggagtggcggcctggaggaacacctccaggttgttatcggtattactcttcttcttctccatcctcgaatcgaatcgaatcgcccagaagcgaccaatgctcctcctagctagtacaatgcaatccttgatacgctagttattcaaatgcaatatgaaccagctgctgatcaatctctctctaaaat

SEQ ID NO: 1373 - DNA, 10401 bp, Oryza sativa
cactgcaagatttagcggaccatatcgtggatcagtatactccggaaatggcaatgcactgataaattcagcaccatggcgaggcaatcgctgatcaaatgagctagaagggggccagtcctttagcttaagcatctcaggccagtaggtcctgggatgagttctgccccttgtatatcccataaaaaacatgtgtatgttaatttccacctggaaaatcagatatgaatgtagtaagcgccagaaagttcaactgtagatgaagaaagataggtttctctcatttcaacagaaacacataacaaacattatttaatagggaagctcaattcactaatggatcaacaaaattagttaaactggtcaattatttaatcattatgtgtattactttcttctggaaaggcaacacatgcacacattatttcattgtcgcatttgaaaataagcatcatctcatgtatttctgccaaaagataaaatcaagattatgccaggtatgtaaaaagagtatgaactgtggtaaagtacaataaaccaaacccgagaaaaagagtactatcacataaacacattagagatcctcacctcacaccagtcgaggcaatctactgccctcacagcaaactgctcatcttctgccttccctttggttcgttctcgtactgcccgccacataaccatcggctcccagctaagaccagaagttagcttaagagtgtctgaaacaacaactggttcgccctttgcccaatgcatctgaaagtgcaacaggtcagcgtcctggatatcagtggccaccggacagtataagtagttatcactcgagtcctccctatttgcagcctgacgtaatttcttgctgtcacttcttatcttgcctgagtgatcaaaacaagggcacagctcacttgttctacctagttcttttgcaaatgtttcactccagaagaccttctcagatctatcttctaattcagggagcaacttctctggaaacaagcatttcagatctagagatgaaaaactgcagtcttccttttcctttcgtgggcaaggtatgctaccattactgtttgctttccaaagtaacagagccttcttttggttttcgtcagaagccatgcctttgtttgactcactgttttgggtgtcgctgcgacacttcaaagagtccctttggttctcaccatctgacagaatcttaccaaaagcataatccttgtctctttcttcaggatccaaaatttccacctcttctcctccagggatctcacctttgcgaagctcctggcagcaggtcaagcacaagtcatagaaacagtgcttgcagcttctatgaaaatcaactatagaagtgctgcatctattgctgcagttgacaacaaaattggatcagatgctttctggtattatatcatagcataaagtgaacaaggaaagaacttaaccaatagacacgctcatctagatcacacacagcttgttccacctttatttgatcaactgaaacacctgtaaacaaaacaagatgagcattcatagccataccagcttccagtctgtgtgctagagaaccataccttgtatcttagcctctaattccttctctgccatctgctcctgtcgcagttctatcagccaaggacgcaacaagcgtaacacatgacaggcataacgaatctgattttctttagaaatttcctttcttggaggctgcttcacaatgaatggaatgaactattcagtaagaatactagaaagtgtcatttattaactttaaaaagaatatgtcctgaagaaatggaaatgctgtaaagaaaagatgagatggaaatgcaaacctcttcgacacctctcattcgcaggcatgccttgcaattacaattcttgcgacaataagggcattttgcagcaaattcattttcaggcaaatcaggatacctgtccagttgaattatacaacacatgggatcaccttaaaaggttactagaggtatagtgcataaaaacatatgtaccaaggcaaacataagatgaaacaagaataataccataaaaaatgtaagcagaaaaaatgggtgttatgggactatgggtaagatgaaagcaaaatgtacatttaagcctataggaaaacagtaggctgggagtccaactagtagactagaagtttgaggaaacttggcacaccattgattaatgcatggcacacaaaagcgcttattgttgcaagtcttgcaccagaccactctccctttgtcatttctctggcattggtgacacattaaggcgttttcacctgtcaacattttcttccctttctacataattgaaacaacgaaaagttagcacacccatcaaaacagttatacaattttttttaaaaaaaaaacttatacaaagaaacgtgtagtttatgaccccattattttctgccgctcctgtgtctcctctcttacgcttcttttcagtcttcgaaaccttatcattgactaacatcttgccttttactgcatttgcgttatgctgtcgaggaaagaaagtcatgggttatttcggtatcaatatcaaagagctggggttatgtttcactttgtaaagaacacaaaagtgcaccttccaagcaagtacatgaaacctctgaaattttcatgctttgaatgacaataacatgcttaaattaagcatgtagttagttacatcgaatcataacaggtattcagacattatctaaaaagacaagaattcaagcaagcacttgcactgtcataaaaaatctatgcaaaaccagcttgcatagaatcttgaaacttcttctaaaaaaaaataatcttgaaactgaccaagttcaggagaaacataatggtgggtttatcattaagcaataaataaagcgactaaaattgacggtgaaactgcgatcttactagggagacttgataattaggcccccacaaaacaaaattaatttaaagaagagatttggcttggtcgatgaatcgcaggtagcttgagaaggtatcaggtactcgttcacaaggtagcaggtcgagtaggaaacgttcaaaagtaacgatgcaggcaaatatatagtgaactgcgtacatgtcacaaaccaaaccgttcccaaataacttgtaaaaggaacgttgagtagtttaccctgtgggttttgatgttctcttgatccactttcttttttctgggtcctctcttcttccctgcatcacgtcttttgggcttgttgagaggctcgagaagttgatcagttttctcgacatcctattggcaaaacagcaattggtcagtataactttataagttctccctcaaagagtaccaaaatccatactagatagatactccatccgtttcatattacaagtcgtttgacttttttcctagttaagtttgttcgagtttttgactaagtttatagaaaaatgtagagtactatttcaacacaaaataaacatattattaaaatatattcaatgtagatttagtgaaactaatttgacattttagatgttgttaaattgtactataaacttgatcaaacttaatcaagtttgactagggaaaaaagtgaaactaattatagtatgaaacggatggagtagataaaagcacaaacactgaaacagcaacggatagcattttggagaaagaaccgaaaaaccgtaactttctttgacgtaaataaatttaaagatatttgtagcaatcgggcgaaatgagatgagaaagcaatggtggaagaatctaggggaaaaaatcaagatgttttgggatataaagggatcggattcgaaggaataattccgtactagtatatcctataccagtactagtatttttttaatcagattcagattcgatacagaggatacacggttgctggaatggaatggaagatactcgagcggaaactgaacagacaaaacaaaatgtatattgattgattgaacacactgcgtctgcaatggctgcttgattagcaacaagaacaagctgtttgatcaacacatatgacaggacagagggggggagagagagagattccctacctcatcatcgtctggcgcgttgaaggcgttgggcggcggcttcctttccctgagcgccccgggcctcgtcgcaacaccgcgcccttcttcctccggcctcatcgccggcgggcggaaagcccggtcgccgttccggcgcctccccttggcgcccgatcccctctgcttaccactcttccgcttcgcctcctcgccggatccgtcgatcgccacctcctccaccttctccgccgccatggcggtgcggcgatggtattgatattggggcaaaacgagagagatagagtggcggctgcggcgtaggctctcaagtgtcctccttttattacccgcgcttccaatattccaaccacagttacaaaaaggtcctccaagtttttcctttttttcgttttgctttcacaacatttgaatgcatgcccgtgctttacattgcatatccaattttccaaataatactaataccgtgcaaatgcaactggttacttatatataaatatgatggtcattaagcttcaagttttcactagtgttttccttaggaagctcttacgcacaaacacaagaagaaacgttcagggatctttcgactaactccgtgaggtggtgagcgtttttttttcttacgcacaaacacatagtatatgtacgatgttttgctaacgtatggattttcccgcgcaattttgagcgggacacaaggttttaaatgtatgaattgattgaatatacaataatagcttttgtttcgaaatatacgtagtccatattttgtatataactatatcagtcgatatctcgacggttacaatctaaatccaccgttattatttgaataggttacatttttaatatagagtatgatgattagataacagatagtaataaattttcccgcgtaaaattggtacgtgcttttttatattatattttaaggagtggattgcataatagagtactccgcgtctagaccatagccatcattctctcttttaacacctaaaaaaagcatttgttcaatgtacagttaattcaccttatttaaaatgtacagtcgtttaagcttgatcttttccctctaaaaaaatgtatatctcttgcttctgtttacgtgcattttgtattttttttacagtaacatcaatcatcaatatatatacacgtaatatggtacacacgcatagtgaaaatatttcatcttgttttgtctgattattaaaaatgctgtaaaccatggtgattatttatcacggaggggacatgtaaatgagtaactagcgaagatatactgtgtacacaatggaagcaagcaatagaaggagtttgtgatctatgtgttttgaatgtgtgattttatggctgggtttgtagagattggtcgaagcaacacctctctctctctcttatactatggccgagtttagttttaaactttttcttcaaacttctaacttttccattatgttaaaactttcttacacactaacttataatttttccgttccatcgttctaattccaatcaaactttcaattttggcgtgaactaaacacatccacgtacaaactttcaatttttccgtcacatcgttccaatttcaacaaaacttccaattttgatgtgaactaaacacaccctatgaatggaatcgggtgaagggaagggtgtgttttagttcaagctaaaattggaagtttgtttaaaattggaatgatgtgacggaaaagttggaagtttatgtgtgtagaaaagttttgatgtaatgaaaaagttggaagtttttttttttaaaaaatatggaactaaattcggccgaagtgtactcaatcatagaaacaagaaaatgtggggggaccttgtgtaaaaaaacaggtactagtagtatgtcatgtcctcctcgagacgcgcacaggcaggcaggcaaaacaggcggccgcaccccgttcacttccttctttctggctgctgcagccgtaccaacgcacacacgcaccgcacctcctccagcgcgcgggcaccggactagtaggaggagtagccttcgaattttgaaatttgaaccctcaaccatttggagggaagctggaaaggaaaggaatccatcccatccacgagtcaattcaaggtttgaccacactctttccgttcccctcccaaaggcgtattttccctcgatacgtctcctttcttccccaccaccaccagaccagagacagggggagagatggtgtggctgcagtacaccgcacccgctcccagcgcgccgccaccgcctgcttcttcctcaccggcgtcgccctcatcctcgccgccgcccgcctctcctacgccaacatcgagccccagcgcgccaaggccgccgaccgacgccgtgtcctcgaggacttcatccgccgcaagcgcaaccacgccctggacctggaggatccccctcctaaaccctagctccacctgcctcctccttcttccttcatcccaggttccccgtcagattcctcactctgctgctctaatctaatcttgtaccatgtggattggatgcaactccacctagacctagcaaggaataaatagcatagggatttctattttacttactcactcactgctgtatgcatcactcttttgcctaaattacatcaataatattaatatatcgattggtttattcattcagtggtgattattcctgcaattcacttcttacgtccatcaaacgtttgttactcttactaacttttattttcattaatttcttccgcgaatgccgtctctaattcttgcaatccaacctttcctactcacaattacaacagcatgcgaatgaatctcgatcaagggatcctaccactgttttctacttcatgtactattcattccattttttgttttccccctttaatttctttacctctccttcagccttgtcaattgcaattcaggtattgccaatctaatggacaaaattacccccaaggagtttgtcataaccacatctacttcttttaactccactaaacccattgggacacctctgggtttgctaccaatgctactcatcatgctgcctatatgtgatatctcatcactgctaatcaacaactgaactgacaagattatctgcctacatagtcaagaattactgcaacttgataagaatatttttgtacaactaggaacccttatgcctgtataatctccacctatgctactgatttccctcactgctgtatgactcactacatttcctaaatgtcatcataatacattatttgattcatcggctgtttcccaattcacatgcatcgcacattttcgattgggctatcttcttttgttttcgtacttgatagaaccatgctcctgttttcagtcttacaatctgcgtatctctcctccacctgtcagtttattttgcaaatctcacaatctgcgtatccctcctccagctgtcagttttttttcaatgcaaccattttttccaaaggataggaaacaaataatcaagagaacctacttttgtcttctattctttctgaagcttgattttattttttttcctttacttagcttcccttcaatggttcaacctgagttgttgtcaattgcacttcaggcatgattccgggacataacccagagtatctactagttctttcaagtccactagagctcttggcagagcttttggtttataacatcatcatactatatgtgctatcatcagtacattcaacaacttagaaatgagaagattatctggaaacatatatcagagtcattgcttaatgttgcatcttgataaaaaaaatgttggcagcactaggggccattattcttgatattcagtaaccctcgggtaaacagccatgtttccagggctgaaggctggataggccatcttttttagctattttcatttccttcctcatattgcattctgatgtttcaagctgttatgaacttacgacccatgctgcatccacttttttctgcatgcattatgtcagctattttctagttcaagcatacatgctcaaaaatttttatattcagaacatgttattcacattttctaatcttttcttttttgttgtgtaattgatgatctatgctatgtagacatactatacatgatgaaactaatggcaatccggttgtcagtagtcagtatgtagaggcaatgattttttagaagtggatgtggcctcatatgacaggcatcaagtcattgggacaaagcggtaaggtgattcttttcttgctgaaattcttcaatgtcaaatgaacaacaacaaaaagcaatggcatgatttctgagggacatatgattgctggggtttattctatgaccatgttagtccaatctgccaaaaaaaaaaaacagccactattgcacacagatagttactgtaaattcccctttctttttgcccggtcggcctgtaaaatcctatttccttttcctctttttaaattttaaattagtaaatgatcttagtttcacccactatacaattatgcctgccaattttcacttatggcttgattcctcactgctagcagttctgtctctcttgtgactacacaggttcatcatggtgatttgttggagtattcttcaataaggatcgtgaatgtttacagtgcagaaaaatatgtgttggaatgttgatgaaatcaaataatagaccaatttttttggtggagattcttctgtctcaaattctcaatgttgagatagtttgcctcagcaaggtcagttatcaattttgtgcaaactatggccgtactcctgcaaccaaaattcttgtctcttgcaatgtaatatctgatcacatggaatgcattgcctgtaggccgtaggggcggtttcttttcctgctctgtgttggttgcaatgtgcatgcaaggattggtcatcaatttgggaacacctcaattctgacatgtaccaatttagtaccattcatggtggagccattcaggtgaatgatccagttatccaggcaagtactattatgcatctagcattgaccttagttttttttttctattcagtataatcactcgtcatgtttggaaccatttggttgtatttgtcaatgaagtttgaatatacagggtagtttgtgggtagttcttgctgtgttttctttccacactagtgtcgcccgtttggtaacataactttaaacacttaattgtgtacttggtctaaacaaaacacatagagctggtaaccatagtgggatttgatgatttaccgctgtatttttctgaggactaccctcgtacagtagaaactagtgtagaaagtagaaagacaaggaactctactgtatacaatcactcccagattgacctgcaacccacacaggacgttcactatgcaaaagaccacgtggacgtcaatactatttgagggggcccataactatatataggcctgccccccatatctccgcatattttggatcgcttgtttattcgggctgggccatatgtagtactggcccaattcaatttagtaacaaacaattaattgtaccggtcccagttaccccgagcacaaatcagataatctctggtcaaattaggtgtcaaactgatacaatcgttcaggtctatgaattatatatagtgaggatgaggatttatatgtatgtaaaaaaccaaatatttttagtcttggctcccttctttttaggatatacggatcatatcatatactaccaggagaatcttcacctgattctaacagcaaccagaaataataaaaaaaatagagcccagattaattaaggacggacagccgaaaagggggattgcccacaaatgttgcaattagatactccatagtatattaagtagctgattatattaagccatagcccgcccacttcaaccaccgtgactgcatgtagtaggataactaaaagctttatacggagtacatattgatctgttcatgtgcctttgctactgattagagaaaatctggcatgcaagtctggttgccactgatgtttgatactacctgtgagctctgcaactgcaagagtctgcagagctgaaatcaatttaattaagcgcactgattacaatcaatctttgttgataaatcaaagcctggacacatcaagatctatcggctgcattttctctctcaaaaaaaaaaaagatctatcggctgcatcgcacagtccatgcgcttgtctctagctagcggaagcagggaaagtcttgtctatcttttttctggagtagttgagactttgagagagagaagccctgttggcgcagtgcctgttttgctgcttggcgt

SEQ ID NO: 1374 - DNA, 10313 bp, Oryza sativa
tttagtgcaaatttcagccctgtgctctgtgctctttgcttcttcccagttgggttgacataggagctttagccgctgattaggttaggtctctgcttctctcatccatccatccatccatccatccatcccctgctgtgcaccgtgactccaccaccaccatcaacaagatgaaaaacaaactcttcttccttttcttgccttgccttgcttgctttgcagtaatcaggggaactgctctctcgtgcgtgtgatttctagtcagtcagtgtggacatctctaaattcatttgtgatttccttcctcatttcgttgcatcggtgtgctatgctgctccaagaaacaagacaaagaaaagaaggcgtgcttgcttgcttgcttgtctgctgcacgagtcatagttggcgtcaatcacatgtacagctgcaaatgctgtgccaagaaatgaacaaaagaaatttacctgacccaaaagaaggccatgtaagtcgtctcacttgttcctctgtttctgtctgcttgctgctctagctctttaggccttttgtccagaattcttcttcttcttcttcttcttgttgctcttgtgttcatctctggattggattagtgcttggggagaataatagtaataataagtaattgttggtaggctggtagctcagctcctctgtacgtatgccatgtatgtatgtatgtatgtatggattgtttcatgtgttaaattatcaccatgaatgattgagaatgaatgaatggacaaaataagcaaggagaaacacacggaatcaagaatgcatcttcctgctgcctgcctggctgcctgcctgcctgtgactgttagttgctatgtctctgtcactcttttttccttctagtagtaccatgatatgcttattattatcattatcgtcatgctcgcaaaaactgcaagttcatcgtcaattagagtctttggatagcattgcaatgtcaatgttgcagtaagcagcaagcactgtgcatgtgcgctgcgctggaattagaataataccgtgggggtgggggagggcgtctcggtggcaaaccaacttttttatgtggaggaatcctgtctctgcgcctggtttggttggtgccctgtttaatttatcagtgcacgataatgaaggcgcgcttgcacttagcttttctttctttcttccttgtcctttttatttttgtgtgttcagtgggtgtgatccctttcgatctctctgcctttcccttttttcctcgctcctctcttttctacacttcctttttcatcctggataacactcaagatggtcaactctgtatctgcttatgcatcatcttgtctctgccctcccactgtatgtgcgtttgcttctgctgctttagtgctccttgtgtagtactagcagtaattcttttgcattactcaaatgattaagataaaagtgagcttggatgtcaacaacattgttttagtactactactcctttctctctttctctgcctcttttgttcgtgcttgattacatactcagatagtgtgccgtaaagttacctgatccaaaaagctacagtacagatataagtacatatacaccccttggtaaaaaaaaaaggattgtactagtagtaaaacagaagcttgatgaaatgatgatgatgataggtactgcatcgtccaagatcctgtcttgtggctttaataattggataatggtggacaagatggcgctcgtacttcactgccatctatcgttagctcagtttgtctgttaaaaactgttctagtggtagaaatttttttttctgtgccctatggctcaatagctgtgagcagtaattgttagagcaatggagattgtttcaactttcatcaagcactttcctttgaactggagtaatactgtggaaatctgaaattcaggtgttggggaaaaatgtggcttcaaattgcactttgttttagggaatggtattgcgaatttgcgatggttgataaggaatcgaatgatctttcgctttccgtccaatgacggagccgaattggggatgttgctttcgttgctgtgcttgcatcattaacatgttaaggagtctataatatctgcagcaggtgtggccaatgaagccaggcaaatactgctagttgcaggaaaaatatagcagcctgtgcatgtgcacagcgcaaaaaaaggattgaatttgacttggactgtggcagcctgttgtttctggaccgaacaaatgcaagcactgcagcagcagcagcagcaggtctctttctttcagcatacaagggttttagaagatgatgtgaaatgaattgatccccattttcctgccttaaatatcatttatgtgcctctttttacttactacactaaagtaatactacatcttactactggtgacttggtgagcaatttctgtgactaatgagggatgtgtgaaatgaatagcaaaacttggacgaaaagggcgaggcgaatttccagcccaccttaacctaacctgccccatctttcttcctttcctttttgtttccttggcactttggcaggaggctaggccggggagcttctagcagctgcagcttcttctagaatctccagtagccagaagctcctccaaacagttcagttttttatctagattctgaaaatctgtagttgtagaatctgggaaatgaattagaagccagaagctaggtttcctagcaagaatctggaaaatgaattagaagccagaagctaggtttcctagcttttctagattctcaccagctagcttctcagcagtagcttcttagaattttaagctcccccaaacaagccccacgaccttcttgttcggatgagctgatgcgatctactacagcaatttctacgcacacatagtacatgctatctccatgataacttttttctgtacgtaaagcagacctcaagtaccattcttgattctttctttgtgtctttgatactactggagtacactctgctgcagcaggagggaggccagaaaatgcgttaagcttttcagtctggccatatccatgagtccatgactgattgatcattgatgaatgatgtgttgcatgtttgcatcgcctgcactgcatcgtactaccatcactataggttgtgatgatgcgtccagcccagagagtggagtactcctgtgtacagtactttcagttccatctctgatgacggacgactgcagagagtggagactggagagcaacgaacgaattcttccatgcatggctgcatctgcatacttcgctttaacttcgtactagcatcattcaacgctaatactatcactagcatttagtactggagtagtatcgaatatcgattgcaggcttcactgttattttggataatatgaatatcactgaatccgattcctaccagagttaattactccattgaacaacacttcaatagtttaaagaaaagcatgtgtgcttgtgatatataccaatcgaacaacattatttcatcatgaatgggccggccaatatgaatgaaaggattgatggatggcgacccgacttgctgtgcctatcttgcctcccaactcccagcttcacccaatccgaattggagcatccaactcgcatcctggtggcagggcaggtccaaagcgttatctctagttactataaatagatgacgaaaatgaacatcgctatcgttttgaaggcctaaaaaccatcacgttcatcatagggagagaagaaatatgtttagattatgagaatttttactgtccagcaggtaccttggtacctgtcggtatatgcaatttgagccatcgatttcgtttgatccaacgggtgagaaagagttgtacctagtagtactgtccacgtgattttacagagcatagagaggtactaaagaagcaagggtagttaagtaatttcgcgtgtatcttcttcatcttcctcctgtcttttctctctccaaaagatgctgcatgcctgcatcgatcgatggctctcaccagggatggacaggctagccggagtggaggtggagggggccgaagagcctccgtgcatcacttcctccaagctcgccggtgacatacgcctaccacggcccttcccctaatctcgctgccggattcgagcacatcggcgaccgacgcaggtcctcgtcgcctccgccgccgcgtagcagcctccgacgcaggcgccgccgttcaacaccaccggcgccgaccacccctcctgctcctcgttacctcgccaccatgcagacaccgctggcgcccaacgcgccgccgtccaacaccccgccgccgacgcccccggcaccaccggcgccgaccacccctcatcccgctcccaccacgcccttgctcttggtttggacttgctcagttgctcttggagtcttcgttgacacagtcacttagtcagagagaaggagcatcacgagctgcttagcgtgtgagattttcaatcttaccctccgtgaatgaacggccggatttaaattggtacctcaaggtaccggtacctcgaggtacaatatgctggactggagcaatgctcttagattatatggtggtggttaaggtagattgagttatataccaaacaaaattgtagttacggaaacatatgagcagtaagagttgtatattgaattttaattgtatatttttaaatattgctcaatgtaaaactacgcaggaacatctagtagttttgcaagagaatcatatcttctaccattattgcctctgtgacgtggtcactgacatatggaggtctttgtctataagccaacatgtcagcgaccacattcctccatctattccttttgtaagggtagagcacctagaaaagaataccccaaccatttttgttgacatctataattggatttgttgcgggaaactattttgatttatcgaggggatgccccccccctctcgttttaaaaaccatccgaacagttatataaaattcttgaagaatttgacaacactcacccaatatatataccactctaaaaaaaatttaggtccaaactcaactcacacatgaagatgtgaaaaagataaatttagcgtatgaatagtagcggtattgttcacattagaatttatctttttttttctcaatgtataggtcaaaatttaacttagtttttggtgaactgataaatgccactgtacaccacattatcatctttgattatgcaccgcatgatgcacataagtggttgcataagtaatagctaattttactgtggcaatcgccttacattacattattgttggcccaacaagagttgtttctttccttgctttgttgtgaactgaaagcacaattagccactctttccggcccatcccatcggatgattatttatttattagagtacacgcagtccgtagagattatttgacgccacatccacgaaaaatttcttatattatgggacgaaggtagtagcatttatcgattgcaggcttgtctgtttgatttggatcatatgaatctctctgaatgcatgattcctatgaatcagtttttgactttgttcgttgtgacgtgtgcaatccacacgagctattcgtgagctcgtccggcagcggcaacggctgacggggcacgcaggcgacgactgatcgacgaggaggcatctgcatctccatggtgtagagaccgaaggccgccgctagaccaacaagacgaacgaccattgatgcccattaccaactggttcaaaaatatgatgcccaacctggcacagagcactaataaggtaaatacggagtattattagtggcgttctatagcagatgacgcagccataccacttccaacacaaaggttcaataataagatcggacataactatgccgaaagaaaaaggaaattcattgcataatggacgactgtagatcgatacagcagcacatgtaagatcagagatagtttgtccaagagaaattcatcaaaagaaaacagctgatatatttggtcccagcatgcgtttatggaaaaagtttcaagtagtcttcttctttctaagtttcaagtagtcttcatcatgtaggtcaccctggcaacaatccaaaaccaaacatgtgagacaactatagcatgagattgatatctccattgagtaaaatcaagagcataaaccgtaccacatagtaggtgtgttcttcaacgacatcttcatcactctcagaggccatttcactttcactgctctcctgctttttaaatgatccatactcaacatacttctcacacaaaaaatctaaggcaaattgccgaatcttcatggaggtactaatggattcaacattattacgcttcaagttctcaatcaaccactcagcctcctttctgataccctgcagatggtgcaaataaattgatcaaagtcatgtgacacaaatttcagacaagtataccagaacttggttaggtgaaagcaggcatgcacataccagaaggcgtactcctcatcgttaagtatacagcgcccatgcctcagccattcagaaatcaactcagcctccttagcaatacacttgaaaccattttttttgggggcaaataaccgatacaagaaactagtgagcctctctttcaatcattaaaacagaatgaatatggcaatcaatcagtcaaactaaacagccaggagattgagatgtatctcagcagcatcgatgccaaatggacgttttctttcatcttttacgttaatcgcggtacgcatccatttcacaatgcattcacccactaagcaatcacgaatataagtacaagctcttgcatttttccacaagagcaccatgctcctctccttctccaaacactttcaaagaaagaaatcatcattacttatgcatatcattcccaataagtatatatttgaaagataaatggtgtaatttaagtgaatcctgatgtgcatacaaaggaaggagctacggagcaattacaaaaaccgcctcccatggaggctgcagttagtgtcacagcacgcagcccaatgaatgaagcaacagggctgggagcatataggttcaaacgcttaaaaaaagtgaaaatacccaaagaattgtttcatagtgaagccccatttggatttgaggtttttgtacagcgactattccgtattggaagatttgactgtacccagaatagggcttttctcgtgacagtctaattctaattatttggatcctatttattcacgaaaaggaacaaaatggaccacacggttacatcacgtgtccataaaagtacgttaacaacagttaaaatcatgtttgttaacacttaaacagttggtatgaatttagtattagagtcatatcagtaaatttgtattggacaaatgcaatgacttagacctttttttagcatagcatagtttctgtaaaagaaaaacaaatttcggatgacccaacacagcaagcaactttgtagtgatttcgtagaggtaagcaagcagagaaatagagtgggagttaccatggaggcagcatcaacaagagatgcaagaggagcaagacttgtatgaaagtagtaaaaccagtgaaggtaggcattgtactgctgcaaagcacacggactagagtttttcaagtcacaaggaagtagtctgttcgttcctagtgatttgaattcatctgatttcgccattaggaagccacatgggaaaaaaaacaaaaacaagttaatgtaatgaacgacagtagagggaattaattaaattaaataaacaaaaaaggattgggagttaccagggcaatttaaaagatggagcggtggggaagaagaagctgtgtcaaaattgataatttaacactcttttcaaatgggtttcgattatttgacatcctgacgcacttttattcactcagatggtcccatatgtcatcctcacaaaagtgtcaaattatcaaatttttcgggatggaccgccttggaatcggatctcgcacttgtccgaaactgaggaggatgttagggtttgagaagtgttgacatgggaacgagcacgctcaagtttagtgatattccccatggacgccgatcgagcgtcccttccctccgattcgcagtcgcacatgatgaagaatgaagcggatggagagtgaagagggagagggagcggaggaaagagacgacggtgcgatcgttttgggaggtgaaagaaggaaggcgagatggggtgccgcccaccacatcacagcccaacaactaggaataagttcacttgattcacgccaactatgacttgtgcagagcaggaggggccatgggcgagcatgtacgtacgtcatcgccatgcggatcgagcagcgcggcgacttgtgctccctcatggcctgcacggcagtagcggcggactgaggcgagccattatattattcattgcataatggactgtagatcgataccgcacagcacaggtaagattagagataagtttgtccgagagaaattcatcaaaataaaacaactgcgtgcgagcagaagagaggttgttaatttctaagtcggagtatcgggactagcactcattgaacttcttgcacacacacactgccactgggaataggtttagccagaagcatcggaccaatgatcagatcacccatgacgaaaggagactgcactaggggcattgcccgcacggctggagcgggcaggctgcgcccgcgtccgcacgcccgcattagttgtcactgtcaatgcaagaaaaattactgccttctcttcaactgtggcatcaattacatctgctaattaaaccaaaatgaaaggaaaaaaaactgcgatatatggtatgcaagcatgaagactcagagttcttcagtataagcaaaaatgcaggcttgcaggggtgaatcttcagatgaaacagaaaatcagtaaatattagtaaccatcttgagccctgaaatcttctgaaagacagtgactgcagcgaaaagcagagtctacaatttggcataaaaatccaccgatccttaatcaaattgtcctaaaaaaatccctttccaaaatattcatagcttaacaacagcataaaggggaaaaaaaggactcaaaagacatgcatatcctgacagcaacaaagccgcctgatccttgcatctattcctgtcactcatgcagaattcaccaggcaaaatcaaatatgaatttcaggctcaacggcagaaaagaagtccagaaatcccaggctcaactaaatttccaatacatcatacaaattttggatgtaatctgacatgtgtgggaaacactgatatgagctgggaaactaagcaagctccactgaccactgctccagaactagcaaaatttctcagaacccagattgcatagaactcacatggtaatttgcctgagatgtcaaatgatttaatgtcctgcccagtgacaaaaaaaggggttaaaagttggaacataatctacattgccagtgccagaacatcttggattgaatttaaaagcaatctaacagaatagaagtgaatctgacccccagaaaaagagaggtccaaactacctagaaatgaagataaaattatgtagtactatttaaggaacagaaacaattcagttacagttttatgaccatggtgagggggtaatgcagcatgtgtacacaactctttttccagatctagcaactcatttaagaagcaaatgtagaataaattgtaaattattattagatcatcatagtacccatattcaattagacatacagaaatataaaatcaagtaatttgaatacctaatagttgcatattaacatcatcgccctcagccgtatcagttagaattgaatatggatcaccaaaacctaaaacatcagaatacaaaagttcaacataaataagttcatggcccataatataagtagcaatgcacaactaaagtaggcttcataccatcggctcgcatccaatcttgaaggcaaaccaatgcctccacagttccactagccaacctactcctatagtcgctaatgattcttgatccagtagaaaatgcagactctgatgcaactgaggatgcagggacagcaagcaaatcaagtgccatgcgtgataatattggatatttgcaagagttcaccctccaccactggagtatgtcaaaatcatcatcagggaaatcattttcttgaggaatatcttcgagatatctagttaactcagtctttactttactcttgctttgatcatgaagatatcgcctcgtgtgcgggtgaagggggcgagaccttgtgcctgata

SEQ ID NO: 1375 - DNA, 651 bp, Oryza sativa
tacctgcatgtttataagccatggaggtggcgcaccatcaggcataccaagagcctctttaagttctcgcgacagcatgcctggcttcatttccctaagcttgacctattaagtccacatgtacaaagcaacaaattcaaatactcaatgtacgaaaacacagataaatggattgtgcagacagttaccaattatctcgattcttttatatatatcagcatgaaagataatgtaaaagtacctcaaactctttcccttcataatacaggtcaccatgactagtcaattttggctttgtttggtatttgaagaaggcgtcatgcaagacctgtaccaacgaaatcaaggtgagacttatttttcctgcctgtgaatcatgtcaggagttgataactcaggccccagctggatatatgagataaattactctagattttgggttgaatagttaaaacaccctgaattttgagcttaacataaacatgtgtgctgtaatgctgcattaggactaaaacagtctgtaacacccattaccagtctcaaaaagaaaagcagaaaaattcaacattattagaacttgagcttaaggaaagagtatgaaaatgtgtgtttacaataaatgttgataccatcaaatgatctctatagaca

SEQ ID NO: 1376 - DNA, 1364 bp, Oryza sativa
ctttcagcgtgtaaatacggcattgacaagaggctaatggtcatattgaccaaagtttgccagtgagaaaaaaatctgcccgtctcaacagaatagattttcaacagcttagatgactaggcgcgtgttttgaagcaaaattgcagtgcagaagagaagttgacgtttgagagcagaatattcagattgcataaatatatgtccaggcttataatctggaactaaaagttccagttggagatgaaacaagagattaaaacatggttaatcacataaaaaaaaggaaccagcattttcgtaacagtcagcatgccttgaagcgtttgaaactagagtattacatcacaaagaagaaaaggaaccgaaatattcagaacattcagcatatattattaccacacagcgaatcacagttttgctttgcaccgagtaaaattaagaccggaagtgaattacatgaggcgacaccatcaccaatccctctgtaatttgcttcctcagcagctcctgctcctcgatggtctgcggataccatgacggagcaaccttgatcttgggatccaagtcttcgcagcactcgagcaacttcctgtcgtacagggatacatcctctaggttaacagcagcttccatgatgtgcctgatgtatccaaggaagttgtcatttggttggaaaccatagattgtgagtttagtcaggttgtaatgcctgaaaccatcaggtgcagatgactcccactccacgtttgctttttcagagtaaccctgttcttcccgttccaccttgtcggtctgcatcccacaccaatggtcccaaaccgtgacgcgcatctccttcagggagggtgctgcctcgagaaagaagcatgtccaagaaatatcacattcttctgggagttcatccagattcagaacttgcagattccgaagaacaggcgccaacagtttcgggcactctggctgaacccaaatctgcaatacataccagcaataaaggatgtagattaagttgagaatgagggacaaataacctgagagagagagagagagagagagagagagagagagagagagagagagagtcttggttaaactaattaccttttcacttccgaagttgaggtacaggtcgcttatgttggggacattagcaaggaagtgacttaacctgataacctcctgatatctcatggctacattagtgaggcttaggcttgaaagcagcgggacattgccaaaagacaaaggttcatggggacagacccacaaactaaaatccagatgtttgaggtttggtaagtagttgagctcgactaattctaaacttgcatgatagatatcaagctcaacaagtcgtgggtgct

SEQ ID NO: 1377 - DNA, 542 bp, Oryza sativa
ggattggaatttctggcataggtgcatctgtcctcggaggtaaaggttctgggacaagaacagcatggctgatgcgtcggccatttttctgtgatccaaagcagaagtacacactcaaccaatcagcccattttcttcgctgcaaaagaacaacactatttaattcaaaaggaaagtcttaatcctcctgaaatgtgacttaagaagattactattgtagcataaatatttggcacataaacagcataagcacagtcgagtacagtagcctgcacctagcttttgtcagacatgcattctatagcgattgtattgcagagttaggatgaccaataacgtgaacatgtaaacaggttggcaatagaaatatagcatcatcgagctattaggctccatgttaccgtaacgaaaaactagaaatgaaattccacaaatcatcaaaattacgtcatagatcccccattagccaggtaatgactttccaggttaaaataaaagcattaagaaagtttcataaatgatcataggcaccagataacccg

SEQ ID NO: 1378 - DNA, 640 bp, Oryza sativa
tcgaattcctgcagccctattttattggctgaccagccggtggagtaatttcagtcgatagccgatgtcaatggggttttgagtaatcggctatatatcatatgtagataatgatgtaaagacaatcggctgatgataataaaatataaaaataatataatccaatagaaaccaatcggctaataataatatgagagtgtaagtacttatccgaaggttaaagcatacatcggctggaggtctgatgtcataaaatctaaacgattagataaacatccagataattcattggctgaaaccccgatgaaacccttattggcaatcaggaagcaggctagagattatggttctaaacacgacttagtatatcaaacttaacctatgcaacactaagtttgtaaagaaacacaatatctagactatcaagcccttagactgatttctcagggtggtagatgtctaagctaatttaatctagcaaggcgatttagtcgataccggtagaaaccctaaagcgagaaacaaccgatagagctaaatcaagatgctaatactagattaacagatataaatgataaattggtaggcaaatatatcattcaaaccagagcaatccaagaggtcgaatgtactgatgcag

SEQ ID NO: 1379 - DNA, 20752 bp, Oryza sativa
aattcgcatcccctcgcgctccggtgagttcaacctctaccgccgccttcggccatgaatgccggtcgccgtggttcatctcccttcctctaatctctcttctccttccttagggcaccccgaatcccgtccgccggttgccgtcgtcctcccgtggctcgccgtcgccgtcgtcttcctccgcgccggccaccctcggtgaggcgtcctctcccctctattcccctccctttcccttctagccgccgctttagcgccgccgcccgttagccgtcgctttagcaccgccgcccgtcggcgccccctttgcgccgccgcctccgccgccggttgccgtcgccggcaacgcgtgtgcgcgcgccgtcaccgtcgccgtggccgcttggccggtcttgagccgagccgggtcgccaccgcccgtccgatcggccccgagggcgatctgggccgtcggtcccgtggaccggcggtggaccacccgcgtggtcccggtcctcggtgaaccgtcccccctgagccactgccgagtgggctcgcgtgccggcacccctttcctccctctcccgagccgctgaccagtggggcccgcgtgtcggcgccgccccaccccgtgctgacgtcaaccctggaaggctttattgcgcaataattcattagggtttttcttttatagtaataaacacagtgaatcttctaaaattcataactaattcatccgagctccgtttaagtccattcaagtctcagtaaatcaagaaaaatgtgtagaatccattaaaaatggttttgttccctgtttcagtagtcttatagcctgtttgcattgtttgccttgtatgtcgttagattccggctcttctgacgctccggtgtacttcgaaatagtcgccgaggttcctccagcagcagagcaaggcaagtcatgcttgtcacttgatcatgttgatcctacattgcaaatgttctattgttttccttcaaatactgcatttattttgcaataacactatggtatgattatctattgttacagccatgctattttgataccatgctcctttgttagcttgggttataacatgaatagactttggactaggaattgcttagccatgcttagttccactagcacacaatggggagatctcattaaaatatagactttaggttcaattggtaatgttggtttagtatcaccattttggtgttggttaattaaaatgaatcacatggtgggctgtgggtgcatggttttgctggtcgcacccatggcatttaaggaccggttcgcgggaaacactggaagaacttatcgtgcttaccacaagccagcgtgggcaacggctgggcttgtagtataacttttctctagctgacgcatccaggcaagggtgggcgtgatggagtttggatgggccctgcgacggcctatgtggcttccggattcacctaggcacgagaggggactgcccgtcgcccgctggggacgggggtgaaacataagttgtggtgtgcttggatagagagggttatgcgaagggtcctgtcacggcctctttccggtatgtcgtggtggcatgtcggcgcacggaaacgtgtcgtggggctatgtcttgtgggtacagttgtacacctctgatcagagtaaaactattcgaatagccgtgcccgcggttatgggcggtcaaccagactcaccgtgattagactcatcttagtttagtctaatgaaattggatggtataggtggatggttgggcctgttgcaacatggtggaacgttggacagtggatgattaatactacttaattattacaactgttttcgcatacgacttctgtttataaatgccagtattgtgcaaatgaacctgtttagctctcccttgttaaatccctgcatcataccccccattccggtatgacttgctgagtacagtggatagtactcagtcttgctctatttttcccccaaccctagagtatgagtatgtgtccgatggcgggttctgcgaggagtaggcttcgtccgtgccgtcgaggatgcctgtggagtggtgttcccgctgcagttcaagtcaagacttagctcctgttacctttctttttcccgctgcatttatgtaagacttttataatgtttgtaagacgtgaatctgtatgtcaacattgtcgtttgtgtaccccggccggtcctggacgggggttttaatgcacattctgcttggaattctattcgggaatttctgggcgtgacaatggaaaagtactgaagtttgaatccaaattttggatctaaacgcagccgtagtagagttttttttaaagaactgtagagttctttaccacgaggagtagtgctagtagagttaactaatatcagaaccaacatgtataatactgtatcttctagcactcaatctttccctccatgtttcttttaccactcactctttctttaagttgggtataaaattatctccatgtttctgttagcactcactctttctcttacttaagaatttaattaatgtatttaacttatatgtaatgctaactcttacatgagactgagagacaacaatatatattttcctttcttaatttctctcctttacataaccttctagcccactattatcactcgtataggagtacagaaggagacattcctatacgatctccgtttggcagagcatggcaaagcaggttcagctgaaaaaatatctcgttttttgttagtcagtttttcgaactgtttaaaaaatcacatcaattcatttttcaagttggcagccgctgaagtacacagattgatcagcacactaagacaatcggaatgattgttttttagtatactcaatgagtacggtcctcagcgagttcggttcggagatgcatttgataatgtaatgataaaaggtgtacggtttctaatcctaaagtctcgtgctaaattcttaacaaacttataatttactttataaatattggaaaggacgtctcttcctccgaatctttctttttttaaagaatacataagggctcaaggctcaagggacatctacgtactagtaacattttttcagcaaggctgcaaaatatacatatagatgtatatatttgccggttggccctcttcatacatacataggattagtatagcaatatcactcgtaccacagataatcttctactactccttacgacatgtcaggttaattatttcaccctttctgtctgtcgtttttatttttggtgctaattgctcctccgtatctaaatatttgacactattgacttttttaaataagtttgaccgtttgtcttattttttaaaaaagtaattattaattctttttctatcatttgattcattgttaaatatacttttatgtatacatatacttttacatattcataaaagttattgaataatgcgaacggacaaacatgtttaaaaaagtcaacagtatcaagtatcaaatattatttagggatggaggaaataacttactgttcggaaggctacaagagagagagaaaaaaaggcacacgtttaagcaatatgtacatgatgttaagtatatcgatctgctacacaggaagctagcgtacatcgatctatgtagccaagataataagctaacctagttaatttctttccgagttgtacgaaagcacaggtattttagctaattattaaagaaataaaatcccaagctaattaagcatacagatatatatatgttgttattaatttgttaatttgacagtgcacaaacgcatgcatcagcccaatatggagtagaaaattaacacatatataggtaaatctgagatatagtaacttactagcttagatagaggacttccaatccatcgccgatctgtggatccatcgagatttgtattaggtatagcttcagatccaaagaagagaagcagctagcgcgctgagctcgaggtaggtagcttgcttagctcagggctcagcttcgtcaagctcgatctgtgcagtctcgatccggccggccggacggcagcagggagagcacccaccatgggccatggccagcttgctttgctagctacaggtctcaggtgaggctgccggctgccatggccagcttgcttatgccggatgcgccatggcaggcagcaggcatggtgggtggtgggtgcaggtgagaagaggagaggaaagaaagaggcccctgcagctgcaggaagaagaagatgaggttgtttggtttgctttggctgctttgcttgcatacttaaatttggtgtggctgtggctgtggctgctcgctggtactggtgggtggagtggaaatggaatggaggactatttatactatattgattacactcctaattaaccctagccgtgctactgccactgactgctccatatggagtactgtacagtacagactctactgcaatactcctactatactccacggccgccctgagctttgattttttttttcttcttgtcgacactgagctttgatttgactagtccacaccccatccatgggtcccaccaatgtcaaaagctgctgtccctcccttgtgcttttgtttccttcatcgatactactgtaaatttgccactccgatccattcatccatcgcgccgtcgacgatcttatccttgccaccgctggcaagctcctcgacgatcgctgcaggggctcgccggcggacgaatggaatcgccgacgcaggcacggactgacgactgtccaagcagaaacggaggtctcgctcgctggaaaagcatcctcccaacataatttgaaaaaacaactcctaaatccttgatgaaaacctctgcatgcttctttccagatcacgatttcctctttacttgtgccaaagagctaggtaagccgccgatcgcacctgatttaatttggagcatccaacacacaaagaaaaagcgtgtcaaagaccctcctgtagctgatacgaaaatcaagtctcctgtagctgatatgtccctacctgattcggcgggcacttcactcacacactagtattatgagtcatgtactagtattatgagtcatgtgtgatagatagatagatagatagatactgtgatgtgtctgtctgttattcaagaaaccttcaaacaggttcaactgcatgtgccttcgccttttttttgctttgctgatcaaacctgcatcacaaaatgaacatgcattttctagtaattgcagtgaagaagcaaccatacaatcaactgaagagaggtttactactgcagttgctttcgcttttctcaactaccccctccgtcccaaaaaaaagtccaatcctagctatgaacctagatatatacgtgtccaagttcatagctagggtttggttttttttgggacagactagtatataggtaaaaagggttacctgaataactagtgtgacacctggataattcattccccgtgttgaaatatctgaggccaccagatcaagcgactagaatctcgaaattcttctaatatccgagttctatagtgctgaggctttcttgaatgaatttctcggacatttagcttcaaatctcgaagcatgatatacataaattcagtcatcatggcagttgtgcagaaaacaattaatcacctgggatgagaaaggctaagtaaatttaacttatttaagttcttagtcaatcatattgcctggtcaaaagagggatgagagcaccttatagtccacttcctgatcaccttataggctataaaccatatgaaaatgctgctcgtgtggcaaaacgagataaaactgctccacataagctcaagaacaccaaatatcaagggaccagtacgcaactaaaattcatttccatgggagaagataaaaaagagactatcgtaacaatattttacttttgagctaaaaatcattagaaatatagtttatattgccgtacaaagtgtacaaatgtcttaaatagtcaaatgataaacacaatgacaagaaagacatatggtctagaatatctatttatctggatgtcggcatctataaacaaaatgttttacagacacccctgtttgtgcatccatggaaatcaaaagtgctgaacaatgccgacccggcaaaagtgctgaacaatgcacgaatgacctaatggaagtcccttccatagatacaataatgcaaatgtgacctcttttaattggcacattaagatacatgctaacagatgctctaggtaatgcaaactaagaaaattgatcacagcacatttctgtacttgcaggagtcagaaaaaatgagcatattgcagatgagaaaaataaaagattaaggtgatatataatactaaatatactagagtagaactggaagcatagaccttagtaggagtttcaacagctcccaagcccattgtatcaacaaaaacatcatccctttttaaaactagttgcgaaacccttcgaacctttcattgacaaattcagatatgtggttgtcaaccaatacagaaacagatagataaaaatatagagactactagttctgttggccatgctgattacagtaccccttttgggagtagtgtttgtctttgacgtagcaaactatcaacaatcttttcaatgtctgtaagaaaacccaaatctagcaaatgaacagcttcatccaatacaagcaactccaatcccatcaagcgagcagataataaaaatttgttctcaatgtgatcctacagtctaccaggtgtaggctgtagcaactaaaatcttcaaggggggaaacacaagatatagttcagacaaacgacaaacagttgtctgtacatatcaagcatcagttacagtgagtgcttgtactgatgtcaatgaaacagcacaacttgtttgttagtcacatggtctgtatctctttacgcataaagtaaaaatgtaaaatcatctatcggtcattttatcatgatgagtgatgctgaatactatgttctttcattttattattgttaattcttgttgtacatcagtgcaataaaactgtaactccaagaagacaatctgtaccaagtaccaacttcttagttcatataccatgatacgtacaaaagtgcatgactcctcttcgctggaagctctaaatttcgcaaacctcaaatcattctttgatgtttttgttatatcttcatcatcctgtcaaatcgccctgctgccactgggtacaacctctctttgtttagcgaggaatagacttcagagctcctgcctttgtacatagttttttttccttttgcttttgtttcgctttgttttcaaggcttctcgccttgactcgacattctaatatcgagattcatgtattttcttccaatcttaatgaaatttagtcagcgtttcttccgccgacccatcaaaaggtacaacctctctttgattaaacagggagggagaaatccgaccactggaagacctctagagataagcagcatcagcatcatcgatgcatcaccatgcacctggaacggaggaataactgagcagcatctcttgggaccaaagaaacagaaagatgcctctgttcgcaaaggaatgccagaagccaaactccattgcctccaccagcacataaattagactccaaacttctctgatctaccttgaatcttagtgccaccgataagattttgaactacaattcctcgatggtacttcaaccaaacagttgcctttgcctcagcagtgagctggatggcaagctctcttgtagccttgtagccttttagggcagaaggataaggggaaaaatatttcatcggaaaaaaaggaaaccggaatattcataatatactgcttaaaatatgtcaggctactgtcctgaaaccaagattcaatgtgtgtgatgatacttaatgtaatacattttataattaaattcgaattccaaattaaacaggaaagtcgtagcattagtctctccacttaacctcctgtccacacatcaacaaaagctttcgtattacactattatatttatatgcaactaattttaaaatttatgaaaaagaattaaggggcaaaaaggataagattaagaataagggaacatatttcattaaaaaaaagggataccagagtactcagaacattcaaaatatattactattgtatagcacatgcttacattacatatgtccagtccatgctactggcctaaaactaagatgcaggaaacaagagaattttaatgcatgccttgaaacatttgaaactggggtagttcatagccaaaaaagagaataaacaaaaatattcagaacattcagcatatactattgctactcagcaaatcacaggaattaagaccggaagtgaattatatgaggtgacgccatcaccttagctctgatctggatggcaagctctcttgtagtagggcaaaggataagggaaaatatttcattgcaacaaaaaacaaagtaagcaggaatattcagaacattcaaatatattaatattgtatagcaagctttacatacggcctggaaccaagttgcaggaaacaagagaaatttaatgcatgccatgaaacgattggaacattcagcatatattattaccagtaccatacagtgaatcacagttttgcaccgagcaaaattaagaccggaagtgaactgcatgaggcgacgccatcaccaatccctctgtaatttgcttcctcagcagctcctgctcctcgatggtctgcggataccttgacggagcaaccttgatcttgggatccaactcttcacagcacttgagcaccttcctgtcatgcagggatatgttctctaggttaaccgcagcttccatgacgtgcctgatgtatcccataaagttctcatttggttggaaaccatagatggtgagcttagtcaggttgtaatgcctaaaaccatcaggtgcggatgactcccattccacgtttgttttgtcacagtaaccctgtttttcccgtttcaccttgtctgtctcaatctcacaccaatggtcccaaactgtgatgcacatctccttcagggagggtgcagcctcgagaaagaatcttgtctaagcgatatcacattcttctgggagttcatccagactcaaaacttgcagattctgaagaacaggctccagcagttttgggcactccggatgaacccaaatctgcaatacataccaataataaaggatccagattaagttgagaacgaggaacaaataacatgggagagaggattgcttaaagtaattatcttttcacttgcaaagttgaggtgcaggtcttttacgaagaggatattagcgaggaactgacttaacctaataaccttatgccatctcatggccacattagtgaggcttaggcttgaaagcaatgggacgttgcaaaaagacaaggttcttggggatagacccacacaccaaaacccagccgtttgaggttcggtagggagttgagctcgattagttctaagttggcattggagatatcaagctcaacaaggcgtgggtgttccaactacagcagcaatacgctatcctcagtttgacacaaggccaaacgcagatactctaaccgtttgcatgtggcgatgatgttgggaatgtcagtttcagcaaagctttaagttgcgtaggtggagacgtgtaaggccggcaaatgcatcagtacaggaacaaaaaaatgtcatcagctgcttcccatcgcggcggcgatcatcaatagttgaatagtccggcggcttctctgtcagaatgttgaactcagcgctgtggatgttgtgggtggccatggctcgggcaacagccttgccaatggtgagacaatcatagtatctcaagtagaaacctatgctgagcttgcgaaggggaatatcttgtcttctgaaactgagaatgttgtcagttgcaccagccacagcagcgttcatgggaattgtatccttcaaggtggcatagccacaacggggcacaaaggaattgatccgaatatgtaagtttgagagcatatggcggagatggagtgtcctcttagaaaggaggcaggttctgacagcgtcgggggtgttgaggcggtccaggatgttgagcaggacatcttcaggtagcttggtgaacccatccagcatcacgggatctgatttctgcatcaagatattgcagcaacccactagagcatcaatccatggatcaacagacaagagcatcaatccatggatcaacagacaagagaagattgagagatgcaatgcaaattaaggaagaggaagatgtaatgctgctcacgttgcggttgcaacgactacccttcttcttgttcttcatgggctgtctagttccgatgagcgaggtcaagatcgaactggcgacttgcgtcgactacctttccaccccttgtcgttcgtttgagacaacaaaaaggtcacactttgaattcaatcaatcgaagaagaggcatgcattcgcggcaatggtggtgtggtggcggaggacaagggaagaatggccggcgttaatggaggaggcggcggcggcggcggcggtggcggtggcggcgatggtagggaggattggggacggcgacgttaggttaggtacccttgttattatgggcctcctctcgaatcatcttcctaattgggctagcccattgtgtctgattgggcctttcaaacaagagatatcattggcatatagaaaataagtctactttgcgttcatcatctttcgtcccatgtcatcctcgctctcatcacatattttctcttcttttctctccatctcttgtcggcaaggagcagtagtgatttaataatatctaagtctgatgatatgcgagctcacgctgcgctaacagaatagacatgttaaaattagctcattcgaaccttccgtttcatctcttcatcaatatatatgtttggtgtttgagacttctgcaccgggagatcatttatctcatttcagaaatactcttcccatggggcaaacaagggttcagatttgttcttgtcatctctgacgtcaagtgacgaggacatttcaaggcatcttggttgctttacattaaaatgacttggctgtaaataacggttactataaaaatttacattagtattgataattgcttaattggtgaagcagttagctccttatttatcacttgggacttgggagacaagaatcgtgtcagcttattcacatatagcgtcacctaatgtggattatttccaactgaacattttggttgcagatgatgtcaaccagggattctttgttcatgcctgcttcatgcaatgctttatgcctccctggcaaagtatcttcttgcaaatgaatattaccagaaaaagctgcacttttgccggttccaattttagccttgacaagtacattttcacctacatgcatacagtgatgagtgaggggcaacctcttgatttcttgaaggtttcaatcatagcattttgagctagatcgagagatataatggtaccacaaggtgctaagtagcaagtgtggaactactgaagcaagtagcatgatctgtataaatttgtggatggtaacgcatattccaatttccaatgaaagaaaaaaaaagagtgctttcaagacacataggaaatgctgtttcctgcacaccagtagtttgtacatatccagcatcagtgagtgcatttactgttagcgcggagataccacattcatcaaatttgatgtcaatgaaacagcacagcttgttaatcacatggtaagtagtaaccatctctgttttgaagtacgctaggaagcaatacgcataaagtaaaaatataaaatcacccatcagagtgtcagtcattaaccgcaagttaaaagggcatctatcattgttttcttcctcatatcacagttcctcaaagcagaacttcgccatttcttcctgatggcacttctcgcctccaattcatcgtctgctgactcctcttcgctggaagctccaaattttgcaaacctcaaatccttccttaaacagggagggtgaaatccgaccactggcaagaactctagcaatcagtggcatcaccgatgcatcgctggactcctgatgtctcttgggactgaagagacagaaattaagatgcctcactaagcaagaggcgagcgtcaacagaggtgccggggaggagcaggccgccggcgcggtcgcaggagagggtgccgaccggaggcagagacgaggacccctaggacatttagtagcaaaattgtgaggttgaatgtgcataataggaagtttgatgcatttagtgttctgtgttttttagcaacaccctattgcagagaacaaaataaaactatctcattgttagcttcgctaattatgggcaattttctggtttatgtttcacactacccagagttgcagtatcaactaagagctatattttcctatcaataggtcactcttgtcgtcaaacactttgatgatccaaggatagtgagtgcagacttgaaagatcttcttctttttcttcaatcaatatcggttcttgtacagtacaaagaattcatgtttctatttgagaacaatcgggaggctataaacagaatgccaagatcacttctgtcagcttttggtaatagatcatggatacctattaccaacataccttttcaactctgcaaaggtttaggttttgcttcatccaagaatgctgaatcttcatcatctgcaactttccaggtttactttaatattacaatctcttttgtaattatattcattcttctatttctgttgtgcttatgttaccgtctgattgtgtgagaactatctatttgatcttacatttgtttttctctacgaatgttctactcagggagacatgtattcatgaagagaactgtttttatcctttctgaatcgacttttcaacacattaagttggacaatgacgaattctccatgtccatccgtgagatgcaagataagcaccgggtggatttttttttgttttatattcctcttggtgcagaacttaaactctttgctgattaatgctttagtactcgggttacattttcagtttagttactaaacgccatcatttttcacatgtcaaaatgcattaaaaaaactgaactttatcttagctctgcaatgaaggtatacactaacaggatccttccttttttctttggagaacactaacgggatctcttgacaaggataaattccagtaatttggttgcttcagttaattgctttttcaatattttatcccaaggggggaaatctgtgtccgtcccgggtgtagccatgcatgtggaggtaaataattgtaaccaatatttttcaggttgccgatttgcagcaaagaaagtgcagtgttattttttacatatcagtagtcttgcaaggatcttggagttctgcgccagagagatccctcatgcgttactcatggggacagatatgaatctgcgaagattgactgaattaattgtatttattctgaaccacatcatatcagcaactaatgcagagtggttttacatgcaagtccacatcttaatctgaattctgaagtctgaaaattagcagtgttttagttattttaagttgagacggtgatcttgaaaggttgctcagtttagcgtcagaatctaaaacgcactgcttctattgttgatttgagctaactcaagtataaaccaatattgttatatcatggtatctttttttccacagtacagttgtagaatcgcacgagaccaaacaaacctaccagagggggtgaatggtagggaaaaccaaaaacccaaaaatcttttatggaattaaagattaccctcgaacgatgtcgatgacgaagtccagtcgccgccggtcgaaccgcctacctgccgccggtcagaccgccgctatctcaccggtcagaccacgcgcacacatgcagttagaccgtcgggacccagaaacaccggtagatgacaaactcgaagatatagattgaaacttttcgactttattgcatcaactagtgtttacaaagtgcaccaatagcactcctcaccaaaatcttgaactaaactcgaaatcctaactttctctcaattctagtctctctagaatcgataccaggacctcaccctccctttctatttatacaaaaaaatcccctactctatataactcctataaataggactcaattcctcaatttcccttttctccgaaactgcagccgcaccggccatctgaaatcctgctccgggtcggactccttcggatggatccttcgccagctcgcactcggtctcctctcgccgcacgtcctggaccggctccagcaagccgcgcgcctgcccaacctgctgtccaaccgaagccgctgctgctgcctgagccgccaacacatgcacagcacaacatgcatgcatcgatctccatacatgcacagcacacgtgcatgctacatccaccgagcctacacacacatacatgtatcaacacatatatgcatgcatatacttctcaccgatttcttccaatctccttcgcgaacaccgacgcttgcacgcacacctcgtaaaacccgttgcaaagatctctcccacatagtgtccatccaccgtgtgccatctcgtatccaacttcgtcacccgacatccttgaccgtctggacctcaactcctccttgagtttagtcccgatcctcaccgttaccgaagttgacctccaagaatcctgactctagtcaccttctcacatggtatcccgatcgcactagacatctgttcctccctgaacatagttccggtcctcaccattgaccaaggctgacctcaagtcacatgcacacaatcagacaaaacaaccgtttctgggcacagatatcacaacctgacccacattagtgacacgcactcacaccaacatccacacatcttttcaaaccaattcatcgattaaatcatttgcatagccaattgttcatcacaaatattaatcatgacaatgatttgacagtacaccaagatgcttcctcattttatcggtgcatatgataatctttaatgtactaaaaaaatgcatgtgcgttacaatgggaagaaaagatgacaaaattgaggagaatttgagaaagatttacattatgtaattaacttaaatacacatttactggaatacttgatttttttaagtaggtaggtgtttaaattaatttaaaagtaaagtaagtgtggaaataaaatgatatggctgaatttaatttttatgaagttctccatgattaattacactctttggaattttcttgaaattttcagatctcaattgctaattttaataatacaaaatcatttcaacatttatttaaacgaaaatctaaataaaaactctccattatctatgggccaatttcagcccatttccttcctcagcccgcagcctagctggcccacttttctcccttctcctctcctctgcctcggcccgcaagtacgcatccggcccagcaaggcactacaagtctaatcagactccctcactccttccctcactcctttcactgtcatgtgggacaatgctacagggtcgtctcctacctccgtccgtattgcttcatctgcctgactacgcctgaatccgcctctttcgtgaaatacggccacatccatggagataatccgaaattgactgaggggttttgatccttatcttctactctttatgttttttcaagaatcaaagcaaaaccacatcatcgtatagatgtcggaagggaaaccagctttgtgctctgagtttgtttctcttcaaaaccgcccacgcacgtgctgagagggagggaatcggataatacggacgaaaacaaatgtgactaaaggaaaaatacaaatcttttaattaggtgtagataagtatatgtcaatgttatttttcttcagttgtatatgtcgacgtgccttgcacgtgcacgttcactagtagtatgctattttacctactctaataacatttgtctcgtcttcttacaaaaccatcataatgaaaagttttctagtcaaaaccatacatctaccgctactttcataacactttttcacccttgttgtcaaagccatacatctaccgctactttcataacgttttttcacccttgttgtcccagctcgaaggattcactgtgccaggtaggccagggttccccgacgcctggctttttccaatgccttacacttgtctttcacagatgtgaattctcttcttagacatgtgcacaacaaaaaactatcacacttgcaaaacaaataacttttgaactttctagtcaaagccatacatctaccactactttcataacactcttacacccttgttgtcccagctcgaaggattcactgcgccaggtaggccagggttccccggcgcctggctttatccaatgccttacgcttgtctttgacagatgtgaactctcttattagacatgtgcacaaccaaaaactatcacaaccaaaaactatcacacttgcaaaacaaataacttttgaacttgtaagcaaaaaagaaaaagagtgatagcaatccgttaaaaaaatttgtttcaatgatttttttactgtagactattattactaataatagtagtgatattccactctaaccgcttgtccctacggattcaactgacactcatgtagagtgttggcatactaagattcgtaaagtaagacaatatttaagaggttggaacaaacagactagcggtatttataaaaaagagaaggtttggtgagaaaaaacttaattttgttggtaaaaaagttttgattttcttgataaaaaaacataatcaacttatttggcttattataggctttatttgaggaagaggttatcctatttgataaggaagaggaaattaaatggtatcaacgagctcggactaaaaatattttggaatggtactcgaatactaaatattttcatttggtagtaaatgataagtatagtaaacaagcatttcttagctacatgatggtgatcgggtaattaatggtgatgcgaatttaaaggcgcatatcaccatttattataaaggtctttttggcccttatgaagcttcttctttaacgttagatgaaagccaaataagtgatattccccaggtttcttctttaacgttagatgaaagccaaataagtgatattccccatatttctcaataagagaataatgctttagtacaagatttttctgagaaggaaattagagatgcgacttttcaaatggaacataataaagctccgagttagaatggattcccagctgagttttatcatgttttctggaaagtaattaagcctgatttggttgatttatttaatgatttttatagtggtaatttacctctttactctcttaactttagtactgtcacgccccgaactagtcccgaccggaactagcccgtgacgctccaatttaacctgttaatcgataccagtcccaggaaacagtgctggtatcacagggagacagaagatcacagcaacagaggtctctttattatagagtagaagtacagtcatgttgggctgcggacagatcccgagctcacaactgcattacaaaagggaaacggaagccaggacttggaccaaacacacaggcgcgacttgggaactaggccgaaaccctaaaactcatcgtagccggcttgctcctggaagaactcctcatcagcaggatctgcttcatcttcttcagcaactggggggggatatttatatagagcaagggtgagtacgggagtactcagcaagccatgggaattaagtgtttaatgcaggcttcaaggaaaggctgttgtttttgcaattgattttatttgaactctttttctaaaacaactaggtgagtgcttctcaaacgacacggatgagaccgtgcgtctcgtccggtcggagtatgtgcaatgtgtcagttctttagaattgagacaaggttggcacccggccaacagcttttcaaacggccacccgggccaacaactttccaaacggccacccgggccaacaacttttcaaacggccacccgggcctagctgattccatcagctaaagatttttcaaacattgaaccccttttcacaacagtaatttcacaagcagtagtcaaacaaaactacgctaggaatcacctcacatccgcccatgaccgtgggcacggctgttcgaacagtttaatgacctctgcagagggggtacactttacccacacgacattactaacccgggtcacccagcccgtggggatcaaccacgtcgggagacctccaagctttcatgacaaggcatttcgaaagccgacacaggtttaccatatgccaacgagaggggtcccagaccaacaacaggttaggtcacagaccatactgtgccaggaagcccaggggtcctccccgacaccaccccggtgaatccacatgtctctcggcatcaaggctcccccgattagcaatttactcagccaggggcgtcccattccaccaatgtggtcgtacttgtcttatgttcggatgaaattccaaggaaacggtccttaggtgcaagagcgggaaaccgtacacccggtacgttccccggtccgcggttatggaaattcatttagttcgcaagcaccgacccaggtgtcgggtttttccaagtcttttgtaaaactccagttttacccaagttgttactcagattttaagtttgaaggcgaccgtcgatactcgcacagagtgcacgagtatcgaggcgcaactgggtggttacaaggggacatggtatagcaattaacaaaggaaggatcaaatgcgacaaattaggtaggtccgccaatctgccttgcagacgggacaaacagattaagtgcgatcctatcaattcataatattttgcaagcaacataattaaatttcaaatataggctcaagatgttcaaaggtggcttgccttgcttgagatctggagcttgatcctcgaaatcctcgcactgcgggtcttcgggctctgaaactatacgcgaaacggaacaactcaacaaacggcgaaaataaagccctattaatgacctctaagcgtgccattagatagatctcgagatttggggaattttggaagttgaacggagtcaaacggatttacggttgggaagatattgaatttctaagattattgaatttttgatctaaaggaaaaggatttaattaaatcctttttggaaaagaaaaagaaaagaagggagagagggaatatagacttttctcggacggctagggcgcggcccaagagaaatggagcggtccggccaagctaaacgggccggccggcccaaggcggcccaaactcgcgcgcgcgcgggagggaggagagagagagccggtggaccgggctcaccacgcgcggtcccgggtgggacccgcttgtcagcggctcggctcaccgtgcggagggagcacgcgacgcacgcgcgcgggcggggaagggacgcggtgcatgcgcgcggtccgcggtggacgcaggtgcggcgggcccacgcgcagcctcacggctcgcggtggatcgcgcgcacgcggagggaccgaccggggtcggcccgacccggtctggctgagctggcgccgacgtggcgcctacgtggctgccacgcgggccggcgggaggtagacgacgacccggccgcgaatggacggggggcggcggcggcgagcggcggagcgaaccacggcgatacgggcaacagcgagcacaccgggcggttgcacgtgacaaggagaggcgagccaacggctcggattcgccggaggttgctcgacggcggcggattgcggcggcggcaaccggcggcgggagaagagggaaacggcgacgaggtcacgagaggtcgattcccggcggtgagagcatctacgcggcttcgggaactcgacgctagcgtcggattgggcggaactacgccgagcgaggccggcgacgagcgggtgctacggagctcaggcggcgacggcggcgagcacacggcgagcgacggcaacggtcggggcggcgccggctaactacggggagtctactcaagctactaccgaaagctagggggaggagatggagcgaggaggaagaacggagagagacactaccgtgcgggacggggcgcagtgacgagaggccgacggcgcgggagtgatctctccggcctcgggccgaggaagaggaagaagagggcgcgcccggagtccccttccgcgtccacgaacgcaccggctctcccagcgcttggcgatggacggcggaggcgaggtagagcacgggagcggcggcaacggtgaggaggcgaatgggagaggaaaggaagggagggggaagacgggtttaaatgggcggcaatgtcggtttgagagaggggaaccgacatgggtggtcaagccggcgagctggcgctccggctagcgtccaaagcggcgacaggaggtgacgccggcgagagggagaaaaagaggaaaaggagggagagaaaggggctcgcccctttgccgattcgggaaaaggaggaaggagcggggcgactcggcagagggagaggggctctctgcctccgccccttggaggctagcgcgcggagtggcgggggccaagcaatgacgacggcaatgacggtgggatggtttggagcggc

SEQ ID NO: 1380 - DNA, 15638 bp, Oryza sativa
ggggccgggaaagagatgggccgagcggaatttggcccatcgaacccgggggaggcaaactagacttttgcggagggattcgatttggaaggaattggattcggaattgaactcgacgatagatcggggattgagatcttgagatggcacggacactagacaacaatcaaagaaacaaatttcgcaattagggttttttggagataattttcccgctaggcgccacgacggaacgggcgctacaagtactattattttactgccaattgcaaagaggctttgaaaatttaacaatatatgcctatttgtttacttactgtcagtttcaaaatttttactaaaattgctacaaatagaatttctggagtggctcaaatggttattagtcctacacatatagcttttatacctgggaggaatattatggagggtgttgttattcttcatgaaacgatacatgaattgcgttgaaaaaaaaggaccggtgtactttttaagattgattttgagaaagcttatgataaagtaaaatggtcttttgttcaacaaactttgagaacgaaggggttctcgcaaaaatggtgtgactggattgcatcttttatcaaggtggacatgttgacactaaagtgaatgaccaagtgggatcaaatttttaaacatttaagggtttaaggcaaggggatccgttatctccaattctttttaacatagttgttgatatgttagctatattaataaagagagcaaaagatgatggtcaaacttctggagtggtcccacatctggttgatgatagtttatctatcttacaatatgctgatatttttttagagcatgatttacatatagctaaaaatataaagttaattttaactgcttttgaaaatttatctggcctggagataaattttcacaaagaatgaattattttgttttggccaagcaaaggaatgtcacgagcaatattcatttttttgggtgcaaactaagagattaatatttacatttatagatacccatgtagccaatattgtgtggaagaatgaagagtcacgcattaaatccgataaagttattaagtggattggtagttggattgaaatatgcctatcaaaagtaaaattttcagatttgaaaatatgcctatcaaaaataaatggaggtagtaacttcctgtttggaaaaagaaagaaaaaaaaaagcacacactttaagtagtatgtacatgatgctacatatatcaatatgctacgcaagaagcgtatatctatgtagctaaggctgtgtttagttcgtgtgccatattttttttaagtatacggacacacatttgaagtattaaacgtagactaataacaacacaaattacagattccgcctgtaaactgcgagatgaatctattaagcctaattaatccatcattagcaaatgtttattgtagcaccacattgtcaaaccatggcgtaattaggctcaaaagattcgtctcgtgatttacatgtaaactgtgcaattggttttttttcatccacatttaatgctccacgcatgtgtccaaacatttgatgtgaagaaaaagttggaagtttgaagaaaaaaagtttgaatctaaacatggcctaagataataagctaacctagattctttccgagttgtacgaaagcacaggtattttagctaatctctactattataaaaattaaaaatgtttttgtcggtattttggtacgtcatccgtgtatgagtcggtttttaagttcatttgcttttggaaatacatatccatatttgagttggtttttaagatcgttcacttttggtaaatacataaggaatcatataagaaatctgtttaagaaaactcacatgctaacttgagacgatcgggctccagcgaactcccacagtgaatttcattttaactaaaccatataacaataataagtgtcgacaagtgatactcgtagaccggatgattagggtattgggtatgttggaacgaggatctacgtaatacgacatcaagcaaacaaaagacaaggattatactggttcaggccctttatcaggtaatagccctagtctagtttatatgagattgatgatggaaaaccacaggttacagtgtaagtagtttcgtaaactactcggcgacttggctccgtgtactccggctacgtaaactatggtgggtgtgctggcgatcagattcgatgccttgtacccctcgctggggtcccttttataccgtggattatcttaaccctcaagtaagacttgagacattggatcttgtacattataatagaaactatatcccttccaagtagaattttagaaatcggttgactcgaggagatattttccataatttgtaatagattccaacaatgtccacgggaacaatccgtatacgtgaaagtatgccatattcatatattccataagtcgtaggatatgaggtatgccttatctgtaaccttgataataagattaaaatagacttcatccgttgcaacgcacagatattttttctagttatataaagaaataaaatcccaagctaattaagcatgcagatctatatatattgttattaatttgtcatgtacggttaacttgactgtgcacaaacacatgcatcagcccaataatctatatatggagtagaaaactaacatatcctataatattatacaagtggtcttgcttagtgtagttattacttattaggatttttctgagccgtggttagccacgtcaccctttttttccggtcgttcaatcaaatgctcaccaaccgttcgattgcaatccatcacacagcgcacatacttttgcctcccttcgctcgcttctctccttcccccgtccctggcgcactctgctagccgcgccacgccgcttctcctccacacccccacccccgccgccccaggtcgtacagacgctgccgctccgcctccctctccccggcgattctttctccacgcccaccaacgagctcctatcagagtatcaatcattaacctcaagttaaaagggcatccatcattgttttcttcctcatatcacagttcctcaaagacgattcatcgtcttctgacctcttcgctggaagctccagattttgcaaacctcaaatccttccttgaagttgatacatcctcatctgaggagtctggtctccatttcctgtcaaatcatcctgctgcaactgattagaacctctcttaattaaacagggagggtgaaatccgaccactggcaacaactctagcaatcagtggcatcaccaatgcatcgctagactcctgatgtcagaaagatgcctcctttgttcgcaaaggactaccagaagcccagctccattgccgccaccatggcatggattagactccaaacttctctgatctatcttgaatctagtgccacttgatgacacttgaagttgcctcagctctgatctggatggcaagctctcttgtagtagggcaaaggataagggaaaaaatttcattgcaacaaaaaacaaaggaagccagaatattcagaacattcaaacatattactattgtatagcatgcttacatatggcctgaaaccaagttgcaggaaacaagagaaaattaatgcatgccttgaaacgtttgaaactagagtatttcattgcaaaaaaaaaaaaacgaagtcagcatatattattgctactaagcaaatcacatttttgtgccaaggatttaagaccggaagtgaattatatgaggtgacgccatcaccgatccctctgtaatttgcttcttcagcaactcctgctcctggatggcctccggataccctgtcgaagcaaccttgatcttgggatccaagtcttcgcagcactcgagcaccttcctgtcgtacagggatacatcctctaggttaacagcagcttccatgatgtgcctgatgtatccaaggaagttgtcatttggttggaaaccatagattgtgagcttcgtcaggttgtaatgcctaaaaccatcaggcgcagatgactcccactccacgtctgttttgtcacagaagccttgtgcttcccgttccacactgtctgtctccatctcacaccaatggtcccaaactgttatgcatagctccttcaggacaggtgcagcttcaataaagaagcgtgtccaagcgatatcacatccttcagggagttcatccagattcagaacttgcagattccgaagaacatgtgcaagcagtttcgggcactctggctgaacccaaatctgcaataaaagtaataatggaagaatgcagattaagttgagaatgatgaacaaataacctgctgaggacttgcttaaagtaattaccttttcgctcaagaaattgaggtgcaggtctcttatggaaaggacattaggaaggaattgacttaacctgataaccttctgccatctcatgctttcatcagtgaggcttaggctcgaaagcaacgggacgttgccaaaagacaagggttcttggggacagttccacagactaaaaacaaggcgtttgaggtttggtagggagctgagctcaactagttctaagcccgcactagagatattaagctcaacaagccgcgggtgttcaaacttcatctgcaacacgctatcctctgtttgacacatggacaaacgcagatactctagccgtttgcatgtggcgatgatgttgagaatgtcagtttcagcaagccttaagttgcgtaggtggagacgcgtaaggccggcaaatgcatcagtacaggcaccaaaaaatgtcatgagctgcttgccattgtggcggagatcgtcgatagagcaatgttgtgcccgcttaccagtcagaatactgaattcagcgctgtcgaggttgtggctgtgggtggccattgctcgggcaacagttttgccaatggtgagacaatcatagtacttgaggtagaagcatatggtgagttggcgaaggggaatctcttggtttctgaaattgaggatgttgtctgttgcatcagacacagcagcgttcatctgaatctgaattgcgtccttggaggtggcataataaccataataatggggcacaaaggaatcaaccgaaatgtctaaatttgagagcaaatggcggaggtggatcgtcctcttggaaaggaggcaggtcctgacagcatcgggggttgacaatattactcccctagcctcacaaataaattcctaattcctttatgatacttcaacaaaacagttgcctcagctcttagctgcatgtcaagctctcttctagttgtagggcaaaggataagggaaaatatttcattgcaacaaaaaaacaaaaggaagccagaacattcaaacatattactattgtatagcatgcttacatatgccttgaaacgtttgaaactagagtatttcattgcaaaaaaaaaaggtcagcatatattattgctactcaacaaatcacatttttgtgctgaggatttaagaccggaagtgaattatatgaggtgacgccatcaccaatccctctgtaatttgcttcttcaacaactcctgctcctggatggtctccggataccctgacggagcaaccttgatcttgggatccaagtcttcacagcactcgagcaccttcctgtcgtataaagatatgtcctctaggttaactgcagcttccatgacgtgcctgatgtatcccataaaattctcatttggttggaaaccatagatggttagcttagtcaggttgtaatgcctgaaaccatcaggtgtagatgactcccactccacgtttgttttttcacagaagccctgttcttcccgttccacactatctgtctccatatcacaccaatggtcccaaactgtgatgcatacctccttcagagagggtgcagcttcgaggaagaagcatgtccaagcgatatcgcgtccttccgggagttcatccagattcagaacttgcagattctggagaacaggtgacaacagtttcgggcactctggctgaacccagatctgcaatacaaagtaataatggaaggatgcagattaagttgagaacgaggaacaaataagctgctgtggttaaagtaattaccttttcacttaggaagctgaggtgcaggtctctaatggtgggggcactagaaaggaactggcttaatctgataaccttctgccatctcatacttacatttgtgaggcttaggcttgaaagcaatgggatgttgccaaaagacaagggttcttggggacagagccacaggctaaaaaccaaccgtttgaggttcggtagggagttgagctcaactagttctaagcctgcactagagatatcaagctcagcaagccgcgggtgttccacctgcagctgcaacacactatcctctgtttgacacatggacaaacgcagatactctagccgtttgcatgtggcgatgatgttgggaatgtcagtttcagcaagctttaagttgcgcaggtggagacgtgtgaggccagcaaatgcatcagtacaggcatagaaaaatgtcatcagctacttcccattgcggcggcgatcatcaacagtgcaatattgtagcttcttatctggcaaaataatgaattcagcgctgtcgagcttgtgggtggccatggctcgggcaacagctttgccaatcgtgagacaatcatagtagttgaggtagaaggttatgctgagttggcgaaggggaatctcttggtttctgaaattgagtatgttgtctgtcgcatcagacacagcagcgttcatgtgaatccgaattgcatccatggaggtggtataataaccataataatggggcaaaaagaaatgaagcgaaatgtttaagtttgagagcaaatgtcggaggtggatcgtcctcttagagaggaggcaggtcctgacagcgtcgggggtgttgaggcggtccaggatgttgagcaagacatcatcaggaagcttggtgaacctatccaccactggtaggtggttattgtgagctgctgatttctgcatcaatataattgcgaaacaaaattaaaccgtgcatgcatgcagacggcaggcatacaaatgcaaagaaacaacaacaacaacaacaacaacaacaacaacaacaacaacaacaacaacaacaacaacaacaacaacaacaataataataataataataataataatatagaaatatacaagaagtaaatagagaaatgaaaaaaagaagaaaaggcaagcggcttacattgcggttgcggcgactacccttcttattcttcatggtggtggtgtaagtagcttaggtgatggatggattgggtaacagtttattgggctattgcgcttattgtttgaggtggatagtatgaacgcgaacgtcagctcctccattatataaggaggaggagccgaggagaagaccgacgggcaactactcatcatccgtctccgtctccaaaacggaggacgactctggattggagtctggattgggattggaggaggcacaagggcacaagggcacagctcagggtgcgcctgcgccatgaccatgcacatactcctagctagcttgccgtccgtctggctttaatttgacacatcctatacggagggctttgcctcctttcagaaattttaaaaatatatattactccataattgttcagcacagatactactactctctcactcaatctatctgccatctttcagtaaaagaaaaggaaagaaatgcaattgctatttcctgattcgaatcccaggtacatccttaaggcccatcttcagagcagttttcctgtacagtgctggaggcttttccaaaccgatggatttacagaacctgttcgctaggtcaacaagcatggtcttgtctcttccaacatcacctattgaattgtagtagccaagccatgcgtgatatgctgcctccttgatgctcatatcaactatctttattgaaccatcaacctgcattacaaatggaacatgcatgttcgttcaagctggagatacaattgacaacgaatgcacaccgctgtaggggggaaaatgtcctacttatatttactcaaatccccatagacggtgtaaaatggttatactaacagaatggaatttaaaatgataaaatggttattcgtacaaacaatggttcaaacagaaactaaaatggtatagttcatagcatatgtcatggttagtgcaaaatctatgcaacagcatttagctataacttatgaatctttagattagactcctatccataagcgatatataagtcccaggctaattagtgccaggctcacatcaactgttttttgaacaccatagtacgtctctactcattcaacctaaatacaacgaatcgtatcaaagacagtaaacaatatggcatggaggctaatgcagtctgcaaaaacgaaacatgacaaaagcaatagtgctaggaatgctggttattttgtgcaaaagtaagaaaaatattcctccaaaagaacgtatcaaagcaaacaaagagaaaaagaggagcttaaactagctatcacctatcagtagttcagcctcaaagtagcaaatttggcggggtacaagacttgtatgcccgagtagcagtagtgatttaataatatctagctctgataatatgctagctcatgctgcactaacagaatagacaagttaaaattagctcattcgaacctttcgtttcatctcctcgtcaatgtttggtgtttgagacttctgcaccgggagatcatgtatctcatttaagaaatactcttcccatggcgcaagcaaaagaatccctttaccagatttaccttctcttccggtccttccaagtcgatggatgtagtgctctctatctgaaggaacaccaacctaaaccaaaatagtatatatgttaaaatagtaattgcagtgaagaagcagccatacaatcagctgcagagaggtccactacagcagttgcttttgcttcagcaaagtagcaattctgtcctgaactttcacaactacatttttaaaagaaaaaagactacctgaatgactaaggtgacacctggataattcactccacgtgttgaaacatctgaggtcaccagaatcaagcgactagaatctcgaaattcttctgatatccgagttctatagagctgaggctttcttgaatggatttctcggacatttagcttcaaatctcgaagcattatatacataaattcagtcaccatggcagttgtgcagaaaacaatcacctggaatgagaaaggctaagtaagtttatcatattttaattcttaatcaattgtctggtcaaaagagagggatgagagcaccttatagtccacttcctgatcaatatgttctcggagaaggcgataaaccatatgaaaatgcagctcatgtggcataacgagatacaactgctccacctaagctcaagaaaaccacatatcaagggatcagtaagcaactgaaaaattatttccatgggagaagataaaaagagactacgcagcaatattttacttttgagctaaaaatcattagaaatatagtttatatgttatacaaagtgtacaaatgtatcaaatatccaaatggtcgacacaatggcaagaaagacgtatggtctaggatatctgtttatgtgaatgtctgtatgtgtatccatggaaagcaaaagtgctgaacaatgcagagctaatggaagtcccttccatagatgcaataatgcaatgggacctcttttaattggcacattaaaataaatgctaacagatgctctaggtaatgcaaaccaagaaaattgatcacatcacatttctgtacttgcaggagtcagaaaaaatgagcacattgcagatgagaaaaatcgaagattaagttgatatgcagtactaaatatactagagtagaactggaaagtatagaccttagtaggagtttcaacagctcccaagcccactgtatcaacaaaaacatgatccctttttaaaactagctgtgaaacccttcgaacctgtcattggcaaattcagacatgtggttgtcaatcaatacagaaatagatagacaaaaatttacagaatactagtgcttttgcccatgctgatcacagtacctcctttgggattgtagcagaaaatagtagtgtctgtctttgacgtggcaaactatcaacaatcttttcaatgtctgtacggaaacccaaatctagcaaatgatcagcttcatccaatacaagcaacttcaatcccatcaagcgaacagagaatgaagatttgttctcaatgtgatcgagcagtctaccaggtgtagcaactaaaatcttcaagggggaaaacacaagatatagttcagacaaacgacaaacatcagcagctattaccttgatctatagtaggtcagtaaacattacaaacctggcatggatcagattctaaacgtctttgatctagcttgaatctagtgccaccaataagagattgaacaccaattccttgatggtacttcaacagaacatttgcctcagctgtgagctggatggcaagctctcttgtagggcaaaggataagcgaaaatattggagacactcgatgatttgtatggctcttcatagcattcaagactgattcaattgcagggagctgtttatcaatacatttatgaataaattggttgaaggaaccaacaataaaaactaaacatctcaaagtatctccttgcaaaatagtattaccagaaaagctgcacttttgccagttccagttttagccttgacaagaacatctttgcctggatgcatacagtgatgagtgaggggcaacctcttgattgttgaaggtttcagtggtaacatgttcagataaatcaaaagataaaatggtgccacaaggtgctaactgctaagtagtatgtgtggaactactgaagtgagtaacatggtcagtataaacttgtgttgttagtagcacatattcgaatgaaaataaaaaaagaaagtaccttcaagacacataggaagtgctgtttcctgcacaacggtagtctgtacatatccagcatcagtgagtgcttttactgttaggggagagataccacattcctcaaatctgatgtcaacgaaacaatagggcttattaatcacatagtaagtatctctgtttcggagcatgctaggaggaatacactctctatttattatggttaattcttgctgtagatcagtgccataaaaaatgaaactccaagaagactatgtgtagcaacttcttagttcatataccatgatcggtatgtttcaaattcttttgttgttttgcctaaaagttcataataacaatacatatatgatgttctaaagctaataagctccagaacaaataaatcaaaactacatgagcaaataggcagcaatagaaggtaaactaaagtgtaaccttttattggtaaacaaagattcgcccctcgactcgtaacgcctccgctcagcacccaacacttccctgttctttatctcctctcgcagctctcggaagctaccagcgagatcgttgttttcttcctcataggacttgagcgctctcctctccttcttcatatcacagttcctcaaagcagcactgctccatttcttcctgatggcacttctcgcctccaattcatcgtatcctgattcctcctcactggatgctccaaacctcgcaaacctcatatccttcttcgcagttgatatatcctcatcatcctcatctgaggagtctggcctcaatttcctgccaaatcgccctgctgcgaacgagtagaacctctctccattcaactgcgagggagcaatccgagcactggcaagacctctagcaatcagcggcaccatcgatgtaccactggactcctgatgcgcctggaacagaggcatcactgagtaggatctcttgggaccgaagaaacagaaggatgcctcctttgttcgcgaaggaatggcggaagacgagctccattgccaccaccagggcgcggccgtctggaaatccctcctaggattgaacgcagccagacgcggctccttcccacccctcggtagctcctgctttgtagagtccaacttacggcggtcgccgccattcccgccaacggagacgatcctcctcggcggccgcggccggtcggcgcggtggatgggcccgtcgtcttcgttccagagatcctcggcgccgggcaagaggaagcggtcggcgagggcgcggatgtgggcgcgcgaggaggtgggcccgtcgccgtcgtcgggaggggaggcgccggcggcgggcaggcgggaggcgcggatctcggagcggaggcgggcgaggtagagctgcttctcgtggcggaggagcccccgctccttgtgcctcgcgagcttctcgtgcatccgcttgtgctgccacttcgacagcccgcccgggaacgtcctcggcccgccccccatcccaccggcgtcctcgtcggcggcggcggcgagaagcagtagggtttatcaatcaattatcactcgctgggatttttcccctatccagggagggttttgacttttttgactctgacaggtcgccgtttccgccttctgagaatacgtttccgccttcgcgtggggtttgcagaaaatgggtaccaactgaatcctcaactcgcagatctctcgcggggagagcagaagcagagatggagaggaagcgtgtgctcgtcgtcgggggcagcggctacctgggccagcacctcctcgccgcgctcgctgccggcggcgaggtcgacgtcgccttcacccaccaccgcgacaccccgccgcagccgctcctgcacgcgctccccgggcttcgcgccttcagagtagacctccgctccggcgatggcctccgcgccgtctccgagtccttcggccaggtacctgctctacgtttcccatttcaagttgtgatgctactgctagtcagaatgtgcgttgctacttcactctctttgcagcatggaaaatgtaatatgttcttactgcgagaatcgaatcgtttcctttcctatgaaaatccctgcaaatgtcttatgaaattgtgtagattttagaattttctagagctaatatttcaaaaggatggaacacttgacacaacgcctttgctgtatccagtttggtggaatcttgaagtgctttattactaaataaataatgtatgagacagaccgctttattccttttctaaatggagaatttagactatttaccatcaaattcacgttccttaatttttttaccacctaatccgtatgccctctataatatgtcattaggactgctaattagcctatttggtaacactttatctatttttactgtatttttcttttcttaattttatttgtatatattttcaagatttgtggacatttttaccctggacccacctgtcagatcaaagagagatactctgggtctagatcgattcgctccctccaggcgtagcgccaccgccgccgccacacgcttcttcggcgtcgcgtcaccaccgacccgctgccctgcgccaccaccgagcgccgccccaccacccccgccggcactgtgcggcagcacctccagccgccccagctattaggcagcacatggcatggaaacgtagtaatccttcacaagaacatgccatgttttccatgttccatagctagctaagctttttagctttagcagcatcatggtgagtgagtgacaagattcattggcatggtagcatctagcgatgcatgcaaagctactaacacagtgatgtttgtgtagccacagcgccacagatcgtgcagtggggccgtcgagttggggcggcgggggcgcacagtggcgccgccggcactcggcggggtggtggcgctcggcggttggggcggagtggcgtcgagtcagctgcggcggcggcagcgctcggcgattggggcggcgagcttgcgcaccctggcggtggcagcgttctgcggcggggtggtggggcggcgccgctcgggggcggcaagctgggggcggcgctcggtggtggggcggagagctgaggcaagtggcggcggcggcgatcggcggcggggtggtcgcggtcgatggcgccgatgccggtcgggggcgttgcctggagggatcgatcgatacggagaaatatctctcttttggatctgacaggtgggcccgggggcaaaaacgtccataaatcttgaaaaatatacaaatagagttaagaaaagagaaatacgaaaaaaatagataaagtggtaccaaatagactaattaacagtcctaatgatatattatagagggcatgcggattgggtggtaaaaaagttgaggcacgcgaatttgatggtaaatagtctaaattctcttctaaatgagtttaattaccatgttcagccgcatgtgattgtgaactgtgctgcaatctcggtacctcggcaatgcgaaacggatcctgctgctgctatggctactaatgtaccttcatcacttgtcacttggttgttaagctttgggaatgacaacactcttcttatccatctctcaacagatcaaggtgcactgctctctcaactctcatccttgataatctgacgctatcgaaactcttctgcaggcattcatttttttcgtttaaaagcctagctagagacaaccgaggatcttatgaaaacccagagtttataggttacttgctaatttatgcatttgtggtctatatagtaaccagcaagtgtaggaaattccttcttttgatcttaccaagtcactctcttgtggtaccagtttacgagggagtaaaatccttctacaaagaggatgatgagaccttgccagtgaacatgtacggaaaatctaaagttgctgcagagaagtttattattgaacaatgctcaaactatgcaatcttgagaagcagtattatttatgggccacaaacaatttctcctgtggcaaaatctcttccaattcaggtatggttaaatgactaatctgcagcagctacaatacttcctccttaaagcaagttaaacttttagtcttatcatagttgtttagaaataagaactacacctcatagattggattgtctaactaaaaaagttcttcctctgtatgcagtggatggatagtgttctttcacaaggccaacaagttcaattctttaatgatgagttccggtgtcctgtttatgtaaaagatatggtggatgtagtgttgtctttgacaaaatcatggttagcaggtataaaaaggttaccacatagtgatgttattgtctttttatttgacaatttttaaaatcattatttttgcctctcgaggaacgactatttctcatttattggctccattgatgctgaggtactgacatcaaagcacatgctgcagatggtaaagctgttcaagtactcctgaatgtcggtggaccagatagagtctcaagactgcagatggctgaatctgttgctgatgttcgtggatatagtcattctataatcaaatctgtatctgcttcatcggtattaatcttctccgtgggtcacagtaatcaagaatgcatatttgct

SEQ ID NO: 1381 - DNA, 1558 bp, Oryza sativa
ttaaaaaacggaggtagtacaatttacagttatgatgtttgcaacacaagtggaactagcctttcctaatttattgatttgttgcttgatcgatgagttcagtttaggtactatgcattgctatgactctttactatttattatccaggttgaccggggtgtagcttctccaccagacatatccatggatatcaccaaactaacccaaatgcttggtatcaagccaatttcatttcaagatggagtcagagctacacttgctgcagaagctagtacatgacactttgtctgttcattttgccaagagagctgcttggatttgtctgtgaaagtatgtgagataaagagccactttcagtttgttgaacagtggcaaatctgtgttgagtatatgtgaaagatgtaactttcgacggtgtgaaaaaggaaattttgcgttcacccgacatcaatatcatgtattactgtctggttttatacttccgaataaaatcatcattcattttgtactctttttcagtagcctatgattctatattaccacatattatactgttatgagttactacctccgtcccatattacttgtctttttcagtttcttgtttgtcaatgtttgattattcgtcttattaaaaaaatttggaattattatttattttatttgtcaattgctttattatcaaaagtactttacatatgacttatctttttttatatttacactaatttttcaaataaaacgaatggtcaaacgttgcaaataaaaagtcaaaaacgtcatctattatgggacggagggagtatcaagctgtacttaagactagttagagccatcacctactttagtcaagcattggatcatgtgcttaaaccttgttggactttgcagcaatactgctgggagaagcttccacaaactttgcagaaaactgtggcagcatcaaaactgtgtcaggacctagtgctacatcactcatgcaggtaaaaagcaaaactgatatcaatgaaggtttgaattcttatgcttgcagctgttaaatttaaaattttacacttgcgaagcactgtatcaggtaaattgcagccatcctgctcctgcagctgctcatggacatttattctcacaccaaagcatgaggtgtacacatagcatcactggatgtcatctataggtgagcatccatattaataagtccgtgtatggttagtagaattccagtcaatctccagctaaagcagcaattgttaatcaacagtaaattggttgcttatattaaattgctcttaaaatctgcttgcttcgtgtggcgttattaatgaaaccagcagtgctgtcacgcgctattgacagaacatacatcaactggagtaactttttttttgctgggaattggattagcaatttgacatgtcacttgcaaagatattgatgttttcctgctgaaatgcatggtgactagtcccaacattccaaagagctggatgaagtggtaaacgatcaagcttcaactgtgcattcataaacctgttcattaatgttactgtgggcacccga

SEQ ID NO: 1382 - DNA, 1351 bp, Oryza sativa
aatctttggtggtgtggaataggcaaaatacgttgggtggcataatgttagatgaagtgattgatacacaggtggttgtagaggtaacgttgagtgatcaagtgcaggcttgctggagcaaaaagaagatgatgcctcactcagtcgttgacggcacaatctagctaacctgctgccattgtggtgattcatgcctcctctccgaagactctttgacttgtactaatggagtggactgctaccaaacacgcatgaatagacgaccagatcatcatacaattcatcaaaattagcactcctagtttcaaactacttaacaaaggaaattcaacaaacttcattaaaatagtgtagtgtatttttttctttaaaaaaaaattgccaacgccaatcgcggagtttcacatggaggagggaagaatggaatgagcgccaggcgtcgcgtcggcgcgcgcgtgagtgcgtgatttgtgttggttgtcttcctcttggcttcgcttcgctgctttgccgcgccttcgccgagggaggccgaccaacgcatcaatcaaacacacaagcacaccacgcggacgcagcagcaggggaggagacaatttcctattcttcctcgccccgcgtcgcctcgcctgagtctgactctccaaacgccgaccagtgacgccgcgagccttgccccttgcccgcgcagatctcaccaaaccctaccagatctgcgccccgccatggactccgccgccggcggtggcggcctcacggccatccgcctgccctaccgccacctccgcgacgccgagatggagctcgtcagcctcaacggcggcaccccccgcggaggctcccccaaggaccccgacgccacgcaccagcaggggccccccgccgcccgtaccaccaccaccaggaagctcgtcctcgcctgcatggtcgccgccggcgtgcagttcggctgggcgcttcagctctcgctcctcacgccctacatccaggtatacccactaccctttgctctcccttctgcttcagaatggagagtatccgcatttgggaacgggaacggatcgcccatatatgcgtggcttgatgctcccttttctgtttctgctgacgcaaccgtattagagcaccaaaattcgcgccctacatattttgtgctttgaatgcaactgcttactgaaatcaaggttgctgccaaatggcaataagtgaaaaatcagccaggggaagacttgcctgcttaggaatttcgataccgtaaatttcgatacacaggagaggtttaactagatgaaaaattcacactcttcacatgtacatgttaaagcatggtttcttaacaccgaataacttg

SEQ ID NO: 1383 - DNA, 2690 bp, Oryza sativa
cctccgaatcgagacacgtcgccatcgtcgtcgtcttccacccgctgctcgtttcctcgtcgcgtcgcgcgggagatctctctctctccctcccttccattaaggtaatcaatcaaccatggcgccctcccgcccgctcatgcgcgggatccgcccgccgcgcgtcttccccacccgcggcggccgcacctcgcccttggccctcgccctcgccgccctcctcctcgcctccgccttgctcctcgccctcatcgccttcggcgtcttctccctcccggtctccgcccccaacgccgccaccaccgactccgccgccgccgggggagacgccgagcccgccgatccacggcccccgcgcacccgcgcccgccgcgaccttaggtaaggggccgggttcccccccctccccctgctgccataatatctccagatttgcttcctccttcgatctgccgctgctaaccgtttctctcttggtttctctggagcagcgagggccttggggaacgaggagcacaatggacggaagtcatatcatgggagcccagggctttcgtctatcacaatttcctggtaaaataatctgctctctacacttgttcattcatctgcatcctctcctcgcataccgggatggcaacaacaatggtgttcactgaatgcatgttatgagaatggaatgatagtactgatagttcacgctttgttgcctgatagtactgataattatttacttttctgcactttttgttgcctgatagttcacgctccaataactctgatagtttacaattcatttttgttaaactgtatgaattgctgatggcttatctcttttgttagtccaaggaagagtgtgattacttgattggattggccaagcctcacatggtcaaatccacggttgttgatagcactactggtaaaagcaaggacagcagggtacgcacaagttcaggcatgtttctccaaaggggacgagacaaggttattcgggccattgaaaagaggatagcagactacactttcattcctatgggtatgtcatggctcaaatgttttctcttctgctatttcttttcacaaatgagccaaattcatagtgtggccatacatgtcctttttatttcttagtcatggatagtaccccattggcacgtaagaggtttatggcattgggttgttaacaatatgcagttcaataatgcaactctcaacatttccatatttttatcatgcgaaggtttttatcatgttgttgtaatcgcaataatgatttgattcattctggtttgcagaacatggagagggactccaagttctgcactatgaagtcgggcagaagtacgagcctcactttgactattttcttgatgagtacaacaccaagaatggtggtcagagaatggctactcttctgatgtatctgtacgtatggtactcatttataatgtattggttacaagtgttgttaactggatttctaattaactccttcacaatgttatcaatggaaacagatctgatgttgaagaagggggtgagactattttccctgatgcaaatgtgaacagcagttcattaccatggtataatgaactttcagagtgtgccagaaagggccttgctgtcaaaccaaagatgggagatgcgcttcttttttggagcatgaaaccagatgccactctagaccctttaagtttgcatggtcagttcagtgacttatctgctgttcttattactttttttaaactgattgcatgacttgaagcctgctgggcacttctgttctatttgctatgtcctgtttaaaacttccatcgatgctccttcagatactttacgtgtgttttatatgctccaagcagtccctttacaaatttctttatggtctgagcagggggttgtcctgtcatcaaaggaaacaaatggtcatcaaccaagtggatgcatgtccgtgagtacaaagcttgagctttctgaagtcgtgattaccaaaggtatctagtgttcctatggatctgtactgagtaagatgtaaagctggcgatattactgcatattgctttcttaactagttttggtcctcttcaaagtgacttccactcattcaccctagcaccagaaacccaggaagcaatatggctttgaggttatctagcacctttagctttgcattcttctcttttcgtgattactcctaggataggagtcatgcattcagatagtgttctatgtaaattttcagctgaggatggttaacgtttgcttgtagtagcttgatatctgccactttgtgagatctttactatctgaagaaataatttgctcaaaacttgttttataaactgatgtgctgtatctttctttggcagatggaccctatataaagcattgactggggcactttccaggatggcagttatgtaggctttagagatccacaccggtggtattctttgctctctgagaatatatagtagaggcactaagcaagggggtttacttgtccataccgtgtttttggagatggtcttgttgaacctggcgccttttcttctttattttttctggcagactacagaggaatgaatggtccattgttggggacatagggtgaggcgtttgatttagtttgttttgtggtgtattgctatctgctaatgttagtagcttaattatgtacactg

SEQ ID NO: 1384 - DNA, 529 bp, Oryza sativa
ctggactggagtgtatcctagccatcccgagatgatccttttttctcaaaaaccatcccaagatagtcataagcaaaaaagcctcatgttagaataaacaaatgatgtactaaaattttgagccacacagctacagatttgatgtcccagcaacaaagaaatcaaatcaagagcctttctcccagtatcttcagattttaaaatggtgcagaataacaagagtcaggggaataatagactattaaattggcagtatctgtgaaaataaatggagtaagacctggttagagtgtagatcaagtattcccaagttcgatagcatgccaatatcctctggtatggatgtcaacaagttatttctggaacataaaagtacaaatagagtgaacttgtgctgtttaaaaataagagcatggtaaagaagtttgtccaaaatagataaccaaccccatataaaactctgctagagaagagcaatcttttatggaaggaggaatcagggttatttctacataacaaaagtagaaag

SEQ ID NO: 1385 - DNA, 658 bp, Oryza sativa
cgcagtccatgagagtaagataactcattaggccccggaggctaaacactttatgcgaccggctggactgtagtgaggaattgatagcggatagggatgggccacaggaagcggctatgagcgtgattacgccacgcgcgcacttggccctcactaacgggagcagggcctgcaactacgccgtgtaaggcgattgccacagaaaaatgagctattacttatgcaaccacttatgtgcatcatgcggggcataatcaaagatgataatgtggtgtacagtggcatttatcagttcaccaaaaactaagttaaattttgacctatacattgagaaaaaaaaagataaattctaatgtgaacaataccgctactattcatacgctaaatttatctttttcacatcttcatgtgtgagttgagtttggacctaaattttttttagagtggtatatatattgggtgagtggcgtcaaattcttcaagaattttatataactgttcggatggtttttaaaacgagagggggggggcatcccctcgataaatcaaaatagtttcccgcaacaaatccaattatagatgtcaacaaaaatggctggggtattcttttctaagtgctctacccttacaaaaggaatagatggaggaatgtggtcgc

SEQ ID NO: 1386 - DNA, 1792 bp, Oryza sativa
agaagaagaacaaggccgcgtccaacgccgcagatgcggatgcggccggggacgccggggccgacgacgacgccgccgaggagaagcctgatgtcaaaccccaggtacagccacagggagcgcctctctctttgttcttagggtttgggggggttcatgtttttttcttttttccttttctttttgcttgtttggtctgacctaggaaccgtggttgccgcaggtggaggtggaggtggagtacgtcccggagcaggcggacctggacgacggcctcctcgccgacttcaagagcatcttcgacaagttcaccttcaaggattcctctgccgacgccgaggtattaccgcttcctcttgtgctgctacggaagacaaaccgatcgatataagattcctctctcatgcttcaattttgcctgctctatgtggagaaattgacaagtggattggtatttttctgataggatgacgagaagaaagatgaggctggcactgatgccgcaaagaaggctgcagggtctgattcggacgacgacgagcaggggacacagcaaaagaaggaagggggcttgtccaacaagcaaaagaaagttcgttcttcgcatctccctattgttgataacatgtttcagtgcctccatcttccttctatgttaattcaccttaagcttaagtttttctttccgttttttagctacaacgaaggatgaagattgcagaactgaaacagatatgcaatagacctgatgttgtggaggtaagctacccttattagttatgctaagattaactggtagttggctgcttgatgtacatctgtttgagtgtgttgtcactatgttatgtcgtaattgctcatctagggtgtcactgccagcgctgccagatataggtgaatctgaagtgaattcacaacaatgtgttgaaatgcaccacttataagattaaagcttctcaattctcaaacgtttttgtacattcattacctgtgcaaggggtacacccttctgttgttcacagttcctaatgctgggcattcttgtattttagcttcattgaacatacatagtaatgtgctgcatgtatttttcttgattcttgagggtagaattgttacataaattccctagcaattgcagcaaatgtcttcatggtgcacacacttgtaccagtattgctatattggagtgcaaacataaatattacttttatcttattgaggaaaatgaagcaacgggaatgacaccagtaaagtagttctatgtaaacttgttgattaatctttgtttgagacatctgtattcttcttgctaggtctgggatgcaacggcatcggatccatcattacttgtctatctgaagtcctacaggaacactgtacctgtcccaaggcattggtgtcaaaagcgcaaattcttgcaggtttgtgattacctaccaacctgccatcaatgacaaccatgttgttttgcataatattaatgaagaacagtgcttctgtgcgctcctaaaaaattgcacacaaatttaaatgttgttgttagtactggagttcctattaagtagttgcgactgtcattcaaagccatcattttgcttcaaaactcacctgtagaagagttgaatagttttttgaatcattttagtggagtttgatgtggaacaatttactcaaaaagaggtgtggatggggagtgaggggacataatgttgataatttacacccctcttatacagatgcaattcttgcagggatgctgtaacaacctgggagcaagagcttcatggtg

SEQ ID NO: 1387 - DNA, 3548 bp, Oryza sativa
ctggttttgtggtaagtttctgcaataattaaattctcttttttttttgtttcataaccaggcatgtccaacactccaaacacaatagtatattaatgtcccgtgattctctgcaggttcaaccatgtgttggtgtctggagtgacaaatgccgttcaaagtatggaagaaggagaccgttcattttggctggatgcttgatgatatgctttgctgtgagttagatgaagtttgataggttatcatatgttcccattctttctgtgctctaataggaagaaattcatacgtaggtaactttaatcggattttctgcagaccttggttacattttaggagataccactgagcactgcaggtaatctttgatacttctacttcctttgatagttttcttcacatcaagtgtgccgccactaaaatgacgagtactgtttgttcagtacatataaaggttcaagatttcgagcagctattattttcgttcttgggttctggatgttggatctcgcaaacaatacagttcaagtaagcctcttcaaaagtttgcttgtcgtcatttgtatttgcaccaaatttgtcaaaatatatgccatgaattaattggattacctcaccatggatgttctctaatatcctgtttctcctttcctttttccctacatacagggtcctgctcgtgcccttttagctgacctttcaggtagttaatgttttcattttgaatgtctaccatactggacccacttaaatatcagtgactaaatgatataccttctattacgtaggtcctgatcagtgtaattctgcaaatgcaattttttgcacatggatggctgttggaaacgttcttggtttttcatccggtgctagtgggaattggcacaagtacgtacttcatgtgtcctttatgtgcttatgttcacatgaagtttgttgctcataagtatgcgctgtcctatacatgatactgttggtaaagggttgaattgacttgttctactcaacccaaatggatcattgtacaattggtaacatctgacggctggtagtcaatctgtattaataaacgatagctatatatacatttagcaatttcagtaccatttgtttcaaatactggtgatgttgtttaccctttgaatgatacaagagtagcgtatgtacaagcaaatcacggtaaaacattgtctcagcatctttctcttctgtggagagagtatcctatcacatgttgaaaagtactatacggtgattacctgtttgaaaggactactgtcttggtcctcttgtttaggcatcttgcttgatgaagtccctctagttagtaaggttttttttggcatgaaatctgagtttatttctcataattattgcaggtggtttccttttctaatgacaagagcatgctgtgaagcttgtagtaatttgaaagccgcttttctggttgcagttgtaagttctcttaaatcccgctgctgcgcctgcagtagaaatttcaagctgttttgtaacagcctgcagagctagcaggtcattcttaggaattgcatgtgatattattttgtggagtgtggactgtaatgtgtgcaagctgataagccctactatgcaggtattccttttgttttgtatgtctgttaccctgtactttgctgaagagatcccgctggaaccaacagatgcacaacgattatctgattctgcgcctctcctgaatggttctagagatgataacaatgcatcaaatgaacctcgtaatggagcacttcctaatggtcatacagatggaagcaatgtcccagctaactccaacgctgaggactccaattcaaacagagagaatgtcgaagttttcaatgatggaccaggagcagttttggtgaatattttgactagcatgaggcatctacctcctggaatgtactctgttcttctagttatggctctaacatgggtatgctaccttaagacatctatgcatgtatatcagctgcatgctgattgtctcttactgttttggaatttgtagattgatggtgttcatccatatcgtttgctttgcagttgtcgtggtttccctttttcctttttgatactgactggatgggacgtgaggtttaccatggggacccaaatggcaacttgagtgaaaggaaagcttatgacaacggtgtccgagaaggtgcatttggtttgctattgaattcagtaagaacccttgatcaatgtgtttactataatttgtagtatgtcgctatgtttagatgctgttacaccccaatcatttctagcctttctgtatttttattggatactgctagttgttgctcttactctatcaaacaactagctgaaagtcttaaaacttagttcatgtgctttcctattctttgtgccctgtagtggtttaagcatttcagttggattctagtttgaggtgataagttggtggcttcaacgtttgggtctttaatacaggttgtccttggaattgggtccttccttgttgatccactatgccgactgatgggtgctagactggtttgggcaatcagcaacttcacagtgtttatctgcatgctggctacagcaatattaagttggatctcttttgatttgtactcaagtaaacttcaccacatcattggagcaaataaaacagtgaagaattcagccttgattgttttctccctacttggactgccactctcggtaagtaccagacttcacaaaatcctgccttgttgggttggaagctttcttacacttggctcttgaatgtcacagatcacatatagcgttcctttttctgtgactgctgagctgactgctggaacaggaggtggacaaggtttgtgttgctgatgtttttttcttttacactatgctcatgtgattctcattgattgaggatattttttttatcaatctccaggtctggcaacaggagtcctgaaccttgcaatcgttgttccgcaggttagcatgttcataagaaacaaaatgtatttctatatgtgctgtcactgaagatgtcttgaccatttaatactccattattctgtgcagatagtagtgtcactaggagcaggtccatgggatgctctctttgggggagggaacgtccctgctttcgccttggcttccgttttctcactaggagctggtgtcctcgcggtccttaagctacccaagctgccaaactcttacagatctgctgggttccatggatttggctgagcagaacaccagccgcatggtgtgtaacattgagaaatgcaactccattttgccattcgtttacagtgaaatgattctttttacctactactacaacagaataagctgaaaagatagagattaggatagagagctaggtaactagtccagttaggttgatgtgcatacaaggcaattggaaggtgtaagagctgtatctacttttttgacagaaaaatgtaagctctgcccgaatgacatggcggatagattttacaatggatgtaatcatgtactatatataacacgttttggtcacagcttgc

SEQ ID NO: 1388 - DNA, 697 bp, Oryza sativa
tcctgcagcccgttacctcccagagatggcacgttagccctggtcagatatatgccaggcttcatcctaaccattacaggcaagatgttgtgtgaagaaggacgaacatatagattgctaagctgacacgtggtggacaagaatgaccgacgtgactggtctgacaccggtcatgtcgtcagtagacagccacgattccacgtcgcatctgctcccggcgaaagtggaggtagttgtggaccgtcccatcagaaggtgactcggatggcaactatacaaatctccgtccatttatgaaaagggtgcatgtggtatccccttaagataaaaaaggaggaccttgcccacttagagggaggaggagacttttccagattgggaacctagaacgagggagaggctggctcatactttgtagttccttcatacacaaatccaccaaaacacaggagtagggtattacgcttctgagcggcccgaacctgtatacatcgccggcgtcttgtgtgcttcctgtctcgcgaaccttccacagattgggagcttagagtctcacccagagtccccggccgaaccggcaaaggggggccagcgcggtctcccggtgaggagccccacgctccgtcatctggcgcgccaggtagggggtaaggatccttaggacatgccttgttaaggtcggtgtagtcgatgcaca

SEQ ID NO: 1389 - DNA, 3992 bp, Oryza sativa
  unsure (1)..(3992): unsure at all n locations
tcctgcagcccttcaaaaaaaaaatttctttgatatgaagtttgttttgtattgcaaaatgtggcttgactatccaggctaagtgtataactattctgttcacgtatgctgataaaacaccaggtagactgttcaactgattggtctcacaccgacctaacggctaacgcaagaactttatgcagactggaatactggattcatgagtactaaatgagtatgtaattaagggcaacaaagttttttttatctgttacaaacatctattaattttttaggtatgatgggttcatcattgactgtttcaagagtaggctaaagagctgccaaagtgacaaattgtcgttgcagttcggccgttgtgatgacaacgatggcgatatccgctaaattggcctgtgcacggcgcgggaatctgcatgtctggtaggtcgtcaccgtcatcagaaatcgttaacttgtctctccttatgccaaatgctaatttttcaagcctaaaattgccggggcggacggtgaaatcaaagacgaacttgaatttttagccgcatcgtttgacagtaagccaagcattcaagttaagttagatggactttttgatggatcgatgatcgaccaacagactgacgtagctctgttcactccaccaaactccttcgattgatcaaatgactgtttgattatggagtagaaactgtatatgcgtagcatccgacaataagcaagccagtgaagtccatgaatctgcagtgcggatttggccgcattctgaagaactggacgagaaatgctgacaccgcctgagaccgagaggcatctgtgtctggccagagttggttgagcccgaacaaatccaccaacattttaagcaagacaacgagcaaccacccaccaccgcacggagggaggaggatttctgcctctcgtcgcattcgtcctctctccctctctcggttctcgcggtggtggccacgggcgcaggtgaggggatggtggacggcaggatggccggcacggcggcggcgctgggcctgtcggtggtgtcgtcggtgtcgatcgtcgtctgcaacaaggcgctcatgagcacactcggcttcgtgttcggtgagccctgaacttatccgagttatctcgcgtacagtctgtttctgttggacgccattgttcgagatgccaggaacatttagcggtttatactgcctttaatcgatgcgtagcagagtccccgttgttcccgtcttgtgcatcgcctgcgataatgatttctgattaagctcagtgacggagaatgctttggcctgcgtagaagacaggaggcggcggtgtacggcttgcaaacgaggagtaatttgtgaaaaaaaaacttttatatacatgttcttagcgaactaaaagcaaatgctgaaaaataaagttcgataaaaatacaccaaaatcagcttcaaatttaaagttgaaaatttaaattttggctgataaatataagcataagcgaaaagatgaaacaaatagtttacgcaagtacctcctacaagtacactgcagtttatgtgtcactcgaatggttataaaaaaataaaaaaatattaagaatatataaataatatgtgatatattatttcacaaatatatatgtttaaatttaaattcaaaattaaatggacgggaagtgtccatccatttttttgcaaaacactgcctgctgttaggattggtgagtggcgattgggagttttgcgcgaaaaaaaaaaactcctatgatgaccgttttattgatagcggtctttttgtgtagtccgcttccccttctgtcttcgctagtacggtaggagtaggaccctgtcaaaaccacgccgccggcggcggcggcggcggccggagagcaacatggccgcgtgttcgctgcagagcatcccgcccggatggcgttccggggaccggggatatcattacgctcctcagcctccggtctcctctgcgccgtgctcctcagccgccggtggcgccgactggtcgccttcgccccagccctcggtcctcgttccaccggagatctccccgcctcgcgctcgcctacctcggttctatcgatcaccctcttgaacctacctcgctcgcctactttgcgcttaaaattccgcgcacatatctggtctgtttgctctttgcagagatcttggtaagtagatttcgagtctacgaacatcttattcaattcccgcaaaanaatcctttanattcctccattccaaggaaggcctaatactattgttctatttaatgctagcatctagcactctgtccgcatacattggactgcggcaatacgagcttagagcaacgcaaatgactagataagtatgcactctaggtgttctttgaattgcctcagtgcagacttgatgaccattttctgaacatctctgctctgctgcatatgtgagtcaaattcatggctccatgggacaattggaaattgcacaacgttactgctatcctattcatgtatttgttgaacaaaaatgacatccttcgaaaattcaggaaacacaagttgcctgatggacacggttcattaataaggcacacaaattctatactactttatgagtacaatatgacgaacaataccacctgagaaaactaactgtttcctaagctatataaccatgcaaaaatcacagcactctcctaatttctttcagctactacgctgacaagctggcatctcctggtgacattttgttcccttcatgtggctcttcagatgaagcttttcgagaacaaagatttagaccccaagacaatcattggatttggaatactaaatggcatatctattgggttgcttaatctgagccttggattcaactctattggcttttatcaggttggtttactcttcagaaatcaggccaatcttgcatttgtttatttttcctattttgagatgaacatattcatcttcagcaaacgacacctgttggaaactttaaaacttaaattcttgctggaaatttagtagttgaccttgattcatgcccaatctgaaaatcaacatgcacacaatatgttgccctgattttattggggatggaatgacacaattcaacagtctctagtttcagccaattcatgttctttgtctacagacctaactgtgcttgtgtaattagtctactgctttgtctaagctatctcactctatcaaatgcatcaggtaaccaagctggcaataattccatgcactgtatctttggagactatattgttcaggaaaacattcaggtctgtccaaattttgccttgtcttatgtaaaaaaaaaaaatttgccttgtcaattcacgctgaaaaaaaccattaactactaaatatatgatgattgttggtatccttgtgaatacaagcatggtacttgaatatttgaattcctcaatacctgtgggtcttgcaatcctaatgtcatactcccataaaacaataacttgtagtactatcataaattgaatagactataacaatattttcacttcatgcagccggagaatccaaatggcactggcagttcttttgtttggtgtaggtgttgcaacagtgacagacctgcaactgaatagactgggatcgctgctgtctctatttgctgtactcaccacgtgcatttcacaaattgtatcctctaaacaaagtatacattcaatattattttctttgcactaaaataatgacacttgattctttgtttttaatagatcaataatcagacatatgcattatagaaaaaatggcttttggtgttagctcatatcaaatatatattaatttaccagataaatagtttcttatatctattttgatatgcattctcttgcacctaaagtggatgataacttttaacatactctgaaactctgatagtttctacgacctccgtcccaaaatatggcaacttttggctatgatgtatccagattcatagctaaaaatgctt

SEQ ID NO: 1390 - DNA, 1121 bp, Oryza sativa
agcgtgtagggtgttgcaaagcggaaagtggcaaatacgctttcgcttatgaaccccgtgggccatggcccttatatattcctacctgacaacttagaccgtcgatccaacacacgaacggccaggatgctttgccgcttctcccggttctagtataaaaggccactcgtggcgcaaaccctagtagaggagagattaccttggaggcttctgagctcgaaccccccgccgccgccgccgtcgcctcctccatccgccgccatggtaaggccttgcttccctatgcttaacgcctagattgctttgcgggattcagcgctgaactgacctctcttcttgctgcatcggcgcagaccttcaagcgccgcaatggcggccgcaacaagcacggtcgcggccacgtcaagtacatccgctgctccaactgcgccaagtgctgccccaaggtaaggcgaagcgaatccccttttgccctctctcgttgcgcgcgaggcacccactggatctctgtgttgattgggaatctttgctttgggtgcgggacaggacaaggcgatcaagaggtttcaggtgaggaacatcgtggagcaggccgccatcagggacgtccaggaggcgtgcgtgcacgatggtgcgtttcctctcccccgcttttggtttcttttgctgaatttgtatgtgatgcgaaatcgtagtagaggttggatttgtgatcgccgataacacactggcgatttgcatactgctggaaatttttattctatcttgatattgttgaattgatggcatacaatacaactatctcgttgcaggatacgttctccccaagctttacgccaaggtgcatcactgtgtgtcctgtgcaatccatgctcacatcgtccgtgtccgctcccgtgagaaccggagggaccgcaggcctccggaacgcttccgccgcagggtacctgatccccgcctcttaactattatatctagtgcttaattgatagtgtaattagtatatcatgatcggaacgatttcctttatctgttactgcagatttaagaaacaaagtctgatatactaatagacgtaatgattttgcacagtatttgagatatctcttatctgcacatat

SEQ ID NO: 1391 - DNA, 595 bp, Oryza sativa
agcaggcctggagccactgggcggggtccccggagacctgatcggcccggaacatcgcggcgacggcggcgggcactcgggtgcggtgcttgaggagccagtccttcttcaggatcccggcgggggcctgcggcggcgcgagcgggtcgcgggccttggcggtgcgagcgaggatggaggccttggagaagtccgggagggcgagcaagttcatgggcggctgcctggagctcagcgccgccgagatcgcggggtgcagctccgggcaccccacgatggacaccagcgacagcggcggcgtccgcagctcctccgggtagtcctccatggccgccccacccgcggcgccgcggcgaggcgaggcgaacggtcgggaggcgctaggtccggtcgccgccggggtggtggccggggaggacggggagctcggatctgtggtgactgtttggttcgtttggaagaactgggtgggggcgaggacgacgacgcgcaaggagtggaaacacgtatcgctatgtgagatgtaataatgaatatagtcagggtgttttctatgaagtctgaaagaccttgttataaaatttcagaattctga

SEQ ID NO: 1392 - DNA, 1004 bp, Oryza sativa
ggagctggcgattgatctcggcggttcgaccggtgttacaacctcggtcagaccgacgatatccaggcggtcagaccggcgctactacttcggtcagaccgcgatccatcgatttcgaggataacttttattttcgctaaattttttttgtttttgggtataccaaccattcactcctctctggttggtttagttcttgtgatttaatcttacatatagtgagttctcgcttgctgtttttgcttctcttccttttgctggagcttattggtttcttagccagcgtttctagtttctctttcttttcctgttcccgaatcccgggcgatggttgtccggctgccgtgtcgtgtaaaaacttgcttttgcttattctaatagaatgacgtgtaattccttgtcacattcataaaaaaaatgaattaatcatcgcttcaccgtcaaaagttgtatggttaatcctaccgaattgtcaaatcgagcatggcatacgttaaaaagctcaaacagcaagtgcatcttgcagactacaccatcacagagtccagaattatcagaacgatcaaacgtctggtaaaaatgcatcccccaaaaaaccctcctcctatttcagtcaaattctgaccacacacacggccatctgctaccagctcgcgttcttaactcctcccctaaatgcactcaacaaccttagtaaatccaagctaagcttcctccgctatataaacacccccaggaagccccattccatccacacgtttcagctgtctttcagtgttcacgtaggttgtagagagcacaacaacgtacgtacacagcagcaaagactgagactagctagcttagctgacatggctccaaggtgcgcgacgctggcggtggtggtggtgctggtggcggccgtggtggcgccgccgacggcggtgcgcgcggctatctcgtgctcggcggtgtacaacacgctgatgccgtgcctgccgtacgtgcaggcggggggcacggtg

SEQ ID NO: 1393 - DNA, 1236 bp, Oryza sativa
gcctgtcgccaccgctgctgccgagcctgttgccgccgccgtcgatgagcccgccgccgtctcctgagggcgagcagggcaagtgcgcgagcagcgtcgtcacgccgttcgctcgtcccagtccgccagttttggccggatgagttggtcccggatctgagagaaatattcctctctagggaccaacccatcccacctcatcccagcaaccaaacactacctaaaattggtctcaatcgttcggatagcgcgtgctctccaggtaagtcaggcgatctctttgttatcccggctgggtttcgttcgaacgctgcaatgctgcgtacctgtcgtccactcgtcccgtgccggtcgccgtggcgtcacgctcggcgcgcatgcggacgcagtcccgatcgtgtcaagcaacagagcgcggcgacgcctggtcggcccgtgcacgcgcgcgtcgcgcgtcgcgagatctctggcacggaccgacggacggtgacagaaactccgcccgtacgcgtaccacccagtaccgttacatcagcatgcggcaagaaccgatctgtcgcgcccaggtgatcgaaacgtgaggctggccaccggccggtcgtcggccaagaccaacccaccgcgggaacatcagcttcgccgtgaatggaactactcgtggaagtgacggatcgagcccttctggtcgcgtcacatcggggctatacccgtcgccaaatgggaagactcgtcgcgtttcgagtagctctgccccatgccatgtgtcgcaacagttgcacagcgcagcgcggagcagtgcagatcagcgtacggggttaagtactgaacggtaactgcgtgtactcctacgtaccacgaggtccacgacgctggacgggtggagtagtagtaacacggagtaaacaaggattctccatcggttaacacaagtaaagtacgccgcatgtgatccagtctcacgatttcatggtgagttaaattatttacacgatgacgggcagattttgttgttcatcgtaggggggaaattaaatattttttaaaaataatctacatagaacaattgatccaaacagtacaatagacgataaataaaatccaattgatccaagcagtacaatagacgataaataaaatcttgagaaaacatactgtgtttgtattaaaaaggataaacatccaacgctccacaatgaaagataccacttaaaaagtatttgagtgggctgcaggaat

SEQ ID NO: 1394 - DNA, 1660 bp, Oryza sativa
aattcctgcagcccgaattttttgtttacagcaaagggatcgaaagcgagatttgatcggctgcatgaacaaaaaggattaaagcagtgggcagtcggcagcatgttcctgtgctcgtgtctctcctgcctgaatcctgaaaagctcgacaggtaatgcagcaatggaggaggacatcatcatcaattcatcatcattagaacgaccaaatccaaataaacatggcgcacgtactggccattatcttaacgaaactgcacggagagtggaagtagtgatgggaagagagtgattcactttggctgtgtcacgcagcggaagtttcgatcgatctgtttgggtttccatccgaaagataaaagatggaagccactatttctcgccatcatctgaatgaagcccttctttttttggcgggcctcatctgaatgaagctggtcggaaggagcaagatttgcagatccacgtatgtgcaaatcgcaccacgaatcctaatactccgacatgattttgcttgtgtcgtcacaccacaaactctatttttgagcttagtttgttaacatcacttgatcgctctcgcttgcgatctgtgaatctagtgcgtgcatactgtgcagttgaaaagtttgccgtcaagtgagcgtagctcaaatccaactcagatcgaagttataaagttgacacatatgctcgcttttacggttaattattctttcaacagtagacaatatagccgttgatagtaatgcactcgcaacaacttcatgaaactcaagatatgttaatccagatttctaaatgtgctaatagagataaaatgtgtgttcatatggagatatatcagttcagtttttttggaggtgtttataggagtacggcgcgtttaaaagtgtggtatgcatcgtgttgtgagtgtttgtgtgtttctttaaaaaaaaattgccatttgtcaattattgtggattttctgcaacttgttgtccaaagaaaaagaaaatagtttcggtcaacaactcaacatccatctgggggtatgaccgaccgagcgcggtggccgttgattggctcgtcgcctcctcccttctcggtctgacggtctgaccagtgccgggtaggaagcgtaattttgaggagagactccgacccgcgccgccgccgccgcagccaagccatggagggatccgccggggcgccgctccgcacgcgcgtgtgcatcatcgggagcgggccgtcggcgcacacggcggcgatctacgccgcccgcgcggagctcaagcccgtgctcttcgagggctggctcgccaacgacatcgcggcggggggccagctcaccaccaccaccgacgtcgagaacttcccggggttccccgaggggatcctcggcggcgagctcatggatcggtgccgcgcccagtccctccggttcggcaccagcatcatctccgagaccgtcaccgcggtcgacttctccgcccgccccttccgcgtcgcctccgactccaccaccgtgctcgccgacgccgtcgtcgtcgccaccggcgccgtcgcccggcgactccacttcgccggctccgacgcctactggaaccgcggcatctccgcctgcgccgtctgcgacggggccgccccaatcttcaggaacaaacccatcgccgtcatc

SEQ ID NO: 1395 - DNA, 1569 bp, Oryza sativa
ttaccgtacaaatattttgttagtgccaaaatataagcaagttttggcactaccaaatatttggtaaggtaaaattgcatttgatcatatttggtttgctgcaaaatgtaaaattgtagtgaagaatgttctacataatcttaaatctagattacgtattaccaatgaataggcttcaatcgaaatcaaacacaagtactattcaaattaccaaaatattggtagggcatgtttttggtagcaatccaaataggcccttagtcttacgcatacaaaaaatcaccaccataattaaacattgtaatgataagatagataagaagtgccatcgatacacggtacaaatttgtcgatcccgacgaatcaagcatgcggtaacctatcggccccttctaggtcggtcagaatgcattgcattctcgtggtccttcaatcgttgatactctacttgtgtttctgactctgttatcttctggccatgatatgatggagtgacattgtcgatccatcgagtaatccacccatccttggattgccctgtaaaaatagtaatgttattcagtttgggtagtaattttgtgcaaatcatagcggattttgtaaatggttagacatacaacgaaatcgttgtctacattggggcagacaaaatatctccttcgaaatgtttgttcagcaaaggatgtagccacctgccagcgatccctgcacccacactttggacgctcggaccatttatgtaaccctaatggattgttcctccagtctaagcttgcaatttccacccgacgttcgtactccatccaagtatgaatgaactgtatggtcggttcaggttgcgttatcggcccgccacttgaagtaactctgactgtgtcaatccattgtacgaaagtgtgttgtcgtgagcataagttgttctagcaccatatgaatgaaaagaactatgtagaggagacaaacacaagtagtactgcagtagtaatagcaaaagtagtactgctttacaagtttgtaagccaaaagaaacggtcacataaggactgaagaggtagaacactactgacgaggcctcttacccctgtccctcctaccctgcgccctaatgtgcccctgggagtacgtgagtcggtccgggggtacggcacggccaacccgtcctgcctgtacaggtgtgacctctggctgctcctgagtgtgcgcctctggagctcctccaagctgagaggagcctagtacgtcgtggtgatgtgcaccgtgcaagtcgtcgtcgtagaactggctagtaggaccagtcctaccggcgtgagacgaagaggccccagtaccgaagatcccggctgcaaatcctactggacaaggaccatcagtttcatacatgtatttaatagtattaataaaaagtaaagtaccttgtgggcgagggatcgacgctccgtgagaggaagagctggcgaacgcgcccgaagaggtggcgaacgcccctgcggagctcgcggaagcgccggtcgtgcctgcgaacgcgctcgaaggcagacgaggtcctgcgatgaggagggctgcaggaat

SEQ ID NO: 1396 - DNA, 1295 bp, Oryza sativa
  unsure (1)..(1295): unsure at all n locations
tcgtataacctcgcgctgagagcgaagcggaatcgaaagatcccgaggggtcaagccacaaaagttcggcgccaaccgtgaggaagaaatctgagagcgccgggcaggcggagcagcataaactagaacggaggaagctcccgcggcggagaggaagcggcgtccatttgctgtccgcgaggtcgtgcctgatcggttcagatgggttcgtctgcggttcgctgcccgtcttcgtccagttcctgatcaggtatggtccttctcccccccgaagagatctgcttgtcgtcagatttcgattccactgcgactgggtggaatttgtgcgatttagtgtttcctattgagtgtaggcaactgatgatctgtcagaacgtagtctctgttaacatcaagtaggaattcgccactacttttatttttcagaatccaaatggggacatttcgtcgcaatccaatcgttcaacgtgtactttgatcgccgatatgtgcttcccgcatttttaggttgattgacagcattagggcatccgtccgatagtctgtctgggttggtgctgaagtcatataatgaaattgggggtgacatacctgtgatgtttgccggtggctcttataacagtactaaattaccgtgtagcatttgagattttaacatccatttggatttggattacatttcctgtgtaggtgtactannattcagtttgttctttctaatgacagctcttaacaggcagaggacttgggaatgcagaaagatgtgcttgcacgacaggaagttaatatttcgtgcaaacaagatcccagcttggatcaagccgatgttgctggaccttcatgtgaatgtgctgcatagtgataccgtgctgcttttccgtgttttgaagcatagtagattgaaggactccaagtttgttgatcatcacattgacgacgacggataacatctgctgcattcattacctatactttgtagatacttctatagaagtggtgtggtggtgtttgctcattttgttgtgttccaataacttgatatgatggatgggaggtcaatcttgatgggccgttatgaggttgggaagcaattaggacaaggaacatttgcaaaggtgtattatgcacgaaatcttactaccggccaagctgttgccataaagatgatcaacaaggataaggtcatgaaagttgggctaatggagcaaataaagagggagatttcaattatgagattggtgaaacatccaaatgttcttcagttatttgaggttatggctagcaagagcaagatt

SEQ ID NO: 1397 - DNA, 2254 bp, Oryza sativa
tttgagaatacatgctctagtgggccgaatttgtaatggcctgatagttcaagctggaattctgcggtggaatagatatgggcccgttttatttgtttcgtacgtcgaactgaaaacagacaaaggcacaaagctttgtcacaaatcattttcttctcactcatgaatcgttttgaactttgaagaagcaacatataaattctcttgtgaacttttgcctacaaatcatcctgacaatccaacaaaaaatggcgaacaaaaatagccttcaacttcgattaaaatatgcgctcacaaagatttcaaaattatcactcagagactacgtacagtacttaataatgattggtacttgataaggcgacaaaagaaagtataatcaaatcacaaacatatcatatacatagacccataaactagcatagttcatggtcccaaaagcacaagagtgctccggtgctcccccacaaactcctccggcccatgtggcctgattcggggggttacaatgtaacaacaaaagttacaagacaccacctccctgctgttctacaatataatccttaaattgccttgccaaattttaaaccaaggctacaacaatgcagaaaaaaaaaatgcccaactccatgataacttatttatgtctactggacctatgggagaaagcaaaggcctaagcgggtgctaattaataagcagcctcagaatagccaaagcctcttctcttttactatagcaaagaggctccctcctcctccacctcaatctcaatctcacactgacatttctgcagaaaagtgaactgaaaaacggaattagccgagtactcgatcagaactggccgccctcgaaggtctggccgaactgccagccggccggcacgacgttgttgctggtgacggtgcggccgtcgctgacggcgacctggaaggagaggctctggccgtcgaggtaggagttgctctgccagttctggccccagttgcgggacatgggctgccacccggtgctggaccccttgatcgacacggactgcacgtcgcctgggccggccacgttggtcacaagaaccaggttgaagtaggagtgcccgttgatggtgaacctgatcccgcccttcttcacgcacggcaccctgcaacacaccagcaaaaaaaaaaagcaaagttcagtgaaacagtagaattaactgtaatttgttactatttgttgcaacgattaatcatatggatgtgaaatgggatgcgtaaagtaattccgggacagcgaagtcaagtccacgtcggtgtcaatcgtgcgtgcatggctttgcctacagccgacacggacagatcgtggacaaaccaaatctgccgggtggcccacctacacatggcctgatcagccgattggggatcggcccatcgaagccgacacaccgcacggggggcccatggcttcaagttgcaaacagtttgccactcactcgtgacccattgacccaagtagagctcaccttctgtaggagacgggcacgatgccggcgcggtacacgccgatctggaggaaggccggctcggccatgtcgaagtgggggcgcggcgggttgcaccagccgccgtcgtcgttggggagcgcgtagttcggcgggcacaggttggtggcggtgacggtgacgctgcccggcaggcaccactgcccatcgttgtcgcaccgcagctcgtagcacgacccgcacgccgcgccgtcgttgaacagcaccgtgctcagcgccgccgtgttggtgccgtacccggtgctgtacaggttcccatacccacacgccccgccttttcatgtacacaaacaacacgacacgagtcagattactcccggttttgtcaatgcgtccaaaagaaaaaaaaacaaagtgttacgaggagcagtgcacacgtacccatcgtgccggacgcatcgccgccgccgtagaacgtggcgtgggcgctctgccaggagccgtagtcggcggcggctcgccgggcgaggaagcagaaggccgagaagaggaggagcagggcactactgcgtgaggccattgttgcaaaacagggagaagatcacactaccaacaatgtcctgctagctacttcactcggcttaagctaggatcgaatcgatggttgcttggttgtgaagagagcggtgctcccgggctcaggtacttataggcgactcctccttggcagttagaatcgttgatagcttttgcccaacgacagaggagagaaccgga

SEQ ID NO: 1398 - DNA, 663 bp, Oryza sativa
ataaaaacctagctggtgcacatttaaacattaggtgatccacatcctcttcagcaccacagaacttgcagaggggatctccattccacttcatctttttaagccgatgagcagcttgaattctccccttaagcatcagccaaacaaagatcttaattttcagaggcacgggtgtcttccaaagttcttgcatctttatgtctctaatccccccaaaggtcatttctctatagagagatttcgtagtaaactgtcctgattttgttaatttccatctcatcctgtccctatccgtagataagtgaacatttgcaagatctgcaagtagttgttcccattcaactagctcctcggcaccaagcgatcttctaagatcaatcctccagccatcagaggaccataattgactcactgttttcccaggatcagccactatactgtaaatgtagggaaatttgattttcagaggtgtatctcctagccagacgtcatcccagaatctagtaccactgccatcccctaaatcatacagctgcccaatttcaaccaatgttttacctcatgcaaacctctccagaattgagagcatccctcagtactagactggaaaaagcctcccccgaagcagataaagattaagttgatatacgtaaaacgagaaaa

SEQ ID NO: 1399 - DNA, 679 bp, Oryza sativa
attcctgcagcccgttgggaatgcccttatattctgagcactgagggagtatattactactaatttaaaagcacaagaaataataactaattaatcaataagatcctcagaggcaatacatgcatgaatcttacttttgccttgtcgcagaatataggtagctttgtgatatcgagaccgtattttattccatatctattaatttttatactatttaattcatatatcaacttttgtactactccctccacttccatggttataagacatggttataaagtcaaactacttcaaatttagttaagtttatacataaatataataatatttataatacctaattagtttcattaattcaataattgaatatattttcataataaatttgtgttgaattgaaaatattattattattttttacaaacttggtcaaatttgaagcagtttgactttgttaaaagtcaaaacatcttataacctgaaacggagggagtactgatttatttattcaattattatattaacttttataccatgacttgttatttagctattttcttatttcggagagcgtgcagtttttcctatgtgttcattgaactcaaataactatagctaatttagccatcttactccagtaccagataacactatgcctgcctctaaatagtcaaagtct

SEQ ID NO: 1400 - DNA, 1095 bp, Oryza sativa
cctgggccttcccggccgtcgccaccgcggcgccatggccggccgcgccctcgtcgtgctgctgtggtgcgtgtccgcctccgtgttcctcccctccgcccgcgcgcagaccaccaccttcaccagcgccatcgacggcaagaaggcgaccaccttctccttccccacgttcgacaagtccctgatgcagctcggcgccaacctgaccttctccagcaacgccaccgtcagccagagcgcgctgcaagtcaccccggacagcagcaacaatcctctggactacctcgtcaaccaggccggccgcgtcttcttccccaccccgttcgtcctgtggtcctccaactcgtccaactccaccgccgatggcaagtacgtcgcctccttctccacggtgttcagggccaacctctaccgatcaaacacgaccatgaaaggagaggggctggcgtttgtcatcgcgtccaccaacgccatcaacccgccgccgggcagctacggcgagtatcttggtctcaccaacgcctccaccgacggcaacgccaccaacgggttcgcggccgtggagctggacagcgtgaagcagccctacgacatcgacgacaaccacgtcggcctcgacatcaacggcgtccgctccaacgcctccgcctccctcacccccttcggcatccagctcgcgcccagcaacaccaccactgacgacggcaactacttcgtctgggtcgactacaatggcacgtcgcggcacgtgtgggtgtacatggccaagaacgacaccagaaagccctcgaccccggtgctcgacgcgccgctggacctctccaccgtcctccgcggcaacaagggctacttcggcttctcggcgtccaccggcgagacgtacgagctcaactgcgtgctcatgtggaacatgaccgtcgagatgctccccgacgagggcgccaccaagaagaaggcggccctgcccggatggaagctcggggtggtcgtcggcgtgtcatcctgcgccgtcgccgtggtgctcgggctgttcgccgcgctgtacatccggaagaggaggaagaggatcggggacgacccgagctccgtgttcaa

SEQ ID NO: 1401 - DNA, 1015 bp, Oryza sativa
tgcaatgggctcctcttgctttacagccatatcagtcgtcccggcatgaagcagttttatgtggttaacccggctacaagacagtgggtgcaattgcctccacctccaaggcctgatattgggatcatgcacttagacaatttgtaccttgcctttgacccaccttgtcgtcacactttgaggtatttcaaatcccctatgttgatgtcttccgccatcgctctgagttgaatcctgcaatagagggaatagaatggccaccgtcaacatgcgttctgcatgttttctcaacaaggacaaggcaatgggaggagagatcatttgttcgagaaggggaggctgcaggatctttggctatcatacgacgagattttccaaattttctgcacaatgctgtctactgtcggggagtactttatgtacgctgtcaaaccaactttgtaatgaggtagtctcactgataagtattataatttatttctttattaacaaatagtatcactcaattttatcatgttttaatatttctaagttttccaatatttgcagaatatctttgtcagatggcaagtatcgaataattaaaccaccagtagagattgaacggtacgaggagtcaaatatttatatgggactatcacagaagagggtgtactgtacattctttgatgatccagacataatttatattcttgatgaatcgtacggaaaaatggagtgggtgcagaagaacgctattagctgtctggtcatacatgcatttcagcaaactgatgggccctggaccttacaagatataactatcatgaatatcctgatgcgtacggacatgacaacagtgaggcaatagaggaacaaaactttgattgggactctgacaatgataattttatcaacactacagacgaaagaaatttgcgctacggtagaattacttttctaggatttcacccttacaaggaagttgttttctcaagtcactcattgagccgaggactggcataccacttaaata

SEQ ID NO: 1402 - DNA, 699 bp, Oryza sativa
cctgcagccccaaataatttgatgtaatttctctccagcattctcttataatttgacaaatactttactactagtagttggtttctttttttcaaaacagtttcttgtcttgcagcagatggcatatcaagtaaaaaaattgaatatcacaagtaaaaatacatatatacctgacaacaggatgctctgatatgacagtagcatcggggacattagccgtcttccggagaaaatgggccaggggctgcccgtatgtgtgggggaacgcgtggctgatcacatgagcgcctgcaggatcagcagcaattgcagcgtcaccatactccactctcacagtggtgccctgatttacatggagtgaagaaattcagagcgtgaattcacaaaatcattcatccaccaccaatcacacgcacgcgagaaaatcattcgcaaaattatcatgaattcatccgatccagccaccagtcaaacagcataactaaacaggagaaagtcttacgatttgatagcgattcatgggtcaccacaaaagtaaacaacacaacacaggaccgtgaaagctagtccaaaaagaaaagtccatggttgctgtagacgaatcaatccatctactgtttattccaagttgctacgctccactactaaactcataaataaaacagcaacacgacaataccaacacggcaaaacgagctt

SEQ ID NO: 1403 - DNA, 698 bp, Oryza sativa
cctgcagcccggaaccggtaatccttggtaacacccaagaggaagtgttcggtgctgaccataaccccctacataaacaccccttggaactggaacgccaaagtaggacccagctgatcttggcctccctgaaaagattgtgcatgtattcagacaaatgcttacagaaatagaactattatcaccgcatgagcacttccaagaactgtttaaggtaccaaaatggtatattagtagtcatcgtatcaccattaggggtggcatactgtaatttgtagttttttgtttgcaaaacaaaacaagcacatgccaaacaccaacatcatcagtacttctgttcaaatgaatgctcagtatcattttagctcacctgtggtgttattttaagtcccaaacccacttgagaaggtatatagttgactgtacctatgttcacttgattatcaatttttcttctttccatagttgtcttattctaggaggacgagtgcgggtaactaaattctagagcaaacacaatgtagaaccgatcaaataagtttgcagaaggcaacacaatcataccacagataccactgcagtaacttgctagcaagcaaatcctcacggtggtatcaaaatgtgctcataatctactcgaataagttagtgcaaatcagtgtcaaggcagggagatcaataccgagaggaactgcagg

SEQ ID NO: 1404 - DNA, 616 bp, Oryza sativa
agctatccgtattcgttttcgtatccggtaaaaaaatatgaaaacgaatatggtatgagcattatccatccgtatccgctccgttttcatccctagctctaggcccgagtgcttggctggcagggaggccaggccgagcaggcccaagagaagacgacggcccacggcatcggcaccatgcgcggacacgcggcgacaagcaattcggcgcgcgcaggcacggggtccacgctgttttgcacggctcggaggcaggagccgtacgcgtgggacccacgtgcgatttagcgagcgcgcgtgggagcggctcggtgggacgcgtggaggcttcggactggatgcgtgcagatgagcgcgggattcacgcggtggagcgcgcgctctcgcgtgctgaggcgcgacgtggcggcgtgttactggcctggagcaggagcacgcggatcgtgcaagggagtgcagcgtggaggagttcggattgactacgtggcagcgatctggagctattcctttgaggagaaggaaaagcaagtggctgagattgagtccagggtgggtttcgccctacaggtatgaggtatttgagacaatgtcttacggggtattaggctataaatag

SEQ ID NO: 1405 - DNA, 2204 bp, Oryza sativa
atactctatacatgtgtccaaatattcgatgtgagatggtgaaaaattttgccaggggatctaaacaggcccataattgtaggaaactgcaaactaattaaggtcactaaaggaacacaactaatgtctggccaggaaaaagggatgcaattaatgaaattaattgatgtctaaaaactctcaccatgctttgctgaataatactgtatagatttccatgtattacatgaaagtgaaactatctatgtgcaagaaacttctttacggaatattcagagcatcatctattattattatgtaacccctgctaacaaatttgacttcacaactactccctccgtttcacaatataagtcattctagcatttcccacattcatattgatgtctatatatatatatatatatatatatatataattttctatagatgctctttctatctgcattcttgatctttgggcaagtcattgcctgtacaagtgctgttgtgaatgttggcgcctgtaaaaggcccaatttttacacaacaaagggctcatgactgttggttcctgaaaaaaaagaccttttttaacaccaaaaggttgaatttttatgctctatcatgcttttatgtctgtttgcaaggaaacaattatagtaactgtttagattggtaggtttgacactgtttgatgctaaaacatattacgtgtgccgttcatatgcagggaatggggttttgagaagcttgtcttccgcaattcaattaccaaagttaggcgagatcgcaaatatgcgatccaggcccgaaacgcatactctgccggcgtacacatgtcacagaatgtctacgggaggacaacccataagacagaaagcctgatcagatactaccactatcacaattcgatcaatgtcatgggagagccttgtcgggaatttgtgccggtgccggtcaatggtagtaagttgatgttcgaggggatcccttacgtatacgatgataacatgaagcgtttggctgggcagatcaagcggtttgagaaggaagcaattggatctgctcatacataggcacatagcaactgaactactgaagactgccggtacataactacagtctacatatatacctgatgatattgtttaggatgcctggttgagagttgagacgggctcacgcttctgctgttgcaagccaccgtgtctggctggtaagcagagggaagagcttgcaagtgggttggtccaagtggtgtaaagttttggttctttttattgacatgccattctctacaggagcactgctgtttttgctccattttctcctttctcttttctccttacccccacatctgttattatagatctgtgtaaactgtaaacttatggccctgcctttttacagtagattctttgatagatctccctccggggttacatgcagtgtttgttgttttgtgtgtaaatctggattgcacattactcttctgtactatccattaggccatcagcaatgggtaccttcgacccgtcccctcacaaacggccgtttccctcccgtcctcttttcggcgtgagccgtctccccagctaggagcgcgtctactccttgggagacgcggctctatgcaaggagcgctcgcttttcgcggagagccggccctcgcccctgcgaggagacccgctgcgaactcccgtctcctcaccgctccccccaaatccccttcctaccctcgccccctcgcctctctcccacggcggcgcccactcgtcgatccgctccaccggccgccatcgaccggcgggcggggaggtccgcgacggcagggaggagctcggcggccttgaagaggaggagggcgagccagtcgtcggcgaggcggcgctgggcggaggtgccgggggcggcagagtcgagggcggagtcgatgtgggagaagagggtgtgggagatggcgatgtggatgaggaagaggagggagagcgggaggacgaaggtggcggcgatgcgggcgaagagagggcggtcggcgacgatgatgatgagcttcgtcggcgacggctggagggagagaggggagcgggaggagggcgaccggcgctgacctcgccggcgagccgccgccgtcgctgccgaagcccagatccggcaagcccaggccggatctggccacctcgccgccactccgacgacgacgaccctgcggggctgcagga

SEQ ID NO: 1406 - DNA, 682 bp, Oryza sativa
gcctcgatccggaagaaggccatcgaggtcggctcccatgtcgacgcgctccagaccggcatgatggtcgcgccgacccaccaccgcgagcagcagaagcaccaccaccacccgcacctgcaaccgcacggcgaggagcaacaccaccacgaggattggattagttctaagtatgaagacattcatacttaaaaatctcttgttgatctcttcctctcgcccctgtcttggttggattagttgccatattagagtaagcactaatccatccatacttcttgctcgatcttgatttcgcgtggttaagtaagtcgtattagcctttcaggttaaggaggttgttaaggtttttaagtaagaacctcctgtagcttacttactagtttgtgatgcttgctgtattttcttctagttcttggcttggtcttaaggagtttttgtttgattgtataagctgttttcttagataatggatcgtataagttgttggatggatcagcaagtattaggcctggtccttccttccttgtgtactactattactcccatgtagtactatgtttggttcagttaagcatttttgtgtgtaaactgtgtttgaactctgctttttgatgatgtggaattggaatttgggggagacactgagcgagagagagaacggtcgtcgccgacgccgtgt

SEQ ID NO: 1407 - DNA, 1309 bp, Oryza sativa
tcaaagggatatccaatccatgaacaatccatccaagaaacacaacttttctcagggagaaagggctcacactccaaaggatactccaccggacataaccacatgaggctacccaaacctataggatttgcccacatatctctttgtttaggacttgataatactcaccacacttggctagacaagcccaccaaatacacctacatgcatatgaactaatatggcgcaagatcatccacatgctcgcttcatagacccctcttaatagtacgacgtctatctagcaaatccggtctacaccaaacaccaagaccgggaaaagactaagaaaacattcgtagctccattatacctttgccttgcgccatccaacttggggtcaatgcttaagccaaaatcaacacttgtgaccatccggttgaaccatgtttatgccgaggtctttaccatcctttgtcaagactttattcccatcacaagtttgacttcattcttgccaacatgacgatgtccttggcttggtgaccattaacccatggtgtcattcaatagccttatcgtagtgggacctattccttttcacatctcaacaaatcggatgtagtataagatattttagataactgtgtgtccagattcatagcaaaaagttgctatattttgggacggatgtagtataagatattttagacggatgtgatacatcctagtattagtattaggatgtgtcgcatccacataaaattctaggatgagtagaatatttatattatagtaagcatagaatttctatattgtacccctccgtaaaaaaaattcaattctaacaacgaaccgttattttctttttacggaataggacatgttagctactactcactgtagagcacatgcatattagggggtgtttagatggggctaaaactttttagcccatgtcacatcggatgtttggacgctaatttggagtattaaacctagactagtaaaaaaactaatttaataaatgagagctaatccgcgagacgaattttttaagcctaattaatccataattatcaaaagtttactgtagcatcacattgtaaaaatcatggcgtaattagactcaaaagattcgtctcgcgaattagtccaaggttatggaatgggttttgtaattagtatatgtttaatacttaaaaaagtgtccaaacatccgatgtgacagggacttggaataagtctctataaaccaaacaggaccttaatccagcagccggctcttgtatagatctagcagttactccagttcttagtgtgacaggtc

SEQ ID NO: 1408 - DNA, 1794 bp, Oryza sativa
cacatcgaatgtttggacacacgcatgaagtattaaatatgtaaaaaaaaccaattacatagtttgcgtgtaaattgcgagacgaatctttgaagcctaattgcgtcatgatttgacaatgtggtgctacagtaaatatttgctaatgacgaattaattagtcttaatagattcgtctcgcaatttcctgacggaatttgtaatttttttgtggagtgtaatttgttttgttattagaccacgtttaatacttcaaatgtatatccgtatatcttgtgtgactcctaaacctaaaatttttccccatctaagagcaaggataatactgggatataaacaagctatatgcttacgtggaagagaaagataaataaaagtggagagtgttggctctcatgcaagagctaactacacacaagctctagaaatatgcattaaatttatagtgagagaaagagagaggacgaagaaaataaagataaccttagagcaagttcaatagcagagccaactactagctccagttcatctatagccaatgtaataactcattcatacaatagttacatactatactattaatacctggtcccacctatcatacacacactgcgtcttggagtccgggctacagctggctacaaatatgtagcccgctgggtttctctctccttatttaacttcttaaaatatatttacagctggcttatagcctgctattgtacctgctttaatatagccaacctactatacatgttaattttaacattgactaatagtaagtagtgagctatactattaaactggctctaaacaaggcctccacctgattgatatccctttgtcatcatttccaagagagaatttcttccacaaattaaacacatatagggacatagctgaaaatgccgtttggcaagagaaaaaaaaaatattttgtaacggtagtggtgggctttcacacgagcacggtagaccagcgagcaaagacccactccaccacacttccatattaccaccaccccccaccttctcgctttcctcttcctctccacttccatttccaagaatcgaacggaggcgtctcgctatcgccatcgccatcgccatgggcaggaaggaatcgtcgacgacgacgacgacgacggcggcggcggcggcggcggcgacgaggagcatgaggctgccgccgcagcaccaggcgctggaggtgaagatcccgagcttcttccggtgccccatctccctcgacgtgatgcgctccccggtcagcctctgcaccggcgtcacctacgaccgcgcctccatccagcgatggctcgactccggcaacaccacctgccccgccaccatgctccccctcccttccaccgacctcgtccccaacctcaccctccgcagcctcatctcccactggtcctcctcctcccccgccacctccggcgatgcctctgtcacttcttcccccgcgggccttgtccgccaggtcgcgtcgcccgacgccgacccttccgcggcgctgcgccagctcgcggcgtacctctcggacgacgacgtcgacgagttcgagaagaacgcgctggtgggcgccggtggcgccgccgaggccgtggcctcggtgctccggaggaagggcgagcgggaggtcggcgtggaagggtgcgaggcggcggtgcgggtgctcgccgcggtcgtcgcgatggatggagtcgaggacgcgaacaagaggcgggtcgccgccgggctcgccgcggccgccgcggcgtcggcggcgtccctggcgcgcgtgatgcg

SEQ ID NO: 1409 - DNA, 1222 bp, Oryza sativa
aagcccgtggcgaccgcatacatacgtacgtattgatagaattctaattaagtgtacacagggatgcgacgaccaaaagtccggcaggtgctcgcactcgtacatgtatgcatgggaatcatgtacctaattaacctgctttgaacctacacacatacacagagatatactttttgtaagtgcaacattccgtcaaacaagttgctaaaacaatcatatgtatgcttagataatcatgtatcatcatagaagaaaatgagccgggcaacctctgtaacatgttacagtatgatatttgtgaattttcaaccaaattctgaaagttttcatcttaggggtatttttgtcattagaacaaaattgtatggtactaacggaggctaacttgacggcgatggtaaattatagaagttaaacaaaaagcgatggcatagtatggaactgaacaaagtcagtggcagattgtggttccagggcaaagtcagtgatacaggatagattttctcattgttttaagacaattcaacaggaatacagagtatctcgactacttaggtactgttaatacaatataaaagcatgtatacaaaccagaaatatttagggcctgtttagatctcctggcaaaagtttcatcctgccacatcgaatgtgtagacacatgcatggagtattaaatataaataaaaaataactaattacacaaattacgtgtaaattacgagacgaatcatttaagcctaattgctacatgatttgacaatgtggtgctacaataaacaattgttaatgacagattaattggacttaataaattcatctcgtagtttacaggtggaatctgtaatttgttatattattagtctacgtttaatactttaaatgtgtatctgtatatccctggatattattaatctgttatattattagtctacgtttaatacaggcggtctatatcctatgtgacacgtcgaaacttttcatccctggataaacagggccttactatatttgttaaatagtactataaggtgtcatatttctatcctatgttggcaccatatcgacaccaggccatcagctaatgcctgttggtaccggatcttatactgattaaattacgaaattgctagaattgtatcgacacattttctcctccatcacagtcggcgttttgaagcgtccgatttcctttatcccgtgtcaatggggctgcaggaat

SEQ ID NO: 1410 - DNA, 683 bp, Oryza sativa
attcctgcagcccagtgccatggctggccaaccggaaacgaggacccaaagaactcatgcaaggggatgaggtcatgaggaccccaaggagctcatgcaaaacgtggcagcatatgcagtcatcacaagatcctaagactggctgcccaaccataaacctgtccacatgatagtaacaaattatacagcattacttacctcatcattcatgcgaacaagcacatcaccaggttccaaatgtttatgtgcaggtccttctggaacctgcaaggacagagttcagtttcataaatcatgaatggtacaatacgagtgagctaactgaaaaaataaatcaaaattaaaattcatgaatagtaataagaatcataacttaccacggaatcaacaaccagcattccagtctcgcctgatggagaaacaaggcgtaccatctgtacaaatagaaatagcaagttgcagatgttaattgcagtgcatgatgttttgacattcaatatgtacacaatggaaacacatatttaaattttcatttcttcagataaagaatcattagatgcaaaacaaatataaacacagattaacagtaattagtcacaaatagcaagtatagatcaactttaaaaaaaactctcgaacaacttaaatttatacattacaaacatattgaacatgactatttt

SEQ ID NO: 1411 - DNA, 727 bp, Oryza sativa
ggaagcttttcaatctctagtagaaagcttagtctccaaaagaaagttttcagtaaccagatgaaagttccaggtgaaagttttcagttccagatgaaagttgtccaatcaaaggtttttagtagcatctttttttttttttgcaatgagaagttgaaagtttcccttttcgggatgcagaacaagaagggctacaaattccagggaaaggattaggggagactatgcacgaaaagctataaacaaatgtgccatgcccatgcgtgactgtgactggggagttcaagaaatgagatgcaagctgcacgagttggggacacaagaactggattgaggccttctgggtgctctcgtcttactattcttccagtgatgattttttttttaaaaaaaagtcctgcgtggctgcatcctgtccgtaactgatcatgacttttggcgcaggcgcgaattagacaggtcctaaaaggacagcatgtgttcatctaattattaaagatttacacaaatagggtgaatcccgttaaattgtacagtattgaactaaaatataaactgaattaataaattagagctcttattaaaaactgcactattagaacaattacctcacggccagtaccaccaggctgtggtaaagcagacaatggtacttgaagctggccagttcggactttgtatttttcatactcgagaagtgcctaagttaatgagaaacaaaaattaa

SEQ ID NO: 1412 - DNA, 4358 bp, Oryza sativa
tagtatttgatacagtaacccacaccaatggctatatataattttattttctccgtcctaaaatactatatagccattggtatatgcatagcttgtccagatttatactattgtatacgtcctaaaattctaatcaaacttcactgtattttgtattttgagacagatgtagtattatatatgggacttagactgaacacatcatttctattccatgacttccctatttttgtgtgttttagatatattggttcaattgataaatcctaaaacaaaaggtttgatctcttaaatgtagattttataatttgaactatttgaactcacaagccaaaatggtttgggagtagctgaactataaattatatttattcatagagttctttatgttattgatttctttatgccctccttgaatataaaaaaagaaccatttattcaaagtaaaccaaacctgcattttcaagtcaataaaccaagatggttagagattagttcaaccataaatcagttctattttatagtcggtatagcatggacttctttatatatgcactctttgcattaaaaagaatcaccgaaggaaaaacgtaattgattcctcaaaggccaagtataaattaggtttcaccaaactgttttgggtggggttttcgccactccacggtttagcggttattgcagtaaccacgtggttaccgtgaggtataccatggtttttaaaaactgagaaggttaccgcacgtaataaccacaataaccgtatgataaccgcaatcttgtaaatctcttctcacactctctaaggctcacttattcgatttggtgccagatcctgaaccccatgatataactttttttttttgtaaatttggacctgtttcgatcaattttcttgagaaaatattttgatcaacttttggtcaacttttactattttaagcttgaattctgaaaaaaaacattcgaaatttcacggttctcgaccccaccgggcatgacagacgtgtgcaatctgaagcatccgattttgggtacccagcgctccagcaggtgcatgccccgaacgggtcctcatttctcctgctctcgggtgcacgaagtcacgcaccacaaacaatagcggaatcacaatttccttggtcacacatccaagctagttcaaccagatttattttaaaagaaaaaaaaggccacacgagctggcccctccctgcaataaaacaatatagctataaatcgctttgaattatgccggagaatgcaatcattgaccaggggcgtgcaagttgcgtgtgtgcgcgaccacgaaacttaatcaaagctcacaaaaccaaaaataactaatcagcacccacaatgaacggcacaatgcctaccactaccctctcccgcctagtcatcactcggccggtcagtccatgtccatcgctcgcaaagcaaatcgctcaccaatccaccccgttcaagagatgcaagcgggctaacccgcaaacctgttttataaacaaaattagtgtataatctacggtttatctactaatttaatttataaatggatttatggatagatccatttatatagctgaacatgacgtgaaaacccacgagttaccacctatttgattaatatgtgggctcgtgggtcggtccgcttgcatccctaccgatcccccacgcacgcacgcacgcacgcacggatcggagcacggtgtcgcggtggaagaaacggatgagacgggcacacgcgacctaaccacggcgccgcggcgtggtggtggtggagacgtggagtggcgcgcacgagagcgacgcgcccacgcctcctcggtcacactactactcactcgggcgcccgcgcgcgcgcgcgcgcgtgaccgagactgactcgcgtcccggccgtcccgtcgcacggtgcacggtagcacggccgcccgcccgtgatgccgaggaaaaaacccccacccaatccgcgctcgcgcgcgtgacggcgacgagttcgcggccagaaaacgacccgcggattcgggcggcgccgcggcggtgtacgtctggtttttgcgaggacctagcacggcgcgcgacgacgccgatcgaccgagcaggcgacgcaggcagcagcgacgccgcgtgacgttgagaaaagttctcgcgttgtgtgagctgtaatctctgcgtggtgctagctatgtgtgtttgcaaagggaagacgacgatatccaagctcgcgagtttggaattgccgctcgaatctctctgttccttatttgacccgaaaactttcgtgtcgatcgggtttttgccttgcaagtttgcctgccgtgctagagtagaggaggagatagccttcgcgtcgcgatgcccgctgcgatacgtatgctggtagtggtggtgtgttgtcgggtcagttggtgccaaggtacagcgtatgttactactagtacatcggtagacttgtggtctagttgagtgagtcgtactagtattgtattggcattgcgacgctttgagatacagttgtacacgtctccgtccaacagtcccctggttttcttcttcttcttcttcttctggacatcggtaacagcaaaataggcctgaaattcaagctctgttgtagactttgaggcctttgaaatgcggcaattttacaagatttccatatgaatcaatttagtttctcatgcgtgctgggagaagaggatgaaaaagagaaggaccccgcttttatgacagtaaagatgaaatgcagaaaaaaggatgatccgtatgaaaattatgtcgttggatgggatattttttttctttcctcttctcactagccaatgtgcgtaacggcatggttgctagagagagaagaaaaatcccagcatcctaaacttcgtgatacgaatatgatcctcagttgcatgtgcatgttgcaatcttagagatcctgaatccggagttaggccagcagatcaaactgaattctagatggatatgatccgcttagacttcctaactcggactgcttgtttggctcggtcgccgtgtctcttgcggctacacctgttcgcaactagaaggattgaccaaaaactttcagacataggtggtgattgaatcttctgaagatgaagattaagattaagtattcacgtaaaataaggtggtaataatatatgattaattgagttttaattattgcaaacttgaaaaatggattaatatgatattttagaacaacttttatatagaaaattttcgcacgaaacacaccgtacatcgtttagcagtttaaaaagtgtgccacgaatatttaaaacttcatccacttttttaagtggaaacgaacggagactattaccaaacaagttggaatttgtcgaccatctgtttgtttgggcaattctggtttctgaagtcaagttcttctgccacgcatggctctggcccagcgtggcctgctccataaacgggccttgagttgggcctttcctaacatccggcccatttccccctgcgcggcaacatcagtcatcagctgggaaaacgagaagacgacgcagtcctcatctgagtcatctctagcaaagattttacttcaagagactaaaatcaattagactggcatacgtatttaattgaagcttaagaaatactccctccattccaaattaatctacatagtctttttttaaggttattcctaaatgatctacatatttgtgttcatttattaggtctattcgttatttgtgcattggaataaatggacattgataaatccatgcacacaagcatttataacccacatggaatatcttgatttgctattggctaggaaatagtggggatggtgcatacattgagtaaatatagtatgagagagttattagctttttttggtcttggtgtatctttgaaatatgtagatcaatttaaaatggagggagtactagtatactataattaattaagagtgttaatgaggtacactaaagtcatttctcttcccttcgcttgtagtactaatttgcctgtgccatgttataaatgaaatctctctgtgagaccgagcgattagtaaaatatgtttggattatgccaaaatctatctattatattattaaaggaatagaaaaaagagactccacgttcgctcaaatggtctagaaattctcacattaatcggagaaaaagaaaaggcagagtccatatagaaatacaatttagaaatagctgaaattcggaattaaaaaataaggaatattagaagagtagactagattccatatagaaatacaattaggaaatagctaaaatttggaatttaaaaataaggaaaattagaagtagagtatagagtccatata

SEQ ID NO: 1413 - DNA, 2205 bp, Oryza sativa
ttcttgatctaatttttccataaactctgaaacactatgtcttctattatctattatatttctatcatatgcttctgtttctaagtcatctgtggttctgggtttgtaatttataaatctaatgctggtatttcctttactattttgataacttatataattttcaggctgactcaaagttttgctttcaattaaatcactaattttccattcttctcctgccctttcttcagaacttatttttaaagggctcatgaaagttattcccttagagtgcatattttcaatcacgtcatttacatttattttgtatttggaggcacttctattagttaatcttcctataaattctatgcttactagcaaatttgttcctttaaattcttcgtatctctttgtttgaaaaccaaaacttattttatctataaattcttttataggcatcattagatctggggctatatatgttatcaacatattctcattcatatcaccttctaaaaatcctaatgctgctttatctattgtgtccaccttttattataaaactttagctcctaatttctttcttatcatacctttgattcctattatatacatacattggtgaatatatttataccctaaatactttaatccattttcaaattccttggctacaatttttaactcaattgcctgtattaaaacacttaactatacttctttagatattcctgataacccatttttattctcaaaaaatcccatgcaatatatttgttgaggtcttattgccctcatagtatctctttgatatctttcgagctgtttgtctacttctgcaatatcttcaagctcatctatgtcttcatttttacctttttgtttatcaatacaacttaaagatttatcgtctctgcttgctattcttctaaacaaactcctagatagatccatttttctgaattaatagcttgagacgaggtaattatgcctgttgaagccaaaactatctcttttcctttactagaatttattatttctaataattttttgatatagtcactgttttgtaatatcttattctgccttatcttatattcctctagctcttttagcactgaatttaatttattactgacaagcaaatattgttcttcagattgctttcgttctttaaacaaatcttcaaaccttcgctctaaatcttcctgctttttatcccaatttatataaaaattatatatcagatcaacaattaaaattaattgactattgttagagtgtcaactatggtcttcaatgtgatttaacaccttatattcagattatctttgatagtaattacctttccaatattagcttctgaatttgatttctctatgatgactggctctgataccactttatgatgactggctctgataccactttgagtttactggttactggttatatgtatatatatacatacatatatatacatatacatatatacatatgcatatatatatacatatacatatgtacatatacatatgtatatacatatgcgtgtatatatatacatatacatatatatatatatatccatatatatatatatatatagacacactatgatttatttttacatatcaaatctaagtatatccaatcaaaatttctatggatgaaaattttatcttcccaaaaaataaaacgcgttttgttatatctcatgataataaagacacccaatcaagaaggaaaatgacttcgcatacaaggcagtgcaaatatgcttatatccagattatcatcattgtgttaatcaaatcatggaccttctcatcatgcaaaacgatgcccttcgtctccttagtggtgctccaaatagggtctcaccatgcttgctaactcacataagcatcattattgtgtttatgtttctttgagtaaaatcatgagcactttaaattagtcgttcaaaaaaatgagcactttaaatatttattttactgaaaagaaatggacgtagtgttagtgcacttttagttgatgaggagagctgcaccctcaacactttagtccaaccattttttgtccccaagcgaacaacccggctagcatggtcacaccgatctgttctgatgcgctctttgaccggaaagtccaaaagatcatccaacccaactctggtcaccaccaaagttcctttaattttaaattcatgcatatgta

SEQ ID NO: 1414 - DNA, 13267 bp, Oryza sativa
catgtttgaccgttcgtcttattcaaaaacttttgtgagatatgtaaaattatatgcctacataaaaatatatttaacaatgaatcaaatgataggaaaagaattaataattacttaaattttttgaataagacaaacggtcaaacatgtgataaaaagtcaatggcgtcaaacatttcgaaacggagggagtatattataggacggatggagtatgctggtatttcatgtttgaccgttcgtcttattcaaaaacttttgtgagatatgtaaaattatatgcctacataaaaatatatttaccaataaatcaaatgataggaaaaaaattaataattacttaaattttttgaataagataaacggtcaaacatgtgataaaaagtcaacggtgttaaacatttcaaaacagagaagatatattataggccggatggagtatgctggtatgtcgtgcgctgaactggaatagtagcgatagtataggccgccgcggagagcgtggaataatgatgttttcagtgtacgtctgctctgacacacaacgatctagaatccatgtatttttgtgtaaaatacaataaaggtgcagagtacattatttattttgcaatcacatagtatcatcttttaagtgtaggaggccaattatgccctacacgtttttgttagtttaagttatttgttcaagtttaaaggcctatttagggaagcttttggcagctcaagaagaatcttctagaagctgtagctactataagccccccccccccccaaacaatctaaattttcactcagattttgaaaagctgtagttgtagataccagaaaatgaagtagaaatcaggagctaggtttcccaacttcatcagattctcatcagctatttcttatgattttaagctctctaaacatagcctaagtttattttaactggttggtacatattaacttattacgttatcaagatctcaaatttgaatctaattaacttacgcaattacttttcgctatgaaaataagaatgtccagacttataagtaaaagtttttatattttatcatggagttagtacttacaacttattttcatttcatgccctgtcggtgaagtataagtgaattaattactcgtgctaatttattgtcaatttatttatttattttcttaaattggttggtgcagctaattaactaaattagttttttgtgtagcttcaattaggaaatgcatagtatggagtcacatcattttctacatgcccacatgtggccaacgatacgcctttgacccgtctcacgtcttaacgcacgcgagcatttcttagtggactaaatttttgctaatcaatatacaaataacgtcacttgcattgttgtcatctcgtccactattctgcatttaccatgtgttgctgacagtagactagcagttccattccaacttatattattaattctgacgggatagtatacatgcatctaacctaacctgtggccgcgattaattatcgtgacggggcagtcgtcgcacgactgcaacacgtctcgaaccgtctatcgatctatgcttgacaaactcgttcatctccaaattaattcgttgcaaaaaaaaaaacacattgctactcatgtgcgtaatcttgaagaagtgaaaaaaccataagatatacattcatgcgtatgtattcattcgtacaaattgaatatgcaaaccgttcaacacgtatttgcgcgtagctaaggcctggtactacgtacaaatccatgaggactgtcaggttgattttcacagtgtaaagaaaaaaaaaccatagctttttgccttattatacactccctccgttttaggttataagacgttttaactttggtcaaagttaaactactctaagcttaactaattttgtagaaaaaaagtagtaatatttttaaccaagagtaatatattatgaaaaaatatttaattatagatttaatgaaactgtatatgttggtgttgtaaatattactacttttttctatatagttagttaaacttagagtaccaaaatcaaaacgttttataacagtaaacggagagagtatatatttccacagttggttttatcccgcaacaataaaaaaaattcaaaagatttatatagctaatgaggtaagaattaggatagataaggggattaagcaaaagctcgggggtatacatacattagaagtgcgtacgaccgtacgtacgtgtatgtagtaggtttcacaagccaaattaagccacgatttgattaggcaaagcaaaaaaaaggttcaatatattctccgcatggaaaaaaagagaaaaaattgtaaaaaccagtcataaatcacttaaaatttgacattccatccatataccattttttgtaaatatcgacctacctatttagttttattgtaaaaaccacctcagtacgcatatgcttaaacgaatcaacatgttttcataaagagcgagccattagtgtggtatttatcaaaattcaattcttccgaagtattgtcttgacacttttttggagattccaaaaatagaattgttgatgagggtttaaatgttgtcgcactgagtttcgctatatacgtacacacaaaagttcaatcaaatgcgaaaaaataagtctaatacaaacacttagataatattgactccactaacttagtatgtagtaactctaactctacgataacgggctgattgattaagcacatgtgtactgtgatggtttttgcaacaaaactaagtatggaatgaatatttgcaacaaaatgacttacgagataaaatatcaatcttcaaatgatttgtcgggtgatttttgcacttttcaaatgaaatgaaaaaggcagtgtaaacgtatgccactgtatttgagcacgtgccacatgcatgaacccaacatatcgtctacgccagtgggtaacaatccatatgtttttggcttgtgcgcgcgtccctttcgtttctgccccagacgcacgcacgcatgcattcctccaggtgatgcaactactttttaaaaaaaaaatcttttcttttcttttcttttcttttctcttctctttttttttcttctggccggccacatgagaaaaagaacagcatgcgcactagggatgaaaacggtacgaaaatttccgagaattccagctaccgtttccggtttgtaccgaccgtttcaatcggtatcggtaattgtccgtatcggaaatggaaacgatattctctttcggaaatgggacggggtttttttcgaccattttgtcgggtaccatatttgatcggtaatttccgttaaatttccgataaaattctgaagaagaagcctaagcggctgggtgcctgggcctggctagcaggagcagcccatttggccgggaagaaaaaccctagggcatgggcatcagccggcttgtcgcttctcatcctatccctgtatcgcgactctcgcacagctcttcgccacctctacctccgccgaccgctgccgccgtaaccacgccgccacgccgctgccaccgcaaccacgccgccacgccgctgcttgctagtcctagccatcgtaccctcacgcctcgccacgtcccttgccggagaagcacgatggcacctgttggaagaaaacgccacatccatctggatccatccgacggcaacaacggagcaatattgagtttgccaccgttgccaggtccaccaggtatagccgtataggtgtatagcttgaatgcttgagcatgattagccttgatatgtttgagcacgattttctgttgatgcgcaagcaccattttcccatgatatgagagccttgatctgtcaactcattaattatcatacaacggtgttatgtggcagcatgatgatgcaagggtaaaattataaggtcatctttatgcatagttaaatgtgggatgatgccacggttcgatgtttccgatatgaatttttgacttccgaccgatatcggtagatttctgttccgacggttccgtttccaatataccgacattatcgatatcgttaccgtttccgagtacaccgttccgattccgttttcgagaaaataaaatgaaaatgaaaatggtagagggtttttccgaccgttttcatccctaatgcgcacgaggtaattaggtagaggtatctggatatttgacacaacgatcgatgtggcaaaggccaaaggggaaagctaattttgacattttatttaccaagtttttctcacggcgttgtgggatccgaatgtccgatccagggctataggccgttcggtcagagctagcgtgtgtgccggcgcgagtcagcaacagcggcggcgtttaattttgccggtgctgcgtgcatgcgaccgaccgatcgatcgagacaacgtatatgtaattaaagtctacgaacagatcgatctgatcgtgttatttatatacctgggcttcgaccgtataatctggcatgcatatgcatgtcaaagttcgttcggcgtaacgtgcagggttcatcagatcggggtccaaggccaggagatcttgtggtgatcatcgtgtctatctaacttaattaattaatttggtcgtcattccggttgatcgacaattcgacagtctagctaggagaaaacagcttttgacaggaataatttatgctgcatttgatttgattttatttgaacatgtacccctcagtcccattataaatgcactcataaattttcgtacccaacgtttgatcatccgtcttatttaaaaaaattataaatttttttttaaaagttaagtcaaacataaattactattaatattctaccatcttataacaatgaaaatactaatcataaaaaatattttaaataagacggattgttaaagttagagactaaaacctaccgcggtgcttattatgagatggagagagtagtatctctgcgtaggggccccacatggaagtcggctgctgcttgcgtttgacaaaattaattggaatcgctacgcgttctcgctagcttgggttctgcttggtgtgagatgtacgtgcatgcatggcggcgggccggcggcggtggtggtggccggtcgccgtggtcggtgatgagagggcgctcagggttgactccaattaaccgaatcgtgctgctacttacgaaagctagcttcctagtactaagttttagcttgtcctttgcgtgtttagccagtttccactcttcttttctttgaactcgggacctatatattatccacaaatcaacgtgtattaataactgctagtacttcttccatccctaaatatttgacgccgttgactttttcaaacatgtttaaccgttcgtcttatttcaaaattttaagtaattattaattcttttcctattatttgattcattcattgtgaaatatacttttatgtatatatatagttttacatattttacaaaagtttttgaataagatgaacggtcaaatatgttttaaaagagtatttgcgtacgtttactgccaccaccaattgatatcccctcgtaagataggacttgatacagtagtcaaatagagctctcatcgatcagaaaaaaggggaaaaagaagtccactagagctctagatatatactccctctatccaaaatataattatttttaaactttgacacggtcttcgagatgttattttgaccaacaatatctatgttttaaataaaaagagttagatattatgatagtttgtttaatgataaatttagaaacatcaattttacatgattgattttttttattattttgctatcaatagtcaaaatttaaaatatttgatttggcattattgtaaaaatatttatattttgtaacagatggagtagccatatactccttgtacgtatatacaataatcagacttccattatatacatgctgtagttgctatatctctgaggttttggaattatatatgaatctctgcaccatatgatcgagacaactctatccgttccaaagaaaaccaacctagatatagatttaacacaacaacaataaatttgaacataatcgttgttttaggtggtgtcaactcctcatatagacatttttttagacagaatgagtagctaagctactccctccgtctcaaaaaaagtgaatctaagactggatgtgacatattatagtacagtaaatctggacagatatatgtcagattcgatatactagaatatgttacatatattatatagtattaggttagttttttataggacgtagagagtatagtttgaacaaatcaacagtacctcaactgtgatcggcagtacaagagagggagagatacggaatcgcatggatccagcactaaccagaaagttgcacaaaattcagaacacacaagagattaccgcagcaaggccaaatgggcaatccattccgtccgccctgcgttttgtcgggtcatttgcccgttccacgcggagtagccgccgtggcgccggctgccggggcgctggccattggccacttacatccgacccgggccacccggcctgccgccatttgtcagctagcccaccaaaaaagcaagccgtgccgcctgcatgcgccggcccggcgtgggaaaaaacaaaggccgcaaatccgcgtgaaacagtccattttgactccctcgactgtaactccaatccgatttatatcactagaccacaaaaccggatatctttatatcactgaaccacaaaaccggatatcttgaccccacagctattaaaattggtgcaatataactttctcggtaattttagaggacggttttattgatgtggtgctttgacttagtttgacggactgactgaacttgtgggacccacatgtcagtgccgcctcatcttttccttctctttctttctctctctcttcctggcacgggcgacataggtgggtggcgctgagccggtccatacctcccttgactgtacggtgtgtgcagtcgtcagggcgcacgaagagggctccctatggtggcgtcgaagtcaggtgtggacaagacaatgtagcgctgtgatggcgaggtaggcggtggccacagcgggaagggaatgagaacgggagtgagtcgggcgccgtagtgacacccacctccttggcttgatggtcgtatcctcctcgttagttgccatggctcgcacctctctcccgaggacctcacctccacgcttctcctcctcggcgcgctcggtgtcctcctccgccgcctagctctgtgaggccgttcaccgcgctatgcaccccactcccctgctataccgacaagaaaacattttgggaggaaagagtatgacatgtggaccaaactttatttttattttctttgatgactagtgacggagcgtggggcttctcaccgggagaccgcgcaggcccccctttgccggttcggccgggggccctgggtgaggttctaagctcttgatctgtggaaagttcgcgagagtaaaaacacacaagacacgggcgatgtatacaggttcggcccgctgagaagcgtaataccctactcctgtgttttggtggatctgtgtatgaagaagctacaaagtgcgagccagcccccgatcgttctgggatcctttttccttccccccctttctctaagtgggcaaggtcctccttttatatctcaaggggataccacatgcaccatctctccctctctttcttacttgacttctcttcattaatggacggagatttgtatggctgccgtccgaatgaccttctgatgggacggcccacacctacctccacttccgccggaagcaggcgcgacgtgggaacatggctatctgctgacgacatgaccattgtcagaccggtcacaaatcggtcattcttgtccaccacgtgtcagtttaacaatctgcatgttcgcccttcttcatacaatatcttgcctgtaatggttaggatgaagcctggcatatatctgaccggaaccaacgtgccatctccaggagctaacacgccggttccggctagggacgagtgcttggaggctctcgtcctgacgggatggggcgaggcgtgcgtcagaccgcctgtcgccacctaacccacgatctgatcggtctgtgactggtcactgaccggataaacgagcgcgctgcactgcgctacatgcagcgtgacgcgctcgtccaaaccgcaataaatgtggttaggtgagccccgctatgctcacctaccccatatacgcggcgcaaaacccacaaggggtcggggcgcctcggccctcggggccgagacgggagcggtccgacccctcggggagacaaagagaagggcgaccgtatcaccctcgggcccgacccccccgagggggttaggccacgtgggtgatcgtgtctgcctcaagtctctaagtcatgatactcccggtcccatgtcaccgacagtagcccccggcgttatgccagggcgatcgccctccccgagggaagcggtcgggcgtgacgccacctctaaggcctggtgacaggtggggccggttcctacaggtgccgtcgaactacatcacccagagggcggtgtgaggcagctgcgatgggctcgagctggcctcgggggcggagacgagctcgggagctggggtccactccaccacaaagtcggcgagggcctggctcttgatcgcgtggcttggttcaaagcgcaaatcgaattcagagagttcgattgcccatttcaccacccgtccagtaccctctcggttatacaagatttggccgaggggataagacgtaaccaccgtgacccgatgcgcctggaaataatggcgcaacttcctcgcagccatcagaatagcgtaaagcatcttctgggcctgagggtatcgggtcttggcgtcccggagggcctcactaacaaagtagacgggccactgcacctttcggtggggccgatcctcttcgctaggggccacatccctggggcgctctttgtctaagcggcctcacggggtgcactcgtcttctgtgccgacgacctcggggtcggaggacgacaggggcggccttcccacagtggcctcggggccatcctgggggtcgggggcgcctggcaccgtcggacaagcaggcggagggccagctccggccgtcgggggccttgggccgcctttcggctcgggggcctctcctccctgctctctctctcttcgggtagaatcccggcggtcgcaaatcgcgcgcatcagcaagggaaaaccgaccaacaataatgagcggcccctcggctcgcgtttgccttcaactccgacgaggagtgcggtgacgacggtgcggacgacagcgacggcgaggccggctacccgggcgcgtcggagtgagcccccaggcctccgccaatcttaatagcttttccttcttcttccgaggccttcgggcccccttcttgttataggctgatttaatctgcaatcaaataaagaggaaatttttgtgtcaattctatttgttgtgtgtatgagacgaggatgcctgtgccgcggtccttttgtgccttggcttgaacaagggctcgtgcccaggtcctagtcctcaaatggctcgggtcggggctagtgcctggggagatccacatgtcgagactggccaggccgggagcatggtgaccgagggttatgggtgacccgattgtgggtttttgccgattcccccccggagttcaccacgccccggggcacggctcggttctgggccccgtttggcgattttagccgacccgagcccccgagggcaggattgaacacgagtgacctatttcaagtcaagatccttcaaaaggaaacaacagcacagatacagcctttaggaaatcgaaaatgcttttattgaaatacggaagagaaaaaagataagcccccggccaaccctgcacgcccgggggggtgcggggttggcccgagcccaagacctgacacccgacccccactaggggtagaagcgacgaaggtgttcgatgttccacgggttaggcagctctgtgccgtcgcccgtggccagccgaacggagcccggccgggggacgccgatcactcgatacggaccctcccatattggtgagagcttgctcaatccagcacgcgtttggacgcggcgtaggacgaggtcgtcaacgcagagtgatcgggcccggacgtggcgctgatggtagcgccgcaggctctgctggtagcgcacggctcgaaggaccgcgcgccaccttcgctcttccaagtagccgaggtcagggagcgtcggcttccttctttttgttgctcgcaggcctcccctttcgggtggccagcgaaacgccttcgacggcgaggacatgaccctcgtcgtcggaatgggccgacctcttcttcctcctcctgtcacgccgccctgtccgagcagcggatccgggggcggccgaagctgccacaccggaaccggaggggttccaggtccatgcctcttccttacgagccactcggtccgcgagctgaaaaagctccgcggtagtctggggctctttggaggcgatcttttcgagcatgcggttgtgccgcacacccctcttgaacgcgtagatcaccgcgtgtgcagggatgcatggtatggtgttgcggacttgacagaaccgctgaatgtacgagcgaagtgactcatcatcccttcgctgtactgcgtgcaggtccgcttcttcacctgggcgcggatatgtgccttgaaagttcatggtgaactgttggcacaaatcctcccaggagtggaccgacgcgggtggcaagttcattagccaaccccgcgcctgtcccttcagggctatgggaaagaaattcgccatgaccctgtcatcacccccggcggcttcgatcccggtcgtgtagacctggagaaactcggcggggttgacgctcccatcatatttttcggcgatggtgggccggaaccttgggggccaacagacgttccgaaggctcgccacaaaggctctacagccgacaccaccaaccgggggcacggagggctgatccccgcgtccgtgttgaggtgacactccggacgaggaggcgccctccgttgcgtggggagcacgccgaccattacgccggcgctcgatatcgatgcgggcatctggccccccacgctgatcttcccgggtcggaggcgctgacgagggagtggcagccgaatggcgagcaacagccgccgctcgtcgcgccctccgccttgacgacacggagccggtggtagcagcgccagaggtcttggtggcggaggaccgaccaccagcacctaggcgccgctgtgccgtcatgaccaagttggccacgtcgtccagccatcgttgggctggagactccgggtcagggacgacaggcgggtgacgcaggagcgcgcccgcagcttggagcgcgccctggggcgtgctgccgtcgccgtaaacgaggaggcgacgctccccatctcggcgcccttctccatcacccgtggatgtcgaagtcgcggatccttcgaccctctcgagcacctcctccctcctaggactttggcgtggagggggcggtggagtacgagctcgacggcgtgggtttggctccccatcgtcaccgctaacgctcggagagaggttgtgcgcctttgcttgttcggccattgggctgaacaggaaaagcttggcgcacacgaaagagtgcgagagctcagaagatcactcgcagaaccccctacctggcgcgccagatgacggagcttgggggtcctcatcgggagaccgcgcaggcccccctttgccggttcggccgggggccctgggtgaggttctaagctcttgatctgtggaaagttcgcgagagtgaaggcgatgtatacaggttcgggccgctgagaagcgtaataccctactcctgtgttttggtggatctgtgtatgaagaagctacaaagtgcgagccagcccccgatcgttctgggatccttcatcagattattatatctaagtatcatgttgacatcataataatattaactattcaattgaaacattgctactccctctgtcttacaatgtaagttattctagcattttccaccttcatatttatgttaatgaatctagaaatatattcattaatatcaatatgaatgtgggaaatgttagtatgacttacattgtgaaatgaatgaagtactattttgtaagaatatttctacgaaaaatgctacaggatggtgccccgtattctcgttcagacggaatgatgcctctgagttatcgtcggatacttattaggtatcgatcgataccctatttagacaggttgatatctctaaggtatcgtgtgatacctaatacttataatatctctgagatgtaatctgatatctgataagtatcaaccaatacattaaaagtatcatttcgttcaaacgaggtgccgttctacagcattcctatgtaaaacaaaacaataccctccgttttagtgaaaaaagaaaacccacgcgtcgcattgacttttccctcccgtttcttgcctttgccgaggtgagctccacacacacacacacactctctctctctctctctctctctctctctctctgccccactctgcctgcctcatgttgaaccattccccttcccattcccgacccggctcgctgtcccccctcctcggcgtcctcctcccctcccgcgccgccgcagagcgcccgccgccgctgaactccatcagctaccccgagcccgcgggggcctgccgggtggcgatggaattcccgtcgtcgacgtcgccgtcgccgtcgccgtcgtccgggcagcatcagcagcagccgacgacgccgcggcggcagcttcagggcccgcgccccccgcggctcaacgtgcggatggagtcgcacgccatcaagaagccgtcgtccggggcggacgcggcggcggcgcaggcgcaggcgaggcgggagcagcagcagccgccgccgcgggcgccggtgatcatctacgacgccgtcccgaagattatccacgccgagcccaacgagttcatggcgctcgtgcagcggctcaccggcccggggtcggggtcgccggcgccgccgcatcaaggggaggcccaggcgcacgactaccccatgatggacgaggccgccgcgcagcagatcttcccgccggagctgctgctctcgccgtcggccgcgatgtacccggcggcgaggctggcgaccat

SEQ ID NO: 1415 - DNA, 3468 bp, Oryza sativa
  unsure (1)..(3468): unsure at all n locations
aaggtgggcgccagcagctagaacgccatcatcgttcccgtcgggagcaggttcgctaggctcgccgtcggcgccagcgcctgcgagaatagcgatggccttgcagctccggccggacgacgaccaccgccgtcgccggtagcagcgctctctccttctccagcttgcttacctaccgctggcctttgcctgacgacagcgggagacaccatgatcgatcgaccggattgttcttggataggcagctagctagctcgcgctcgccccgatctcaacccaccgcacgcgtttttggcgaagcagaaaacgagggaaagagagggcaatccgggcatttagaaaaatatctcacctttttttttacccagaaataataaaataataagactagtgtcttacagccaattacacaatttttttagtgtacatcagccatatcacgttttcgcggtatctcctagctaattacacgttttaggtgtctcctgtgataaattttgcctaatcaaaaacaggacaagaggaaatgagcacagaccaaccaagaggacagaaacttaaatatcaaacttatccctaatcaatatgctagtagtaaaatagtgatatgtttttaagaactagtaactgtttagatcatttctattcctattagtattaaagcaccgtaccgtttctcgggttaatattagtatatgttcgaaggtataattggggacttggctgtgttcggatgcctgagtttccaacactaacagtacgcacgaaaaacagagtggttcattagcgtgtgattaattaagtattagataattcattttttaaaaatgaatcaatatgattttttaagcaacttacgtatagaaactttttttaaaaaaaatgcaccgtttaacagtttgaaaaacatgcgcgagaaaaatgagaggagagtgttagaaacttagagttctgaacacagccttagagcaggtacaatagcaggctataagccagctgcaaatatattttaaggagataaatgaggagagagaaggccagcgggctacagatttgtagccagctgtagcacggactaaaagacgcggtgtgtgtatgataagtgagatcatgtattaatagtgtagtatgtaactattgtacggatgagctattagattggctatagatgaattagagctagtagatggctatactattaaacttgctcttactagttactcgtgacagtttacaccaaatttaagatagggtaaagtttcaaaagtttgagtaaattgagagtaccatggaaggaccttttggatttagggcagtcccagcccatggtgtctataagtagtgtctatggtgccatgtcaataatacatcacaatagaaactacagtgtatattccatggtttcttaaagtgggccattaagaaatgtttcatctctcttctctatcaatcatatttattcttcatgtattatgaagacattattttctcccaatgcaaaacttggtagtgtctagtgcataggttctcgtgttggagctgtgtagacccagtttcttcctctctctccactctctctctctcttaattaatatagtgccacataagttaaaagtcttatatgacaatgtagttaatatcatatacaccattctaagcgaagagttaggactgcccatagcaagcacaatcccaaggaacacgttggaggaccgacaaggacgtggtaataaagatatttgaatatcgacctttttccgttcacatcttcactgaacttttcagttgcaatattacagctaataatttgatatgaccaacaaatcgccgtcaattgcacaacgacgtctggaaatggatcgatgtgtaccgcaggttgaataatatatactgcacggaacataattgacttggaacaacgttacagccttacaagcttacagctagtcatgcacgattttttttttacagataattgtggttatgaacaatgtttttttttaaaaaaaaggtactaaattcacactatattttctcggggcagaggccggtttatctgcatgtgggtcccagccactgaaagcaatttatttttgaaagggaaaagaccaaaacacaggtccccaaagccacaatgtacatatatgctccttcgcggacaaacaaacaaccacatatatataatataagattaatactcctatcgagggatgatcatcgttgttagagtaatgaaaaatcgtatagatctctctgttatttgtggactggatggtgggtagtctttatttttttttctttttgatgaaaaacatagtaaaaatataggtgtccacaacgcatccacactcaccactatgaatacacacacgcacattctacccctatgaacacatccaaagaattggatcgatatattttgagattagcgaagtcaccatgacgactcgctgtcgacgggtacgtcacgtaccgttgaaagaataattagccataaatgcgaacactcatgttaaatccaggatttgaatttggataaactggttttaccacaagaacctaactaaattagctacgctcactcttcaaaattttcttaaactatcatgattttctgcacatgagaagagataaatttacatgagattccatgaaaaaaagaatagcagtgacatataatatgcacccgcaggcacggatggcactgtttgatcggcataaatgattttggtggccttgtgctatctaaatgattttagtactcgatgtatcatgcatcatccagctaattcggaggctggaaattattagcagcaccacacgcagcgcgtcgtcccaacttccggcggatcagagaagatacatgtggaatatgaataatatttaggtataggatcatgttctttgtgaaatgctgcccccttgcccatgagaatcacaaggtattttctgttgcctgtatnntnnggatatataaagggtagaagaagtttaatagtatagcaattagtatttttttttaggaaaaggaggagttttgcttttttatatagggaggaaagagacgaattagaggtttggaaaaaaaggttaaaaaggatctctagaggaccctctttagagaatggcaggtcggagacaagaatttttaggtaatgtaaagcaactaatgtgaggatacgaggactaatgtgaggatacgaggactactcatgtaagttgtgagctccgtcataggcttttcacatgttggattatggactcaacgacttgcaacactgtgctgtacgccccattgaaaatcctagcatttctttgtagccaaatgccccaagctgtgtagatgaagaggccatcaaagtttcttctttgatctttcgccatctctctcctgcaggccgtccaccatccaagcatgtctccattgtaagtggtggctaatggcatatgaaggcccgcttcctgcca

SEQ ID NO: 1416 - DNA, 2506 bp, Oryza sativa
atattgctcatcttgaaatattttttagaaaggtggaacaaaatgggttaatattatccaaaaagaaaatggaaatatgcaaagaaaaaattaacttccttggacatgaaataggagagggcaaaattcatttgcaagaacatattgctaagaaaattttacaatttcctgatgctatgaatgataaaaagaaattacagcaattcttaggacttgtaaattatgctagaaatcacatcaataatttagcaaagatagcaggaccgttatatgctaaattaagaaaaaatggtcagagatattttaattctgaagacattaaattagtaagattaataaaagagagggtgaaagaattaaaacctctagaattaccattagaagaaagttactttatcattgaaactgatgcatcacaacacgggtggggtgctatattaaagcaaagacctactaaatttttccgcttaatcagaagaaaaaatatgtagatatgcttctggaagttataaattaaaaactgtcaataatacagatagagagatcatggcaataatcaatgcaatcaatgcctttaggttgtacttaggatttaaagaattcacggttagaaccgattgtgaagccatttgtaggtactataatcagctaaatagcaagaaagctcaactagaagatgggttttatttgaagatattataacaggaaacggctataaagttatatttgaacatattaaggggaaagataataatttgcctgacatgctttctcgtttacctgaattgcaggtatgaaaagatcaatgaattacagcggaattgaatgcttcacatttggagatgacaacaagctcagaatattcccaccaaattcatataaatttaagccaaaagaccatataatcttagatgaagtgcaagaatgcatcttggataatttttggtaccaatacaataataaaagggaagaaaaaggatatatgttatcaatattgaatagcctctctgaatattttcacttaataaacgggttattaatgccagctaatgaagatcatgaaataatccaacggaagcctatatatgtcgtatttgatagaaagctcctaggggtctatatatcttttgaagaaattgtggcccaaaagatagatgctaaatttgatagactgatgcatgagttcgatcctgactgctgctacgtaacaacaatattacaggaaaatgcatatttgcactcaggaaaatgcatatttgcactcgggttcatatgtacctacaatctacaccgttgatgtgtttcaagattcgtgctgcaaaatgtacctaaccttaaccaaatgaacgcttactataggaagaaaatataattaggattaggttggttcacaatatgtataacatgtatgttgcattttttaccaaataaaattttcaataataatcatatatgacatttatatatctagtgcattgtatttctgtaacccttattttgtttataacatgatatttagtcaaaatgagaaaacaatatatctactatgtcaccaaattgtcatcttgcaaaaatgatatttccaaaatgatatatatctaccatcaaaaactacataaacaagataatttatataaacaaggtaaactacataaacaagttttgcatacaagaaatacaaaaattatataaacaaggtattttacacttgtaaaaaatatagtataacgtaaatatcatgcatgctacattttgttagcacctaatatacttgtcctaagattcgtgcaatatacatatattgtgggtacatgtgaactcgcgtgcaaaaaaatcaaacttatatatatatattcttctcggtaaccatgattacagtctcactatggtgctctttaccgtaagtagaaaataatctgagccgttgatctaattttatcaaagggttcaaatctcggttggcgctagtagaaacgtcgaggatataattatccaaaaaaagatcttctttccctttaaataggaagctacgtgagattttaggaaaaaaaaaagatcgatctccacctcacgacgactctagcctcgctttcgatgcatctctatggctgcccttaccggccatagccacagccgacgcaacattcacggagctgcagtcaaaggttcacaaaaccgatgaaattttacgaaaatcagtgagcttttgtgaaactgttagatgtcggtttataaaagccggtcggtattaatcggtttttgtacggcgttgataaaaaatagtcgggttttacccattttggtcggactttagtaaaccggtgaggagcaggttttatttcgaaatcgaaaaggtaaacactggctagctccagtgcccacgcacggcggtgaaaatgggttggcgtgggattgcaggggtgaatgttgccaaagtgtattgccgtggacgggaggatctcacgatcagaagcgagcgaggtgtttcctttttctttttttttat

SEQ ID NO: 1417 - DNA, 16012 bp, Oryza sativa
  unsure (1)..(16012): unsure at all n locations
gggggtgacaggaaggaatcgggagatcacctgcgcgcgacatgacaggatcgcagggacagctgcaggttttgatgatgatggcgatgacgatgaggatacgatcaggaccgaacttttcaggggggtggggacgggaattaaactgggcgatcggatcatgaccgtatcagcctgggtttgtgtcgacggtgttgttaagtggcggtggggagatacggttggatttggtcatttggaggctgggagaggagaggggaggattgtgcatgttgaggctggcaggatcgtcgcagggatattttggttccattcacttggctatcattgatggtgattagtctatcaattggatcatgattccatcgctcaccaggcacttaagatggcacgcgacctatacgtttgcaacttgaaggaacacaagtatgggtaattatagatttatagtcccatttgtcattgcattaggaaacaaccctgacagtcaagatcagactatgtacacggtgtaccctctctcgggacaaagtacgcaggggccatgcctagagccctagagcatatgcataaggtattctactaccttttggacctcttcatgttggaccaaggaggatttcttttgagggccagtttaacatcagagatacacagagttagcccactatgtaggagtttttcctacattaattttccttacaaaaatttccatgttttttaaaacgatgcattcaaaatagtgcgagatctcgtattgatatagcagaagaaaattataaaattacaaccttgtaagataatagctcctagcctcctaacacatccttgatccttgctatttttagaacatgaaaagtacattccattaggacgatgatatagactgtgttattctcccagtttttccaactcacctctttcgttttccacgcggacgcttttcaaactactagataatgtgttttttgccaaaaatatatatatatgaaagttgttttataaaaatcatattaacctttttttaaaaaaataatacttaattaattatgcaataatacgtatttcattttgcatgtcgggaggacctaacccctcctaccaaacaagctaagtggctagctaccacacgagttacaaagttattaaaccaggacaaatgatttgtcgcgttccatggaagctcccaaatccgacaaaagaacgggcaacacgactggacattgttggagtctaacatcattataactagatagcacaaaaagtttatctactgtaaaaattacaacattaacaccattattttgcctcagaatcattcaaaccttaaactagattgagaacaatatatattaaatagttggcagtgttcggcagcgcatggaagagagtagatttgtctcgttttttcacgcgcacgcttgccgaacaattaaactgtgtgtttttttaaaaaaaatctatgaaaaagttgctatgaaaatcaaattaatttatttctcaagtttaaaataattaatacttaattaatcatacgacagtgactcacctcatgtcgtatattcagatttcctctcctcttgtacgcacccaagcttgcaagttgcaatgcccatttccgctagcaaaaccactgttctctctgcagcagcagatgcctcaaatcttgtactaactttttcaacctttcggctacagccatcaacaggttcccagtctcatcacgaatgtagaacacaccccatttctcgtagttgaatcaaaagttccggggagacaggggagattgattctcgttttccacgtgcacgcttttcaaactactaaacggtgtattttttgcaaaaaatttctataggaaagttgctttaaaaaatcatattaatctatttttgaaatttaaaatagttaatactcaattaatcatgagctaatggctcacctcgttttacgtatctccccaatctcctcaatccccttctcctcaaacacacccttaatatttactttcagaatatatatatatatatatatatatatatatatatatatatatatatatatatatatatatatatatatatatatatatgcttactccacgatagacgttctgtactggcctgccttgtttgcaagccgaatcacccatcctgccattcatcattcattcaattttttgttagaaatattcgggatgcaaaatcttttgcacaaatataccatcggtctcacacaatcattacgcgaaaatgacgtggaaatgacgttgcgaccggtatcgcgcaatgaaagcgcacggtctcgcacggtagcagtgcgagaccgcgcggtctcgcccaagcaaacagcgatagcgctgaagcaatcaacgctatcgctcaagcaaagagcgataccgtgccttgccaatttaattagtggttaattatccttattagtgattaattaataattaattaattaatcattaattagaataattaatcactaattattattagttaaatgttaattaagtaattaaccactaatcaaatggatcctattggacaatgtcgctgattgcttctgcgagaccgaacggtctcgctcttccattccgtgagaccgcacggtctcgcgccgttgccgtgcgatatcacccgcgacgtcatccccacgtcattttcgcgcaacggaagtgcgacactgatggtatatttctgcacaagtttttgcaccccgaatattcctgagaaaaaaattaaataaacagtatattttcaaatttaattcactggaagctctctcactgaccatctttttttttccttgcagtaattagcttgtgcaccttaccttctgatgcagctcgatcgcacgcacctgcaggtgcagcgaagctagctgccactaaagagcccgcggtgagtaaaggagccagagagagaactgcatttgttggttaaggtctcgcacgcagagaccggtggtagtgtcgtcacactgccgtttttacacactcatcatacatactatttgctccattctgaaacaactactgcagctagcttggatcggcaattggtggtttcacgtcgccttcttcctacttcccagtgtcaagagattaaatcctctctgatcaaattgttacatgtacgtggttgttcttccaatcaacaatgtgaactcgctaacaccattctagtagaacccgtttccatggccccttctagcttgggatgatcacagcgtggtattgcctgctgcgtgtgcttcacttccccgaatggcgaatacccgatcgatatatcatccacccactcacaactcgcgacaccgaaatggaaaacgggaaagcgttggttgatgatctcgcttctgccccgtggccacatgcgaacataaccagttaaccgccaattaaagcttccgatcgattcacatccttatatatttagtacaactttacaagttaagcatttgagcacagcgcattatttgcagacgccttaccttaacttgcattcggcaacttccatctctttgcaatggtgctttggccaagcaagccggccagttatatatggcaggttggagcagtcacgtctgcgtttccgtttttccttctacattagtgtgcttacgtttaatccatggacagcccggtcttgtattcttgtgcaaatgcactgcctaattggccagaccatgcatgcactagtaatactgaccttaattaacttcaaagatttagtagctagctagatgaccatcctggcatatgagtatgtgcagcaacacgttgtgctggcagccgtttcatttcatttcacatgtgcctatatcactatccccttgaagcccagaaatccattgcgtgccaactcaaatcctaggcagtctcatcctcccatgaagaagcaagctgcagctgcacgatgcaacgccctttttgttgacagatttgagagtgagttcctgttaatccttgaataattcgttttttctgctccaattcccctcccggcccatgtatgatgttttttttacttcatttttttttgtgcctgcagagataatgatgtatcccctggttgcgtcgttggaatacattttttgtttcgggggctggactgcatcatgcgtggtgttcttccacttgatcgtgtcattttacggcacagaaatgacggaaaacctggtaattaacnacatgtgctcctccaagttgtattttgcactgttcgttttagtctgaatctgatgtgtttgtaatatatgctcgtgtagtgttcttgcgatgggatgacggccgaggaggccgccgccatgccggcgtcgaggcgtgcatgctgttgagctgcgcggcgcagatgcccgcggcggcggcggccatggcactgccgacggcgacggcgacgtgggggcggcggtcacggcgcgcgcgcgccgtccgccgcgcgtcggcgtcggtggcactggcggtggccggcctcaccctgtggctgtggtgcgtctacctccggttcctgccggggctccggtgcttccgctgttcggggtgctcaagaaggttgccgtccccccaaaagccctgggattcgccacgccggtgttcgccttcgtcgcgctgggctcgcacgccgtcgtccgcggagacgaagccgagtgggacgagtgacgtctactgatcgatcgatcgatcagtgagtgtttggtgcgtgtggtttcttgggagatcatgttagtggggactaattaattaatgcggtgatgtggagctgattagtttcatgccgattttggtttttggagttcggtctttctcagcaagagtgtttactgatcgccaaccagctgtctagcgtgaaagacatacatgaatgaagtatagttaacttggtaccaaactactagagtactagtccagccataactagaaacgctctggattcgaaacctcaccccttctaattatttgatattaggtcattctctaatattcacgtttttactagtccagccatagaaaccccaaatctcttgcctgtggtaacagctcacagctcaattccatttccatcctactccatcatcagtgtcaggtaggagtagagcaaaactttgtagccagagcagcggggcgctgccatgtacaatcgtagagcggacgtgcaaagcgggctgatttcaatgggctgcggcgcaggggaatggcctgacaaatatttttccagcccagaacgcatggtcaccaagcgatccaatcccttcggcttgtaaggcacggtgcggtcgactgtaggggatcccaataagcattgggccgcatagatagaccatacgtgccaggttgacagagtttcagcccacactggctgaccaaatggtagcgatccaatctgcctccgggccctgtcacactaacgggccaacttggttaggcgggccgcgtgttgaagaaacggcccatttttgtggtcctgtcacggcgaagttacgggcctatattcaatacgggccgaaatggcaggcccacataagcgcacgaaacacaaaaaacatcacgacaaaacaccccgattccacccaccccaccacgaaacctcgcccttcgtctccgcctccgtcgcctccatctcgccgcgatccctctccccggcgatggccgccgccctccgctcctcctgcgccgccgcgcgccgtctgctccggatctccccggccgcgctgtccaccctcaccgccgcctcctcccgccccgccgcggtggcgcccctcgcgcgcccgatcgccgccgccgccgtctcaggtcctcctcccatctgactcttcttgttcttgctgtttcgctaccttgtagtcgatgatgatgatacctccttcagttcgtgtttggggtggattgggctgacgatgcgtgtttagggttctgtgcgtgctgcttgcttgtgcaggctgattccagatttgtgtttgccgtgtggtagaatctgattgttttgggggatttcaactccgagagattggatttgagatgctatcgtgtgtggtgataataatttgccaggaagttattggttgtaaagatacaaggttcgggggtggcgggggtgccaattgttggtcgctgcgttgtagttaaagcatcaataggaaaaatgttaacactctgtgtataaaggtttacatttccaagctgatcctgaacttcacttcagatgtgttgtcctgaagtgttgttcctgctcgtgttgcatctttgatcacataataacaggcaatattgtttaaaatgatgttgctgcaaaccaagaataactggttcaaaacagtgagatttttcacttgattctgaagtaaataagcttattattctctaacctttttgtcaaagaatacgttgacgggaaaaaaaaccactgtttgtcctttatatgccataagtgtataagaatgggagaagcatggtaagaggatggttgacaaagagaaatatatttggaagagtcattgatgtcatcttgccttttgtggtcttcattttgctgcaatgtaacactgttgccttagttcaaaattgtacataccccaatatcaaattttctgtgctcaatgttgtttaacttatacttgttttaaattcaggtggcaacaatgccttttcatggaacttgaggcgcttgttcagctcaaatgaaaagcatctgccggcgatatctgacccagaagttgaatctgcgtttaaggatttgatggctgctagctggactggacttccagattctcttgtaattgaagcaaagaaagctgcatccaaagctacggatgataaggctgggaaagaggctttgctaaatgtatttcgtgcagctgaggcatgtgaagaatttggtggagttctagtcaccctaagaatggctctagatgatctttgtggtataactggtgaggtcagtacctaatcacatatatccctcattgatgtattgctttctgccaatttgggggatcagtcatcagtgtctctttcttatgcttattacttgttgtaccactccttgctcttgcagaatgtgggccccttgcctggttatatagaagatgctgttaaatctgcatataagcgttacatgaaatatctggaatcatttggcccggaggaaaattatctacgtaagaaagtggagaatgagttggggactaaaatgatacacctgaaaatgcggtgcagtggtgtagggtccgagtggggaaaggtacactcttatgttacctatccctgttgtatattttacctttgtgacagcttctgtggtagatttgcatttgacaagtccatggattgtgggtcctgatgtatgctttagtgcggatttatgctatcatttttaatggtttcttatgattgtattcaagatgttgtgtagatgttattttcagcgtagaagcagagttagtatgtgcagtttctgctatcacaaatgtgttatttgtgtttaagaatatattcctttctatggctaaggatcatttaatatcagactgcatcttgggtcatcacttgtcattggagtaggttgtactatgtcaggacagtcctttattattattttgcttgatacaaagggagaaatgagattctacatccatctttttacttgacgattagaacattgtcacagcctccagggctcatgtttgatcatatcttttctaattgaatatgtatataaaaatcattaaaactaaaactacattaaagtgtttttcacgacaaatctactacagtcattttcacatcaaatcttaatgtttttgcaaatatccgtgatttaggattttgaggtttgaccacatacatcctaaaaaatcatgtatttgagaacggaaggagtagcttagagtgaatataaacacctcaacctcatccaaaaaaaccaagtgaatgaactaggaccatcatcttgtctatctattcatttggtttgaagaagggaaattgcacaggtaagttgagatttgagaacaattgcagcgcattctcattttaccaagtcttgtgctagatatacttcaaataaatgtaaatgtaaaatggaagctaaatcagtttatcctgcacagctatacactgtgtaaggctcggtaataaaaggtacatgcttgttattttgttgtttgcttgcacagagacctgtagtacttccaattgagcactggcatacacccctggtaccatgtaacatgttaactttcaagaagggggtatgcttatcttattttatctgtaattagtcaaaaaaaaaggagctgttcatttaccattgtcaccacttacttcaaaccttataagggcttataggggtgtttgcttccagccaatttggaacatatgatttagaccgagtttgaattgttttcaaattaaaatagacgagttcatgcttgacgttgtaacatgtgtggaataatattttcatgtcagtgtatagctgatatgctcgttcctccttgcttcgactggagttagaaggacaaatctatatccaacacctgaagctcatgatttatttatttcacttgcagatcaccctgattggcacctcaggcatctcaggatcctatgtcgagctaagggcatgaggaaagtctgcagatcataaccatggcagaacatcgttttctgagggaaggatgcatatcagaacaaggtgttccgtttctcttttcttcttactgtgtagctaccttgccaataacaaggagatcatcaaacagatgtgcacttaaagtaattcagtgtgctccagaccttcctgctgtaataagaacgtgtttctggggttcacgtcgatttgtttttgctccagtcatggtggtgcgtgaagcatgtagattcagttgattccttgcatgagccgtgaattgtttgttcaagctcctactctgtatggctctattgaactcagaagtagcttaatcggtgttcagattccttgcatgagccctgatatgagctctattgagtacttcctccattttataatgtaagactttcttatattatgaaatggatggagtactaatgtttggctttgttaaacattagcacttgaatcgtcgttctgaatacagtacgacatcacggagtatggccgtgtttagtttcccctctattcccgacttaccatcatatcatatcacatcaaaaacttttctacacgtataaactttcaactttttttttaaaactctcaactttttttaaactttaaatttttttcatgaactaaacataccctatgttgatatgcgggacgtttgtctatccttgacttcagaagttataattagctagaatcggtggtccagaacttaggagtgatgtgatatgggtgtgtgaagtcgtcatccgaaggcaatgatgctatcgaccgcaattggacgacgaaaatgcctcggatgcccaaacatcttcctctcgctcgtcggctgacaatggcgctgctgctgggaacggggacacacctgccagttcgactaatcaatcatccgtcaccatgcgttagggctaatcatccagtcatccgtcacaccgttcgctcgagtacttcccagtgtcttgctgtcttgaagcattacagctaaatctgtggcttccaaggcgggggccccgttgccggcggtgcggcggcgactggcagtaacaagcagccatgggccatgcatggcgaagcgcgcgtatgagaaacgacgacgacgaagacgaacgggggggcacagcagcacacagcactacgcgtctacgcgcgtgccggtttgaagtatgcagtggcagcctgcagagacgtcggccgcacgcgcacgctcatacacacgtacggtgtcaaacccccaggctgctactgccggtgctcgtggacgcgcgcgccgctgtgcgtgcgcctgttcgttcgtagcagcagcatgcagtcggccagcgcgcgggcgtgcggacttcgcaacgttgcgtgcgactcggccccggttgcgtgtccatccacttgtgccagtcctgtagtactcctgttggcgtagaggaatcctgtccgaatctactacagcatgtactgtactacttcctccgttttacattaaagtcgtttattttttttattagccaaacttttaagtttgcttaagttcagaaaaaaataacaatatttttaatacaaaataatcatattatcaaaatatatttaatgttaaatttaataaacctaatgtgacgttgtggatgttgctatctttttctataaacttagttaaacttaaagaattttaactaaaaaaaataaaacaacttgtaacataaaaacatagagggagcttttatttgatttgtttggctggtagtttttttgagcggccagtagttaagaattggtgcagcttgtagcgaatttgcgatgcagcagctgcagcttgtattgctgacgaacagagccaatttaccctctccgattcgacctgcgcgtatcacagtgcattcacgctagcgttgcatataaatgcaatgcgggctggccggcgtggtcgcgtatgcacgtagctttcttcctcttcttgagttcttggtcgtcgcttcaagcatgatgcaggcaggccagctgcagcgtcaccctctagtgtaaattttgcagcagctcatcacaagttcacaacttacgcacagcacggttgcattgcacgccttgaccgatcgagaggtcaaaattgggtaaaagtcgagcatactgttctcgcacaggacgacaggcaggctggcattgtagcattctactacatttctattgatctttcagacgacggacgcgagacgaataaggcagggttcacaattccaatgaaaaccagtcgaattccgtaaaattttgacactttgacatggctcggaattaagtttcgattggaatttcgaaggttaaacaataaatttggtcaaaatttatcgaaaaccaatcgaaatttatcaaaaatcgtgatactgatggggctcaaaatttagtggtcaatcgttattgtaaaccctgaacggaggctagcagcagcagctgcacaggttatctttattggccgtgaatgtggtgcattggcctctttcgtctgcacctctctgaaacgtcgtccgcattccctgttcagatcgaatgacgagtggtagtaactgcgaaaagggcggcgaaaagatcacactattcgtgcgctcttgcgtcgtccttgccaatgtcctagaaagcttccaggtcactgtgtgggcgtctctgccagttaatgagctgagctcacgttctgcagccaccaacaagaggctttttttttaatcgcttgtgatgatctgagaggtcgtactgcacgattgtgttttagttatgatccgaaatgcaatttgaagatcgaaaaggaccgatgtctgacatgaacctctgcaatcaggcgttgtgatgaaagggttggtttcaatcacgagttgttcagatgatgtctcgcatgagcctttgcaatcactgtactaagacgttctaattaaaccactaatctcctcgcatgcattgcttggatgcagtctagtttcctgcctcctaggctcctggctttatctttctgaactagtcgatatcaaaccgtgtttgttagttcagacgagcacatcacaatttccaagcgattttccaagcgatcagcttattagcattctctccaggggaggaaaaaatatatattttatactgtacgaaaaagcagcatgtccaaatagcgtcatgtcatcacgccttcatccttctcgtccacacctgcttgttctttccatcgatagatctctactacttgaccaaatatcacaggcaaaaagtgtcaaccaactaccctctgcagaaggctagtaataagcatacgcactgtttaattagcgacaacatatgacgtgatattagttagttaattaattagcatcgactgacaaaggttagcgagatcgcatccaactacctggcgcaagtttaatgcgtatccaacacaccaaactttgagcttgtgaggataaatgattcagttgcaaaccgctattactgtcgatctcaacggccatttaaatcaaacgtttctaaatataagtatcttttacactattgagactactacttaattatcccatcaatcatatttcatttaaatttctttctaacctaccactaaccgtgaaagagcatgtagtctaatagttacagtgacctgagtagcatcaaaaatcctgagttcaagtctccatagtagggaatttcatatagggttattcgagagctaagttccatatgttcgataagctaagttcctaacttttaaaaaaaacttatcgctaaccaatctcacactccatgggcatcaaaagtatatattttctcctcgatcttaatctctactagacaatatataaatgtaacagttggaatggagagagtacatgggggcacacatatttaaatgtcttcatggagagattgttttagaaaacacatatagtttcgagaaatatttaaagcgacttacatcatgcaacaacgttttatctatatataatgagggataaaaatgatagggatacgctgccctctaaggagaaaatctttaatttatatggtcaaagaagtaggatcagctgttgggcaaggtgctcccaacttcaacgtttttcgtcaaagctggccctgcaattctgccccaactaagctgcaggaaagtcatcagcggccgaccaatttcagacatcctctccttttctctcgagagaaagaatgccatagcagtatgcatcatcatatcattggccagctgtaataaacaaatgaaatcaggtgtacaaataaaagaaaaagagcatcaccaactctgcatccccgagtaagaaaatggcagagaagctcccccccaagtgatcaaagtcgttgttaatcaccaaaacctgctcccttttctttgatctccaaaatatgtaaccacttcctacatggcacatgcaggctgcagctcatatatatatatataatcaatactactaattacaccacataaaaaatgtatctatataatgatctctatactatatactccaaatctatagctctccttctccttcttcttcttcttcttcttcatggagtctgcagctggctgtcgaggccgatggagttgtgctgcctcgacgggccggacggagggatgggccctctcggcaagaacccgaggaaatggttggaagctcccctctccaatggcctggccttgaaggtctgcatgcccctcgaagccttgcatctcggcaccatcagcagcagcagcagcagaagaagaagcacaagcaaggacgaccagcgaaactgtagatgatgatgagccttcttcttcctgcagcttctctgccagtagcaacccatgcagatcgagcagctagcaagatgaggatcggagactggagttcttgggagagttggtatgatgtgaaagtttgagatgtgatgagggttttggtgagtgcaaaatgcaggtgagaggggagaggagctgagggagctgagagatggtgatatataagctataagctgctagcgaaagtgttgagaacgtatatatgcgtagtatggacagcattgagaggagaggagagaagaagccgccattaaatttatataggagcatatgctggacatattcacagctcgcagattaaagggaagaagaaattaaaatgaaaatccacatgcatgacgttgttgctggctgctatgtatgtctgcgaaatgcttgtgtggaaccattcttctggtgcaaactgaagatatatatgtgtcatgtacaccaataattaagctcgatcacataaatattttttttgattatttgttggaaaaagaagaacaaagtggtgcatgatgttaggaggtttttaatgttgaatctaaatcgatacaatcgtgcatattggtgctcaaagtttaaaactgtattctaagacgacatctaaatataatacattaatacagctacaatcagataagattaggtcaaactgtcgaaatttataaaaaaaaattcaagtgcttagcttataaacaaagaatatggattttgatttgtcaagacgtaggtgtatggttttatccgccaaccctgatgtcatacttgggccatgttctaaagagctaattgaacttaactgcttcttgtttttcgttagaacgttttctaaaccgttaaacagtgtcttttatgtaaactttctatatatatggtgctttaaaaaattatttaaaaatcatttctttaaataattcataatatactaatcacgtttcttgttttagttgtagctaatcatccaaaacctatgggccgaaaataacacgcccctagtttgtgtttaaggatcaatttagtccctgatattctatattgtccaaacaagttaataaagtttattgggtgattttaatatagtccttagacccactaaaaagccacgtgcacacacatcatctatgcattcaaatcaataatcaaatatccattctacccttaagtttttcatatgaaaaaaataaaaattattgagaaaaaaagtggcatttggccattggctgccaaaagatgtagcatgcaatggcaactaaaacaatgtggcattttcctttgttttatgattgctttctacttgtttttccctttgtttttcttttctttggttatagaaaatgtaaggttaaaatggacatttaaatgttgactttacatgcacgaattatgtggcatgtccacgtggcgttttaagtgggtccaaagactatattaagacacatgataatatttaaggacttgtttggaactttagacattataaaacatcaatgactaattcgagtcctgagcaaaagttgaaggattgaactagctattcacccaaagacaaatgttacctttcattattgtaagggattgaccccccaaaattgtgcgaataaatttcatgagaaaattataaagaaaaatcaaataagaataatttggctccaattgggattgaaataggttctatttattgctcctagattacaggttgtacatatgtgaggatgataattatctcaggatgcacctatagaagattgatcaagttggtgaagaggttggaaataaatgtgcacatctacctctagctagccatggcctatgaagatatagttttgagactttgatcaggcacaacagtggtgatgaacatggtcggtgtggggttgtgcatggtgggtctgaggatgttgagtgcattaataagagaggtacttgcacctgtctagagagaataaattcttttggagtgagaaaataagggtttcttttcttctttttttttttttgagaggagatcaagggagattcagaagaaaaggaggcaatgtgctagtagcagcgaaagaaagctcatggccgcaaggaaaaaaaaaggtgtctgtctcctctcatcatccgtaggtgagtgaaaccactgcatgccccacttggggaattcaatacccgacttgggcacttgctgatttgcataaccgttcgtgcatgtacctacaaacatcagtgattagctagcaggatcagcagctgcggctcggtgcttagctgcttgttgtgtaggagtatatcttctgaattttgcaactaggggtgtgtggccatctctgatgtctccctgcatgtggcccttgtgcagttgtgcttgtgtgcccacagtacttagcagaaagatacttgccatgccgtcagatactgatatgttttcgtactatatacaatgtacattgtattgtatccggaagctctcagacgaaacaaattaaatgcagatatttgaccagtcttgcgtagagaataatacagtacatgcctctttgatgactggcgattggcgaacaactgtttctgaggaacagcactg

SEQ ID NO: 1418 - DNA, 7051 bp, Oryza sativa
  unsure (1)..(7051): unsure at all n locations
cagcggcggcggcggcagcggtggcaacaccagcaacggcggcgccgcccgcccgccgccgtcctactacgccgacccattcgtccccagcccacgtcacctcctcgccacgcccaccgtgccgtcgccggcgacctgcgccgagctcttcagcaacctgccggatctctagcccgccgccggccgccgcatccgtccaaggcagcttcagtggcagaagcttagctccatttcctcttttcttttttttcccctccattttttttctctctctggtaggctcaaggtggtgggcccgatcactgatgacaaattgattagtgctccgtttcatccatgcgctttgttaattattcttgggcaaaccacttagcaatgagaaggagcaaagaggaaaagaattgagaagaagaagaaaaccccaaaagaaacaataggcagtggcaaaagtagtagcagtagcagatgagagtgtaagactatagaacaaaccggctggcccagccatgtctcttttactcctagttttcttttgattcagttacatctcttgtgtaaggttagggaaagattgcttgcttaatgcatcatttgtttattctttactgctggtgtgcctctgattggatttggattctgcatgctgacttggtgcactagactaataaaaaccggtactgtatgagtaaagtaaaattgtacttaaagtactgtggataataaagtaagtcataaataaaataaacaataatttcaaaaatttttgaataaaatgagtggttaaacgttacaagcaaaaacttaaaatctcttatattatggaacggagggagtatcactactagtgtgatgtttgtgtgtggactgaccgtgtcagtggtagcaaatggagttttcgtgccggcggaaaattggagaggagagtagttgttgttggggccggggggcggagaaaaaaaacggtggtggatagggatttgcgggtgtgaacggggaggggattggaaggctccgtttttttgtcgctggcgtcgcacgtgntcccnnnnnncngngggggggggggaagattcggtgcacccgttcacggccgggaaaagaggcttcgcagccacggacgcccggaaggagggcagaatgggggcctgtgtcgtgccgttctcctcgctcttttgccatgtggctgttcctgaggccgtcggtatcttacggggaccaaagatcctttacactgaaatgcacggtatcattaacatatggttaatgggtccagggtttcacatgtaaatgataaagtcaagtgactccgattatatagaataatgatctattttttggtactacggatgtgtttattgctgaccgtgctgagtttgatggatagattgttagttataaagtattataaagttgataaaaaaaatcaagtctataatatacgagacatagtgagatgttcggctgctgggttgtgactgcgctcactgcgagcagctgcagctagcacgaacaatgccgtactcactgtgagcagccgcagccacagcagccggcctaccgaacactcctagtattaaaaaaaatatggtaaaaccgcaattgttgagttaaacaaacgtatatgcctaataccatcgcacaaacaaacagacgacacaccaaacggggcaatgcttatttcaagactataaattttagctaaggatttctttttctttacaaccgtagtctgtatattttatacgatctgtatatcctcatctctttattatatcataaattttcaacgtgaatatgacatatgctaaatattagcatttgtcgatctggcgagaagatcatggaggaaatattaattcacactatctaataacgttctattttattttttttttattttcggcaaggaatattcagtaatatatcgatgtatttcagatagctctttcgaggcaccatatgagttttccagttaagcatgtggatttttccttttttagaaatcggtactgctcaatagatatacgacttacttcctccataaaaaaaaggaaaatgctaaatactgggataccgtcgtgctacagctactcgcgccagctgaggacggcagcgacgcgtggggcttggccgccgtcgctgaggtgctgtgttgacgagcagcgcgagctcggcgtcggagcttatggaggtgggttgtcgcgacggccggggatgcagctgtcgccggagtggatagacgtggagcaaggaggacacggacgccggcgacgagctccaacgtggcgtggacaggggaagatgcggccgtcggcaacgagctccggcatggggtgtggatgatggaggatgtggctcccgcgacgagctccggcgtagggtggaggatgccgccagcggcgactagctccggcgtgaggcgtggatgacggagtacgcgcccgtcgccgatgagctccgacgtggcacggacagggaaggatgcggccgtcggtgacgagctccggcgtgaggcgtggatggagaatgcggccatcggcgactagcttcggcatgaggcgtggatgacgtaggacgcggccgccggcgatgagcttcgacatggcgtggagcgtggaggactccaccgccggcgacaagctctggcgtgagacgtggatagtgggaccaccagcgacgacactttggtgcccggctcctgataccttataagtattacctaatacgtggtaggaatcgcctgataccttacaggtttcacctgatacttcgcaagtatcacctgatacataatagaaatcgcttgatatctgacaggtttcacctgatacttcgcaagtattacctgataagtagtaggaatcgtctgatacctaacatgtttcacctgatacttcgcaagcatcacatgatacatgatagtaatcgcatgataccttataggtatcagctgatacctcgcaagtatcgcctgataaaggtgaagtatcagaacatgatacctcagaggtagcaggatctaatatttaaccggtatcatccggtcccaacgggattctgttgtattagcagcctcctaaaaaaacaaagctagtttggtacggagggaatagctcattccgacgatgaaatagtgaactcgctcctaaacagcagcaggcaaacgtacagcaaaatgagtcaacatatatactcctactttttctggaactaaagagtcaatcaacatatatatactcaacactaggtcactagcactagtagcaaccattaaccatgcatagacttggaagacaaacgcttgatcgaggccacggtgatagtcatgtactccctctgtttgacaatgtaagtcattctaacatttctcatatttatattgatgttaatgaatctagacacatatatctatctagattcattaatatcaatataaatgtggaaaatgctaaaatgacttacattgtgaaacggagaaagtacatgtacaaacaggggcggagctagtattgttagggaggtgcccagaaacccggttcgaaaatttttttacctatagtttatctattttgaccatatatataccccgtcagtttaaatatagacacccgtatcaagctaaatttgatttaaaccagagtaaagcaagcgagtgaaaccccttttattttattctagctccgtccctgtatacaaaacatagctcactgcactccatttcaagaaatagcgccgtccttagctatcaccattcgccttaggcttaagatggtggtggtagtgttgtggaagcagcctgagcagtaacttcttgtccgcctggttggacatttcaccgctggattattccatctcgggtagcagattttgagcagctcgttcttcttctcctcgacttggctagtcgtacgttgttgtcgttgttgttgttgcaggtaattctctcatgttgccggccggattcgtatgatgagacggcgtgcgcggcgtgtgatggtttggtgctccgccggccgcggaggtgaatgagcggaggagcggcgtcgtacgtcgacctggcgccgccggtgccgggggaataagctagcctcggcagcagcaacacccgccattcttcctccttgaggatagtagccgccgccgccgccgccgtccgtagcacgcgacgtacggccgccggctccgacgacactcttcgccgcgtgtcgaaaagccgccgccatgcggttgatttcgctctctgcgtacccaggtgtgggcgtttcgtgatctcttctctattttcgcctgccctttttttgtcgatcctcaaacataccaggagtttaggtggacatatgcatggtgacaccatttagctatccgatttgcactattaatagagaatcaattacaaactaattttattatggccgtttcagttccaacaatataagtttgttgtgctcttgctttgttcccgagtacggcttgtggatcatgaatgagtccatatagaacgggaattaccaagtgtcctatactaactacgtagacataactcctttctttccgtaccaatatgataaaattagtggcatataaatttataagtaaaatacaccaacagctcctaaatttgttatattgtgtcatataggttcttatactttgaaaaatccaaatccatagatcctagaccttattaaagtgtgtcatctcagtctaaaattgtcatgacccattagaaatcctacttgacgctaatatggttgtcacctcctcctaatttttttagaaataatattattttaatgaaaaattataaaagtagaagctgatcggccgccctgtcaaatatccacagtttgacagggggacatatcaaacaaccataattcgacagggtacctgtcgaactgcggttgttcgacagggcataaaaaataccctatcgaactgtccctgttcgacaggagataaaaaatgatagaaaaaaagagatcaatcactatgcgcaatatacactactgtgcacctctgtgcatgcagacctatcgaactttggatgttcaataggccccctgccatgctctttatagtccttttctttttttttaagtgaacaacaaccctgtcgaacaactgtagtttgacatgatgttaaacttgcaattttagccgaccagtttctacttttgcaatttcccattaaaataatattatttctaaaaaaattccctcctctctaccctagcagcaacaacctacacagctccactgagaggcaccgctggcaacagtggcagagacaaggggacggccggtggctggctctctgtaacaatttttaatacacagttatctaattaattagttaattaacctaagtaatgatgtattagttgattctgccgctggctgatagagagggaaagaaatgaggtgacaggagggaggaggtggcagccgcgctagagctaatagtagcccactactgtctccaaatcatttatagccaatgtaatagtcaattcatataatagtgttactatactattaatacatggttccacctgtcatacacacattacatcttgaagtctgtgctgcagctggctacagatctgtaaaccgctgctcttctctcttttttttatctctttaaaatatgtttatagctggcttatagcctgctattatacctgctcttagcgtgacttatattatgatcccgaatgagccatgacaattttgaactgagacaacacattgtaataagtcctagtttagggaccacttgtgtgtttcactctagatttaggtccggttggcacaactacagatcacataggccctgttcggcaggtatggctgccgcagccgctgcggctgcggtagttcaaaatcgttgtaagctgcagcaatttcgaaatgttgcaaccgtagccgcagctgaaaaaatggcagccgaacacacccatattcactgtaaatttgaaatttcaatgtttaattaaagaggtttaaaattttaaattttatctaaaatattaaagtggtttaaaattttaaattttagctaaaataggaaatgttatgaaaataatcgcaaatatagatttatagatttatggagttatgaatatccagctctaagaaatattggatctgtagctgtgccaacaagagacttaacctatgcccaacacaccatgcaagctgtatctagatccacccataaaataatgtattgctacctatgagaattttcttgccaaataacaagataattgaagaaagggagtagctatacaatattagacaattgattatacaatattagacaattgattggtagaaaaatttaaatgtgacaatagtataattaaaatataattatattataaatttacaactatattataattacgttataacttacatatagcttgtatagaaaaaattgcatgtggccagttggttgttataacttagaccttgtttagttcccaaaacaaaaacttttcacccatcacatcgaatgtttggatacatgcatggagtattaagcctaattgcgccatgatttgataatgttgtgctacattaaacatttactaatgacagattaattagacttaataaatttatctcgcagtttcctggtagaatctgtagtttgttttgttattagactacgtttaatacttcaaatgtgtgttcgtatatctgatataacaaacaaacctaaaaattttccccaactaaacaagatattacatctatgcatccttcccaccacacttggcacaaaatttgttctccctaccccgccggaggtcgtggtcacggtgcattggaccatggagccgttcgttgtgcatgtcttgtcacattttccacatgcgttccctcggcttccccttaccatcaaagcgcgtgtattaggggacctaccaaatagcagcactcggttgatatttgtcaagctcccaaaaatagctcccttttatcatccactttggcgtttcagctataaccaccacaaaggtaccaatccttgcttttt

SEQ ID NO: 1419 - DNA, 1842 bp, Oryza sativa
aacaaatgatcacaacgcgcatatactcacttttataaatacacacgtacttcttactctcgtaagtatctttgaaagtttaagccggctatcttgtgattgataaagttaacacggacatcacaccgtcgacgggtaaagaataattaggcaatcgattgatctattaacaccacggttattagctgaagagaaattgtgaggcttggccgccttcccctcccataccaccactgcatctcggcatgtacatgttggtcacggtgatcccccctgatcctgactaacgataagtaactggaggagccacggactgaaagcgctatgcccaggatcatacgcggtcggcgattgtcctcgtctgcttgactagaggtagactaacggcctttttggtttccagggacttatttcaagtccctgtcacatcggatgtttagacactaatttagagtattaaacatacactacttacaaaacccattccataaccttggactaattcgcgagacgaatcttttgagtctaattacgccatgattttgacaatgtgatgctacagtaaacttttgataattatggattaattaggcttaaaaaattcgtctcgcggattagctctcatttataaaattagtttttttactagtctatgtttaatactccaaattagcgtccaaacatccgatgtgacatgggctaaaaagttttagccccatctaaataccccctaaaatgcagacaaagcatctcaacttcacacagcttggcctacgtagggatgacagggatagcaggcgacgtcagctgagctgagccaacggcatcgcatcagctgctggttagttgcactttcttaattattagatctgctcgttaattacctcggagagaggtagtactccagtatttctgaattgttttctgatcaaggtcagattcagtattcagagggaagaagtcttcccacaagtggagcagtacatggtaaaaatggactgaaatggtacagaagcatatggacaagagggaaaaaacgcttctggattgaccacctcgtttcgacaagcaccacaagttcagattctgaattcgcagtacaaaaaaaataagatcctctcctcaccttcctaccatctactaccaacaaaaaaactttactgtgttagtaaaggctatcaccaaagctacagttttctgtagcttcttcttcagcgaacacactcacgcacgcacgcaaatcaaagtcagactataccaaagctgattgccttgcatttgcagatcatcacaatctcacaggcaagccgtagttgtggaaagacctgatcacaccgtctcgacttgcagtcacgatcaccgtgttccaagcaggcgagatcgtggagagacagtcagacagtcgtggggcatcagcggcttttgcaggtggaagcttctcctccggccatgtcggagtacccttcatgccgtcagcgaaacaccgcgctgcgggggaacggcgttccccgtggcggtgcaaaatgggtgaactgacggattcttcagtcaggctggaagaattcttcacctgctgtctttcttgatgcagcccgggccatggtaccgcggttgtcacgtccttggagaagaatttctcacaggagcgaaccgatttagcttcgcctttatgatcggcgacacttggaatgtcaaagttccagatgtagacattggaatccaatccggcagatatgagatatcttccatctgatgttaaagatggtgaagaaagagccttcaaattccaaggccctgcatcagaaggtatataaaaggagatatcagtactgaggccacaaa

SEQ ID NO: 1420 - DNA, 3064 bp, Oryza sativa
aacatatgtttatggtacatgaaaccatgttgatagacattggacagaaattgtattttcagacaagcaatttgagtatgattaattgcgtatgctagcaatatagtaagatacaagagaaaaacttacatctgactctgaccatgccatatccaggatatcatctgtatggccttggaattcatgtaatggagtctctgaaatgcggaaacccttctttggcactactgcaagggcatgattcttccctcttcctagttccgttttgatgattgtaattttatcatcatagttctgagggttgtctcccccatgcaacttcgaagatgcttccacttccataatctgccatatccgtacaatgcagtcctcaccaccagttgccaaataccagcctgacgggctgaatttcatgactttaattaaacccttgtgagcttggatttcttgacccagatggacagcagaaaattccatagtttttttctttcgatgttgaacttttgttctggatggtatgcctattgtgcagttttttacattgacgtcgtgcttgcaaattccaccaaaactcctgtttttcatgaagctcttccacaagctcttgacaccctttttcttattaaacacattctttttctcttccatagaactgctatacaccttgcgcaacaacttttgaacagattgagaaaggcctggtacgccatcaaactccagaagagacaccaccttatgtgatgccacatccttaagcatgctagtcaattcgccgtatccatcattctgaactgtgtatctctcgccactgtcaatatctcctatgcaacaggaggcatcagaaactgattcattctcaggaacagatgaattcacggaagaaatgtcactggtagtactctcctccaaccccaagtcagcgaaaggaccaacagttgtgatttctccctgtggttgagaaaaatccactctggtagcaagaaattcatcaaaccccattcccttcaggaacctttgccgcctttcttcaacactcattggctcgtttccccaaatatcatactcaaatctccttgatgctaatccttcgtcacttgtgctgcaatcatctgacaatgaaggctcccttgttgaagtaacatcatcaaatgcatcaaagaagatatcatccctgtctgattcggaacttggcatatctaaccgaaatacttctagcccaagaaaaagaatcaacacagaggggggttctctcaccctctgtgaagttagcacgcggtgctcaaaatgtcatctgcaattggcaacacaggtaatcagcctcgtgatatatatatagcaaacaacaacattacctcctaatgtacaacaatatggactacatggacataaaagataattgcaaatttaaccatttacagagcacaactaatacaaaatgcaaacagtgaaacagaagaagcatctaattaccaagaaaaacaaacaagaacaaagcacaggatgctccttgcctctccccacgccaactgttccctgaaccaataactcaccaaccacgcacgcaaaacccaacctcggggatcccacccaacatgaggagcaggaacaggaacaggagagcccaaccccaaccccaagaacccacacgggggcgcagatcccaagtaaccgagacaaagcaacagctaaaaacagcgcagaaaggctaaaaagggacaaaagtaaaagagagttctttgattctttcgactagggggcggctggcaccgtaaaaactgctgctaccgcgcagtgccggtgcttggctggctggcagcacgggcccacctgtcagcgacgtgcgcagccgccgcgcgccggctatcctacctctacgccgatggccacgcaggctcagggcgtaggcgagtagttggccattaaaaccgcgtcctttattaaggtgttcaaagagagagaggaaaaaaaaaaggtttttttttctgtccaacaacgaaattctgtggcagaaatgcaggcctaaaacaaaaggaagaaattttgactcttcgctttccttgtttttccccttcaataaaatgatttaggagtacactgaacctgcaatcagacggattaaagtttcgcacttttcaaaatcatttagcattaattgagtgctataaatctggcggctgtagcaaaatgaaaacatgaacagaaaagggattgctgatttgctggggttgaaagaacattaaagattctcgactatgcgcgccattaaaaggaacaaaaatccgatcatcgtggcgataaagcgatccgagagagttaaaagctcacccgttttcgtaccgacagaaatgaaaatttgaaactttccctctattaaaacgaccggaattttcggtggtgggcgagtgctttgttctcgggggaactccacaaatcctcggctaaatttgcgcagcagaatacaaaaaattcatgcctagaaaaatccaaattcccataaaaagaaccgagaaaaaaatgatgaaaacaatccgcgaattcctaatcggctattcgtgtctcccctcgaactgttccattaaaacaggaaaccaaaccagagagaccaaatcactgcgccattccaaacgctaaaaccacacgaatcgatcctaaacggaaacaaacttagtactactagaaaagattaagaaaacccgaatcccatcgtcaccttgttcgtcgtcgtcgtcggtggttcactccacggaggcggcaggaagaacaaccgccgccgccgttcgtctccacccgcgccgcagcgccatgcccaaccaggtgtagaggaggaggaggggacacagagggggggggggggaaatggtggggagagagtgggatctctcgctcctgcgcgagcgagcgagagagagagagggcttgggatttgggattctgcttggacgcgtccacctcgcctcgcctctcctctcctagtggccttcgttttcttggcgtttcgttgtaaaccggagagagctttgtatccctaatgctgatgatatgctaatatgctaatcccaaccaa

SEQ ID NO: 1421 - DNA, 677 bp, Oryza sativa
attcctgcagccctctgtttagctttaggaatcaactgaaaagcctcggtatcaatcatcaatgtgattcaagaattaagcaagattccagagatggaatgagataaagaggaagctcaccgtaagctctattgggatcaaaagccttgtagtcctcgacatgtaatgtgacggggaagtacccaatcacgcacttgctgatgaacctgaggatgcgtcgtcctccaaaatgtaagatccaacaatgcggtcaggtaaaaaaacgttggcagccgaggaaatcgaggagacgaacctggcgatcttgcgccccaacctgctcatatcattgaccggcgcgaacatgaagaagagctgcgtggcgagcaccctggataatacagcgcggagaggcgagagtgagacccaagtacccaacccgtcaacggcgagcagagcgcgaggtagggaaaagaagctggaggagagatttgggtaagaggttacatggcggcgacgcggcgggggaagaggaagagcgaggcgaggaggaggaaggcgttgaagtggatggcccccagccacagcgccagcgcaaccgtggtgcgcaccggcggctgcgccgtcccccggaacaccgtggtcccgtcgtccgccatcaccgccgcctcgccggcgccggcaccgccgccgccgta

SEQ ID NO: 1422 - DNA, 1670 bp, Oryza sativa
tcctgcacccctatggattctagactcgtcttccaatatttcttatttttaattcggaaatttcattgtttgtaaattgtattactatatagactctaggctcttcttcctatattatttatttttaattctgaatttttattatttctaattgtatttctatgtggactctaaactcatctttcaatattctttaatttttaatttcgaattacagttacatctaaatggtattcttatatggattctctacttttaattttattatgtttatttcgaattttagttagttttaaattcctatatggactctatactctatttctaatattccttatttttaattccgaatttatattattttttaattgtatttctataagtatttcttatttttaattccaaatttctattatttcttaattgtatttctatatggactctatacccttcttctaatattctttattttttaattccgaatttcagttatttataaattgtatttctatatggagtctagtctcctctttcaatattccttattttttaattccgaatttcaactatttaaaaattgtatttctacatggactctgtttttctatttcttcaattaatatgataatttctaggccgtgagagcgaacatggatgctcctttttctgttcctttaataagttaatagatttaaaatgtatgtatcacggagcaaatgtagattgttattacatgagaacaacgctctacatttttagttgcttcctccatcccagaatataagaaattttagagttagacacggttattaaaaaagtagatagaagtgaatggtggagggttgtgattgaatgagtagtgaagataggtgggaaaagtgaatggtgaaggttgtgattgagtgggaagagaatattgctagaaaagttgttatattttgggacaaatccggagagctaaaagttattatattttgagacggagggagtatgtcttgctaatgttatccttgctctatgtccgaacagcaagcagatgggaaacctcacggcctcaccaaacctagtaacctaatccctccgtcccataatataatgattttgagttttttattgcactctttgaccactcatcttatttaaaaaatttatgtaaatataaaacccgaaaaattgtgcttaaaatactctggataataaagtaagtcacaaaaaataaataataaatctaaaattttttgaataagacgagcggtcaaacagttcaaacaaaaactcaaaatcctttatattatgggctggagggagtaccatggttccacccacctccttggttcaaagagaactatgatgaatatataggtcaacgaagaccttaagcaccaagggacaagcaaccagaagcgacacggcggggaaggcgagcgccacgccggcgacgcagaactcaaggagagctccgtcgatctcgggcatgtaaaccgggttcgccagacggctgaggctcgagagaactgccatcaggagcacgagcatggcggccttgaggtacacgctgtagtggttggtcccgaggaacgccgcgtacagcccggccatgagcgtgaacccggcggtggcgacaatccggaagacaaattcgatccatggccggctcccgactcctcccc

SEQ ID NO: 1423 - DNA, 697 bp, Oryza sativa
attcctgcagccccgtactggtttacgttaatacgtacgcgtgcgtgcagggttccaccactcgccaagacgatcgagccagcaacacgtacctagctacgaaaacgaactctcgccgatggttgatctgtcaggcctcgagatattcctcgccgtcgtcgcgctcatcgccgcgatctgtgccatctcctggaccgtgcgatgcttaatcggccggcggttcgaggtcgccaccggcgatcccaacggggagcgccaagggttgctgaacaaggaggaggtcgtcatcatcgacgtcgccgccgccacggaggcgaggggcgacgacgtggcgctctgcgcgatctgcaaggggaggctcgcggtcgcggtcgcggacggcgggggacagccgtgccggcggctgcggccgtgtgggcacgtctaccacgcggagtgcatcggcctgtggctgcagagggggacgacgtgcccggtgtgccgcgccgacgtcgttgcctcgcggaacgaaatcgtcggcgcgatggcgtgagagccgcgcgcacggggcgcggatgcgtgcgaccggggggcctgggtcgagcgccgcgttgcagggttgcacagggtaacatcaaaatttatgtttccatgttgtgtttctcttccggagatcttttttttgtacgtgcacaaaattggaacggagattaagctc

SEQ ID NO: 1424 - DNA, 1095 bp, Oryza sativa
agtgcgtgcaacccaccgtgtcgcgaatcatgtccgcttcgccagcggggggcgagtctggccgctggtcccaatcgtcgcaatcactccggggggcgcccatgggccagtgctggcggctgctcctgccccgggacccatcaaccaccccctatgatagcaaaagtgccaaactgcgcgtcccagttgcttgcttctgttacattggatcatggagtagtagacgaccatggacgggggtccattcggtaagttaaatcggaacaaaggcgttgctttccttcccataccaaatacgagtagtggttcagacgtcataaaggtgaaggaaaaatccgggtatccttacgaatggcagtacagaaatgtgcatgtgaaaaatactttctatcttcgtttatctttcgagaaaagaaagggcgcaatttgagttggaattggaggggattacattggactgaagctcgtatgcacagttgatcaaacactcaccattatctctcggagcaaagaatcttgacagcctaaaaaagactctgtacagcaagaaggggggaaaaattatgtttctgaacttatcctacgaggcaagttgtgattggttttcacgaagccatcatggcagggggcaccacggtggcaacggggcaaccgccgcctcgctccccgtcggcggcggaggcggctgcccaccgccggcatatccggccgagcgaggcggccttccgccgggcgcgctccgtgccgatgctcatcagctcccagatcgcccattccacgccgggcacggccatgacctgggtcaccgccggcgcgcccaggcgccggcagagcagcacgagcgccgccgtggcgttctccctggcccagtccgtgccgcgcctcatttccgccacgagacgcgccacggcgccgtcgatgttgacgatcgcctccgcaccgccgcgcttggccagcgcggcgagcaccgccgcggcggtctcctccttgctaatcgctgacagcgccacctcggcgacgcctgcgtcaacgagcttgccgacgttctccctctcgccggccagcgtcagcagcgcggccaatgcgtccttcttt

SEQ ID NO: 1425 - DNA, 675 bp, Oryza sativa
gagtcacgtcgcattacttggtgacctcgtcgactagctggatcggcgtccgatgggtcgatctctagcggggagcgatgaatttagggcgaattcagggaagggggatttgggtttaaggtgtttggttgcttggtggagaggtgggttgtcatggtcgccgtcagcctcatgttcaccgcctccttcttcatgtatggcgggtccaggcagtcacaaacgtgtggctggtagctaggcacactggggctgtggatggcacctgggtccatcaccacggtgtaggtcatcgacgccggtagtagcagcaaggtgacgtctaatgcggccacccagtccatcgcaacaacgggacacaatagggcttgctgcttgggaggacgaggcgcttggacagcttgaggccatccaccaccgccaccctgaagtctaacacaacttgtagccttcacatgctcttcggtctctgtctcctactacctctgtttcaggttataagaagttttaactttggttaaagtcaaactgtttcaaatttgactaagtttgtagaaaaaataataacattttcaacccaaaacatttttttatgaaaatatatttaattattgatttaatgaaactaatttggtattataaatattactatatgtgtctataaacttagtcaaattt

SEQ ID NO: 1426 - DNA, 877 bp, Oryza sativa
cagtggaagacgatgtcatgatcgccaatgtctcggtcacagatgacatagcgctcagcgctgccttgagaacatcctgcgagcacccaggcttcacgatgcttttcacctgcgcagcaacaacagttagaatagacaccaacatgtgccatttgtccacaggaattcagattgttcgatacgaagatcgatcaattattgggattatggaaagtaccttctccaagtattcctggagtttcttgatcctgcccatatagtcttgatcttccacgcacagtgaaataggctttgaatcagcacctgctccttcgaattggagtggtcctgggtttctgtagatgtcgtcgattaagaagctggtagaattgttcctcaatagcctgtaaacacaagtttgttattgtcaatgagattatgcatcttctttagaccaatgacagcaactgtacagcgatcgaatataagatgggattaatagattgtgtacacacttactcgaatgctttgcctttcaagtcgacagtagccatatggacagcaggtttccctatttgagtagccgcaggaccacgtgaccatctcttcacggtcatcatagactaaagggaaaagaattgtgggttaggtgttcccttcattcatatcatactcatctaattttgccaaaagggggtgcacagtagtaatctcaccgaaatcggagccgcaccacatcgccatttgttcgcaggactcttaagatttgtcacagtagccatgtaaccattcaaaccagcagctaagatgtggtagcacacgtgcccaagaacctgaagccaaacaacatacatataattaatcaacagcaaaataaattgctttgtccaagtagaaa

SEQ ID NO: 1427 - DNA, 918 bp, Oryza sativa
atgcagcatgctcacttgtgtgagggagctgtagtcagtagtacttgttgatggctgcccggcaggatacaccggcggagacgccgacgagatcaccggcgctccggccaactcttgcccttgcccgccggcgtccgccactgacaccacgtccctcgcgtgcatcgatggaggaggaggaggagcggcgaagccggcggtgatatggacttggacgtcgtccatgaggccggtggcggcgccggcctgccggtacctgcgcttgaagatctcggccctgaccgcttccagctcggcctccagcgcgttcacctgctgctgcagcatcgagatggcgcccatgcagccgtacacggggtcgcgcagccgcagattcgcctcgtacaccaggctgctcgccgcgtcggctctctccgcctcgccgacctcctgaaaccgcattgcaccgacgaagccattaatgcacaagctagcgaaaggtacaatttaaggaatgctttgacctgtaatggtatcgtaccaggagcatcttggagacgttgctggcgccgaagaccttgtggacggcggcgaacttgtggggctcgtgcggcgagaagtagggggcgaaggggcactcctgcgcgcagcgccggcggaggagcttgcacgcggcgcacggggtcacggtgttcacggcgccgccgaggccgaggcgatgggggacgcggtgctcgatcggcgtggctgtaccggtgccggtgcctgcgacggcggcgactacgacgccggcggtgtccggctctcgcttgatcttcttgccgatctcatcgagtctttccctggcggaaattggaaagggccgaagaaggtttttagggtttcttgcatggattcaggagagggaccagatgcaaaacacaatgcgggctgcaggaa

SEQ ID NO: 1428 - DNA, 1271 bp, Oryza sativa
caggagtggactgacgtgggtggcaagttcattagccaaccccgcgcctgcccctttagggccatgggaaagaaattcgccatgaccctgtcgtcacccccggcggcctcaatcccggtcgtgtagacctggagaaactcggcggggttgacgctgccatcatatttttcggcgatggtgggccggaaccttgggggccaacggacattccgaagactcgccacaaaggctctacagccgacaccaccaaccgggggcacggagggctgattcccgcgtccgtgttgaggtgacactctggacgaggaagcgccctccgttgcgtgggtagcacgtcgatcattacgccgccgctcgatgctggtgcgggcgtccggccccccacgcagatcttcccgggttgaaggagtcgacgaaggagtggtggccgaatggcgaacggcagctgccgctcgccgcgcccttcgtcttgacgacgcggagccggtggtagcagcaccagaggccttggtggcggaggaccgcccaccagcatctagacgctgccttgcagtcatgaccaatttggccacatcgtccagccaacgttgggctggagactccgggtcatgggcgacgggcgggtgacgtaggagcgcgcccgcagcttggagcgcgccctggggcgtgctgccgtcaccgtagacgaggaggcgacgctccccatctcgccgtttttctccatcgcccgcaatcggtgaagtcgcggatctttcgaccctctcgagtgcctccccccgcttaggactttggcgtggagggggcggtggagtacgagctcgacggcgtgggttcggctccccgtcgtcaccactcggcagggcggctgttccccgggcccctgtcgcgggacccagaagcacgaccccctcccggggtagattgttccccctgcggctcccgcctgcgccgtcgtggccctttggagctcgctcctctgaggccccgaccgccatcataatggtcaggatggagacgcggtctggatcgctgcagagggggaggattccttggggaatgagggacgcctccacggagttgagattcagcacccgttggaccaatatcttgaagtcctcaggagcccagtcccatctcactccctggtgggtcctcatgaagtcttcggacccggtgtactcccaggcgccccgagcgcgccgctggagcggcgcaatccgacgacggaggtagtcgccgtacaccatggcccctgtgagcccctgggatcg

SEQ ID NO: 1429 - DNA, 562 bp, Oryza sativa
cattttagcctttattagatgcaagaagagacagttcgcttgtgttgctgaaatgccaaactgcatcatgtgataatagagcccacaatgaactgtacgatgtacagaacatttgctttgtgagctctacattgtgcttctcaacaatgggtgtgtttagttcgcgctaaaattgaaagtttggttgaaattggaacgatgcgacggaaaagttggaagtttatgtgtgtaggaaagttttgatgtgatggaaaagttggaagtttgaagaaaaagtttggaactaaacaaggccaatataagaaactaaagcctaaagcctaacaattaaaaatgattgtcccatagtccataagagaatttctggagatgtaaatcctagcaagtttcttgtgctacattgctcattatatgatagttcacaatatcaactaggaaagaggttaatctagtttttacgtaaccttttcgccgctgtcattgccgacaacccggatttccagaccaacagatgctgcttcaggtgctagcgggatctcatcatacttaaggaacttgatag

SEQ ID NO: 1430 - DNA, 1079 bp, Oryza sativa
tacacggcatggattttctatggtctgacaagttaatttgatttgcaatgaagtatggagcacttcggaggaagatcggtggcacctacaaggatttcttcaagtcatatgtggatggtactacctcatatatgctttacttgcagaatcctaaaattacttctgatccaaaaagattatactagtaggagtatcgcacagtcctaactgtttctgaattctgcttgcagttgacggggaatacgtagaggaaggttgggtggataagacctgcaaagtttgcaagaaggacactagaggggaacccaggcaggtcgacaagctaggaagatatgcacatgtcgcatgcttggagaacccaaaaccgaccaacatcttcgccaaattgttcgccagatgaacttcaattgtacaatcaaagacatatttttactcatgcttagatacatagatggtgttgtagccccaagaatttgaacaatattatgtgttcagttttgccatataaaatggtatacagggagcatgtcacacattttccttcttcaattgatccatttactcacgaacaaagcaatgacttaacagacctgaacgactgaaaatgttaaatattacatcaagtattacagagcaagttaatacactaatctatctattagcttatgcccctggtctaatataagaggagctcagcacaaactcaagtcaaaagaaatgctatatagagctaactggttatatgatgctgcttacctaattctgtagctatatgacgtgttcagaagtttctttcgttgaccatggacagatacaccctgcatctgatgtcagtgcatccaatcttaaaccccggcattactgtaaacccaacactgaccttgtctccttctttggttatcttggatggaacacattccatgtgtttatcgtaattcagtaccacccttgacatagaacatctctgctcttggattcagagaacgtgctacggttagggacgcccatacatatcttgacattgtcacaaatgcctgataggatggtgttgttgcgatgaccgccattctcaacaaatg

SEQ ID NO: 1431 - DNA, 643 bp, Oryza sativa
cacacgcggtaatctacgcgttcagggggggcatgcggcacaaccgcatgctcgaaaagatcgcctccaaggagccccagactaccgcggagctttttcagctcgcggaccgagtggtcgcaaggaggaggcctggacttggaacccctccggttccggtgtggcagcttcggccgcccctggatccgccgctcagacagggcggcgtgacaggaggaggaagaagaggtcagtccattccgatgacgagggtcatgtcctcgccgtcgagggcgcttcgcgggccacccaaaaggggaggcctgcgagcgacaaaaagaaaaaggccggcgctcccagcagggagcgcccagccggcaagtggtgcaccgtccacaacacctccctccacgacctcgtggactgccgtgcggtcaaaagtttggctgagcgaacgaggaagtgggaggaggagaggaggcaggagcgccgagagggcaagtccccggcggttccttccggcaatcggcgaagtgaggccaagcagaaggcccccgccgaggacatcgatgacggcgatgatggcctaggtttccaagagcctggggccaccattgccactgtcgatgggggagcgtgtgctcacgtttctcgccggagcctc

SEQ ID NO: 1432 - DNA, 1335 bp, Oryza sativa
atctgaatgatgtgctcatacaatatcgatattaaaatataatgatacccattttaaaaataatgacattaaagtagttctcgtgacaaatatactcttataattttttgcatgacatatttgaatatttttatgtatataataatggccaaaatttctaagtctgactgtatgcattctagaatgaaatctatttgagaatagtatatgtttaattcaaattggtgatgttcatgcatcttctgaaatatcgggcatgttttagtttgatgccgaaaccagccttatcaaattttgttaatgccacaccttatttatttatttttttgggtaaggtaggtatgtggtggtacgtttagtttgaaacctcatctatttgggtgtgatgttaggtcaggaagtttattagctaccaaatattggtatggaaaggtaggtatggttggtttgttgccttgctaaaattggtaaggttagaaatggtagcaaaccaagcatgcccattatccgtgattttgtcttatagttcaattgcttttatccaatagaggttcactaattttccttttactctctctgtcattttaatgtaatcatatgtttctataggctgcatctggtaccaaaagtggctctagtggttcccctgttgttgattgtcaaggaagagctgtcgccctgaatgctggaagtaaatcttccagtgcttctgcgtttttccttccattagaacgtgtaagttgtttacaaaatgttcattgaaactagctaaatgcatgtgctttgctacggataaaagaaaacgtataatgtgttacccatcttttttgctatagggaatattcatcttactctaatttaatgtggctatccatttagatttgatattttttaatattaagaagttcagggattaacttgcaaaatttacaatgggagtaggtggggtgacagattcattgccaccaccactaccttcttttaaaggagtatagatatactacttttagcccaggaagcttatgcttttgttctaaaattgcaaggtctcttatttaataagaccaacgaagtggtcctgctagttgaaattgatacgagtcataaaagcacacatgcaattaggttaacatctatactagacatcacaagaagagagagagagagatagaaagaaaaatataatttggcattgaccgacatccgagttcatacaaaaaggaatagcattgctgtttaatattgattaattgtaaggtctcttattgacaggaacaacgaagtggtcctgctagttcaaaatgatgtcattataaagcgcagggctgcaggaat

SEQ ID NO: 1433 - DNA, 1077 bp, Oryza sativa
acttcaagggattaaagcacgtgtttttgaccggctaaaaccctatgccggcaaatgggtgcaacaattgccatcagtactttggtctttgcgaactacacccagtcgggccacaggccagtcaccttttttccttgtctatggggcagaagcaatgttgccgagtgaggttgaatttgagtctttgtgctttcgaaatttccgtgaagaacgctacgaagaggaccgagtggatgacttgcaccgattggaagaagcccgcgaagcagctttaattcagtcagctcggtacttacaagggttgcgacgttatcataatcgcaatgttcgatctcgtgcctttctagtcggcgacctggttttacggaaaatccaagccacacgagatcggcacaagttatctcctctatgggaagggccattcattatctctgaagttacccggccaggttcatatcgactcaagcgcgaagacggcactctcgttgacaactcttggaacattgaacatcttcgtcgtttctacgcttaacttcatcattgtatttccctattttgactgtcaacatcaagttttcttcttgccgttgtcagtcgggggctatcatcataataatggagtatgattttttatcaattcagtttgcttacttggtttatcattgccttgtttggtttttctacttagtttgcgaggactgaaagtttttaatagcttctttgggttttaggctcaaccaagcttagcaaaaacttttaagaaatcaaaaacttcgcaagaatcatcaagcacagcataaatacaccagtattgtacaaattgagcctccatgtattacatccaaactcaatcagagtcagtcctttcgtcatcagagtcatcattactcggctggaggtcgttgttgcgaaattgttccacaacatcactcgcaattttgtcagccgcagtttgcgcactactgataagatctagggcagcttcttcacttgtcccgtctgcaaacccatcaatggtgtcgacttcaattctcgggtacaaggattttgtcatcgccaaggccatgccagctccca

SEQ ID NO: 1434 - DNA, 1174 bp, Oryza sativa
tgatgagcacatagccacacgtttgtagcgatttttctttgtttgattgaaggatataattaattaatccagtagccttttgcaatgatgtgtatctgattatctgatacgtacatttgtggttgtggttaacgtctcaagtctctcgcaacgaccatgcttacgttgatggcgatgcatggctgcctattggggactcttgaggaatatcttcttattgttattgtatatatactcacatagttataaaaaagtttaaaaggatgtattaacatgtaatatatcactttataaatatataatttaaaatttaacttgtacatctcgcaactaaaaacaaactaacaaactatagttggatctttttttgctgagatgagctaaagcatcattttttttccttcacttttttcttcataaaaaacaaactaaagatgttactccgataatttccaacgagacatagtccccattggttggcaagagcttagcggcaaaaataattaatgaaatttttttatatatccattacttatcgacttaaaagctaaataaaaaaaaactacattgagaaaactttgaaattaaatttaaaattttatagcgataggtcaaatgatgaggccctcgtcactaagcagtgggctgcttggacgtgatgcattcttccacgaacgccctgatttcaccaacgagcttccggtgatcgtcggcgaggaactccgggaagaagtagaaggagtggatggcctccgggaactccaccacccgcgccgccttccccttccgccgcagcatggcggcgtaccgccggtcccagtcctgcagcgggtcgagccccccgacgaccaccatcgccggcgggaacgcctcgtgcagttcggcgtcgtcgtcgtcgtctccggtgacgacgtgcgccgccgggtggttccggtcggccccctccggcaggaacgccttccacgacaggtccgaccgccgcgtgttcagcaccggcgccacgccgtcgagcgcgcgctcggattccgtccgctcctcgccgctgaagcacggctgtatgagtatcacgccggccaggtggacgacggggttatcggtcgtcgtcctcctcgtcctcgccgtggccgtccatcgctgggccacctggtgcgcgatgttgccgccggcgctgtct

SEQ ID NO: 1435 - DNA, 1719 bp, Oryza sativa
taaatgtagaaaaaaaaatcactcacacagattgcgtgtaaattgcgagacgaatcttttaaacctaattgcgccataatttgacagagtggtgctatagtaaacatttgctaatgactgattaattaggtttaataaattcgcctcgcggtttacaggtggaatatgcattttgttttattattagactacgtttaatacttcaaatgtgtgtctatatattcgatgtggcacataaagccaaaacttttttttttactaactaaacagggcctcagtgcaggacatgggggcaaaaagttggaggaagggaggtgacccgcgtccgcaccaattccatggggtgcggagaagaggcacggaacgccggcagtttcgggagaggtgcctgcaggttaaaggtgagccccacaggtgggctcttcctgttggcgacacgaaagaaggagggacgtcaattcgacttagaggaaaagggaggaggctagcgggcttgaggcccactagggagggacgaagccggccgggagaagagagaaggggacgggcccaagggaggcgaagtggacttagtccaaatggcccaaatagaaagaaggagatttttatttgtttttcaatttaattaattgattaagtgatgtttgtgcttttaaaaatacttcttgacctccaaaaatccacgggaaattctagagactattttagggcatggagaatattacaaaaatatttccagccatgattttaaaagtaaattttatttccctcattaaattcacctgttaaattgcttttaattttaatttaatttctagaaaataaattattaaatgatttttaatcccgaacgaaaattggggtgtgatgctatggcagcagcagcccattcaattccctggtaatccctctcaaaatatttagaggcaagctaggaattgagcaggcaattgaattgattagactttaagatcaccaggttattattcagcagcccttatctatcataacatgaactgcgaaacaatgaggactgaatctaaaggtcgactataaactgtgcatatctacatttgtgaaaagtaaatttcaagatttcacaacactgagccacgtcatgtattaattcatagccattggattaagaagcaaagaaaaggtggaatggatattaaccgtccgatgtaaaaggaggaagtcggtcaaacaattccacatcattttatcatctggagtcctccacagataacagattagcgggagagaaaaaagaatgaggaacagctacagcaatggaaaggaaaaggagggctgtggaagtgtagaggtacaatgggggaatggggatgtaatgacctttttgcattttagtcctataataaaatataatctacaaactaaccccataagttacaaaatgcatatatgtcaatgttattaaataattaggcatattctagagatataaattaatacctaagacatttagtacaacatattattataagaaatttggtagaatgcgcagatacatacgcataatatagaaaaaaatgataacatgatatatatgcatataggaaaatttataattttgttttttacgataaattccataggtttaatgtagccagagtaaataatttattatcattattcgattcatttatcatggatcaaaataaatttctctgtgtcatatctagacttcctatcaaa

SEQ ID NO: 1436 - DNA, 1362 bp, Oryza sativa
  unsure (1)..(1362): unsure at all n locations
cgattggttatgctgctcaactgtagtgtaagattactcaaattcggatggaagatggtaaatcaaatgattcgaaatggaaattgggtgactagtagcgcttaggtcgatcttaatcttgtaagttcagtttaacccagaactgtaatgagttgcggaaggattttgtgcaatttaaatctattcaatcagtgaatctcgcttgccatagtgtactattcagtggcagtggcacggatgatttagatggtgcaattagaggtggttttggcatgacatttcttttctttgtccctgttgcggctagagcagctagaatacgtncnaatattgttcagctttagagaatagtttccgtttcatattgtaagactttcgagcgttgtgtagaatcatatagatgttaatgaatccagacacatatagatacctagattcattaacatctatatgaatgtgggaaatgctagaaagtcttacattgtgaaacgggggaagtagcaaagaagatgaccaggactcttaattaattcggagtctggtattatagagttattgtttcagtaggatatgaagaatgcagcatttagagttattttgttgtctggttcttatcttatcatccctataatagtactaccacgagatggtctgtattcaaatttatcaggttgattccagcagctaagtaaaagcaaacttcatagggcaattgcgcctttgcatttgcatcacatattcacatggcaacccttaaaatgtatgtatgtctgtacttatatgttgcggtgggtanacttaggaagtagtcagctgctctatacttccatattgcatatgtgaattaaaagatctgtcatgtcataagtaatcggttttgtttgttctttggttatattagcatcacgggtgtgcatccaattaatattgattactgccttcaactgtaacatatgttcatggctgaattgctgcaatcaaacatcatctattttacaagtgacaggagatgttacaacgaattctgtttacttgatgtgcttctcatctacacagcccagaattatatttgaatttaacttctttgcaagtctcttctttatgtatttgattttctagtttcttatgtaacatatactgataccaaactttcttgacatcataggaagcagatggaatccggccttttacaatgcctcttatgaagcttgcttgcactgcactggaacgagttccattgacacgaaaaaaaataattgataatttgatgaagaaattccaccaagatttggtattctgccgttcacctgatgataatgagctgactgtaggagtttatcgtaagttgtttcctcttgactg

SEQ ID NO: 1437 - DNA, 556 bp, Oryza sativa
catgcctgccattcttcctcacaacaattgaggttttgggttaaacagttccactgcaagaaactccacaactccctgaaaactttgtcggcgatgttcactgtttgcttcatctgcattgtttactacccgtacaacttgtgttaggacatggtttgtctcctcctgctctttgtttgcatgcatcgggagcctcttaagaacatggataagcccgcgtacaactctaacctggaaaatgcatagggtatccacagacactttaccaaccagcgctccaaggcccattacaccacccatctgagcttgccatgtgctaccataacaacaatgcaacaggcgtggcaataattcctcaaatactgcaacccgcacacttggaggaggagaataaactggattcaaagatggactagaaactaacatgggggtactaggaccacctcttagcataccagtatgcttcatgcgagcaagaaagagtagtgtctcaccaaaagtatttaaagcagacagagcagcttttgcatgttgacgattttcacttgagagtact

SEQ ID NO: 1438 - DNA, 2712 bp, Oryza sativa
gcagcagaacacatggcagacacaatgagaccttcaacaccgaaattgagaagaaagcttgcatattgcgtgtcagccaaaagggaactagctcattgaactcaatcattccatttggatcataagctgcagataagcaaatgtgagtaataataatttcacgtgcattatttacaattactggtaataatcaagaagagtacctggatggaaatcattctggaagatcttgccagtatttttagcaaataatattttgttaggagccctaccaccaatctgcaacatgtacgacatgaaacaggacagagccacttggattgcaaactgtttcttgaaggtccagaggtgattcccagttggtagaatcttatgcatgtattgagagaagatattatcattaacgatatttttagtaatttcattataggcttgcaagcgtaattccaccactgcttcaggggacacctgccctgagatggcttgatttagctgttctttgaaaattgtaataggtgaatcagcttctctattatgtcgggcacagttaatttcatacacctccaggaaagtgctgtacatcaaatcatcctctaccatccgaacctggatcaagggaaattaaacataaggccaggatattaccttggaagctgaaataaaacagctaaacatgattattatcaggtatggaagaatggaaggtatttcacctgtgaccaaacaggaataatgattggggtgtgaatagcaagatggcgctgcctcgactctttatgtttgtcaaacattttgtttagtacacggaatagctgcagcattctctcatcactccgggcatttggagtcaatgatgtctgaacaataaaatggcgctgtgaaccatcagagccaataagtgtcagacgtcggaagctactaccgtgcctccggacaataggaatatcaggtccaactctgtccaacttgacagtatgatcaggtgcaacctcctgcaaaagacaagtaaaacttaaaactagcacatagagaggtgaggaaccgtgcgagaagcataaaactttcacaagactggctaaccatccatatggtaagagataatgatgagtgacatattgacttcaatactgaggataaaaggtaatcactgtgaccaacctgatctgtgaagtactgcccgggaagttctatatcaacaacatggaagtccctgagaattttactttcttcctctagctttaaaattgcagggaaccgatcctcaacattactctgaagaacattcttccagtgcttcaatctctcagtgagttcagcaagtgttgctggaaaagtagtagcactttctgggtcaagatcacgttcaaaatcttgcttgtactccttgacaaaatcaacatgcttgttaacagcatcttgtgaaaagcaagctcggcatacaccagaaagttccttcttgagagattgtggaacctcgcctgtagttgcagttggatacttgtagcagcggtgaagcaatgcattaaccacagcaagaagtctttcctcgggaagagtaacaaatcttgatccaatttcagacagtaaaacctgaaaccagcaaaaataaaaatattagcatacttagaaacacaaacaacgaaagttctagcactagattgttgtttcttcatgtagatttcttcaagattctgtaatcccaacaattcaaatcaaatagtccctccagtcccattacaaacaatattagatttgttgtcttgtttgaaaatataaggcatacatttaaatttagtgcaagcctttcccccaagtctaaaagtatcccatcctctcttggactcctttaaacatttatgcttgacaaccaacacataccaccattttcgaagcacttaatggaagggcaataaagtcattctcttatggattcctacttcactttttgtccctggccaaaatatgccttactataggaaccaaagggcactgaatatgcatggaattctgttctcttaaatgccagctttgctacaaaataaaattcctggcaagcatgctaaaaatttctattgaaaaaaaggaatgggcaaagaaagaaatggcttattctataccattgtcatacacgttggcctgtatgtatggtaagactctaatttaataaaaaagtaatggtcgtagtcatctccaatttcctaaaggtttataaaccactttgttattacttcttacctcaagctcattggctagattggtatgcttgctcctaagagcttccattatatcctttgcagcatcaaatgcacttgctgcagaagttacccagccaagtccattattgcgtcttgctggcatttgcgaaccatctgcaccagtgaactcggttgaccttgatcatggccagcgcttgtaccaccctcaacattagatctgtctgactcttgtccttggagattacccccatcatgagaaactgccgcaccacctgactgggtagcttgatgaacttggttgtcagaagtcatgttcccacccccaagattagatgtcctcgcgttcccttcagataagttattggcagcattgtttgccagcatagcctgctgcatacgctgctgagctattcttcccatttcagtttttgtagcaacatcacgacgttccatcaagtatgtccgaagccaataatacaatgcctgcaagaaaacc

SEQ ID NO: 1439 - DNA, 4084 bp, Oryza sativa
agaaaattggagtcattcctgcaataatcctacaaaatcctatctcataaacaatctaattaaatctctcttttttatatacaatgttcttgtcaacttttattgtttaatgaaaagaagatttttattttgattaaacatgctaccaagaaggcgtagttcaaaaagcgtcgcccgctcccgcgtcgtcctccctcatgggcgacacgggaggcggaaaccgccggcgccgcctgctcccccccccccctcctccttccgccgcatcgccgctgcccaagcggccatcggcaaagccgcgcggccgcaaggacggcggcggcggggcttcgtcatcttcgtctccctctcccgtcggcggtggagggccgcgcagtagacagtgaagaccgcccagatccgggccgccgcggccggatctggtggggaggccaccggcggagggtcggcgtgaggtggcggcggcagccggcagttggtggtggtggtggcagggattgaaggtggtggggcggcggctgcagttggtggtggatccaccaaattaaatgaaaattgatggctagatgttttgcttttttcttagaatttgtaagatttattaaagcggcacgtggcaatctaggagcgtttgtaggagtctcacgtggtggctttagagtgtttatagggagtttaatggacttttagtatataatagatagattcattatcaacacatttgcataaggatgtttatttagaaagaatttagcatacaaactgtgtatatactcatacagctggtggtctgatctgatgatgggagcagcaacaaataaatctataggtagacgaagctaggagcatcagatcaccttgtcaattggctgatcatttgtctccctgaccaaagatgtcacatcttcactgaaatttgcatcgacaataatgaatagtgtttggtactccctccgtcttaaaatataagcgttcatagctaaaaatacttatattttagaacggatggagtatatattatacgaccatggatggatgcatcatacgtagcactcgtagagcttgatgtccatctgcagcctgaagtaggtgaagccctcgaaagcgtcggtgcggagggtggcgacgccgcgcgacatgaagaagtcgccggtgccgcccacgacggagatgtccctcgtcttctcggcgatgatgtcggcgcccatgaggttgagcgtgccgcggcgccccgtggagttgaacacgatggagaaggcgagccacgcgttgaacgcctccttgctgttgtagaggtagagcccctgcgccctcaccgccgtctcctccagcgacggcggcagcgccctcccctccgtcaccgggtcgttgaacaccaccacctcgccgaagaaggtgccgccggtcgacggcacggcgttggccagcgccgtcggcttggtggccgccgccgccgtggagttggaggtgctgttgctgtagtcgtagaggatgtcgtggaggtacagcctcatctccatgcacggctcgtcgtagctcctgacgaacctcctcctgctgctccggccatggacggcgacgctcgccgaggtgaggctgagcaggaagatggtggcgacgacgatcgtcagagacgccatggaccaagtagccgtccggcgcccttgcactgttatccaagcttagctagctagctgcagctgcctgtgattaggagctcgagatttgcacttctatttatagagatgagaaatggtcagggtcttcagctatagctgtttgagagggttctagctatttgctttcatgtacaatttagccggtatagctccatttagcccgctatagcagttttagaagctaaccgctaaatatcttagcccgctatttaaaatattgaaaatggtaggctgcatgcatgccaattatctggcaaaatgtctttgcaagctggagttgtttggatcaagagggatagtgagactaccatcatttcacctacaactatttattaaagaaaaaaatagtttgtgaatacattttttatatatgcatgtttaacaatttgaaagccggtgtcaaaaataaactactacgacaaactctaaaatcaacttcaaaattaaattttaatatttaaattttagggtggctgagaggcaaaccttagacttagaggggctgaggcacaactataatattgtcattcccttcgcttttcttggggtttgttgcttgaatattgctttgattccaatgatgatctgatgctgatgctcatacaggttaattactgtacgtacattcatgaacatagaggctgcaaaaggctagcttcaatggagggttaccaaaatatatatattataagaagagttggtgaattacatgaaagataagaaatgttacaaagaagatggatcacctaaaggaagaaaacaacaaaggaattatgctagccaagtgcttgattggttaatttctgcaaaacgccgccacacacgtgcttccacaaaagtccatgcagtcgaaatcattagtgaaatcaggccttaatttcttccttgttgtggaccaatcaatctgatttgcttcatcagggggaggggtctaatggattttattggggagcacgctaataagttcaacagtaccaattactattaacagtaatattgaccctgaaatttctaatttccgatattaatcggtatttcaaccgataatatttggtcactatgttcagtccaacccactaatggtttatttgacctcaccaccctacactttagcccactcatggtttctgaaatcaaaatccatatttgagttcattcctctgctcttcagttcatgcagcaaattgttttctttagcagatcatttcgctcgtatcagacggctttcaacaggtataaatttgcgtctgctcacatgaacgacgaacaaaatgcagaacatggcctgaaaaaaaaagagatcaaaggggatcggagtcctccgacccccactccaagtgcaaagctgcgaaaatccatctgaaaaagaatcatcaaactggaagagcgaagtgttgattcatgtttcgtagcagcagatgattttctctcgcttgtcggtctgtaggatttaaggaatcaaaatttcaaaccatggcatgatgacaagacaagtgtaaattacagatagtgtttgatggtttcagaactgtctagtactgttcagttattggggatggttcaatttcttttaataatggaaattatttacatctcagccatctgagaaaacaaaaattatcgtgtgatgggacaggtccccaactcctctaaaaaagatggctagctgaattaaaagtttaaaaaaatcacataaatattaaggaggatttttttaggtgctacgctatctaaaatgaagtacaaagattacaaaagtatagcatcattgtgcatagtattcccttctcctgtgaggcaggttcaattccaactaccaattacaaattgacaatgaaattaaaattctgaaacttgtagtttttggtacttatcagcatttcactttaaatatttggccattatgttctgagattttcagttaaaacctctactgattcatgcgaactcttccccctacctttaggctttagtcctctcatggttcctgaaatcagaatcgatatttgagttcattcctgtattcctcactcctcgcagttcgtttttttttttccgaataagaactcctagcagttcggcagttcgttgcttagcctcatctggaagactggaatgaccgcaaaataggttttctgttttaacagatcgtacggctttgaacaggtttaatttgcgtctgatcaaaataatgaacgaagaaaaaaaattcagaacgttaactgaaaagaaggagaccaaaggatgtcggtctgtcggagtttgaaactccaacccctttcccatcacaaactccgtctcctcgctcgctccggtcgctccactcctagctagtggtggaaaaaaaaaaagcttaggctcatgagctcagctcgggcttggctcaaccttggttggcttagctc

SEQ ID NO: 1440 - DNA, 1183 bp, Oryza sativa
attcatcatattggctagctcggtgcaatgacctggttaaatgcacaattactcaggaagaatttaatgttatactacctgcagaataatcttttcaggagcttgataggcctctaagaaatgacacacgttcacaaaagcccattgcttgctggaattatcttcacgtttgagatggttccaaccgaactttatgagttcctttcgatggtgaacaagatcgctctgtagatacttcagaagtaatgttgcaagctgaaggagttctatcctcaagggttcatcatattcagcactgacctaaaaatatatacatataaaaaagcattgctgtcatggggaagtaacaaagagaaggctgacaggtattaaggtagagtggttcacttcccacctcttccggaggatcaagaagcttgtcaacaatagttttaataatagatggatcaacaacttcccaactttgcccattttggaaagaatgagctagcattggaaggataagtatctgcatagcaacgactaaatgatcttgtccataatgctttgactggaatatgttcagaaagtgattaagaataattttcttcaaatttggtgcatagccttcagcaacctatatggaaaatgtaaaaatggtaagaaacagaaagaactggagagcgacacaagtaactgtcatgaattagaaaaagaaatggtgtcacctctataacataaaattccttaagaaaactataatcaatgcggctacggtacaagaatattgatagcatatcaaatagcgcaccaacttccgtacgatcatgccttagataatttaggaagcattttatgagccgcttgctttccatcacctgttcagaaagtaagattgttaagatccaaaggtctagacacttgattagtgcagtatggaaagatgcaaggatgctaagaaactttaataaagcaatttattgagatgtaaagcacagataacatgtacgcatcatgtcagcaaaacctaaatcattgaattcaaagaaatcaagcgcataagagaaaataagcacccatactaccggacagtgtttgcccattgaacagaacatcataaaatccagaatgataatcctactagcatggcagagataacagtatataacagatagtagcagtagtaaacaaagatgccaaaatt

SEQ ID NO: 1441 - DNA, 734 bp, Oryza sativa
atgttaactaaaacaagtcccaactccaactagattaaacatgattcaacttagcacattttatccggtgaacaagaacagtacttagggacacatgcattcagtgtttcaaaagttaaatgtagatatattcataactactttcatgattttacaaaattattgtgttgtggagatggtgtctctatccaaactgttactcttttgtgactacagcagcatgccacaaatattgcttacatgcaagcattgcatacaactatatgtaagaaacatgtgggtgaaattctagttacctgtttgacagcttcatcgaacagttctcttgcccgctctaacttgcttctctgataccttcttacaaactttgtgaggtaggtcacccaaatgtctttaacatggggatatttaaaaattttcacaccacgctcatacactttaaacgcatcttcgaaatacttgttttcctgtggaaagaggaaatgtcatgatattagcatatgcacgataaaatagtttactcgaattttggaaatgcggagttaacaaataatcctacctcaagaagatatgcataattgagaactatttggggagtggcaattcgtaaatccaatattctctcataaactgcacgagttgattccaatgttccaagactttcctccaggtccacatagaagctccacagtttcagggatttatgtactttcaattggacaggttcatccccc

SEQ ID NO: 1442 - DNA, 516 bp, Oryza sativa
aaatgggctttacggaataaattgttgtctaccgtcattattgctttccttccgagagttccctttccccgtagtctcccttcatggcgtgattcaggtaccccgattgggcgaaggtcttcgataaattctacgcaaaattcggtgacctcctctgttccataacccttggcgatgcttgcctctggatgagcacggttacgaacatacttcttcaaaacgcccatgtacctctcgaaaggaaacatgttgtgtaggtacacaggcccgagaatacggatctctttcacaaggtgacaaagcagatgcgtcattatattgaaaaatgaaggtggaaatatcaactcaaaactgacgagacattgcaccacttcattctgaagggcttctaatctatccggatcgatgaccttctacgaaattgcgttcatgaatgcacatagctttgttattgttgcccggacatatgcttccgatcattacgttccatatctttcgacttttcgtatacaccta

SEQ ID NO: 1443 - DNA, 652 bp, Oryza sativa
ttcggaattaaaaataaggaatattagaagtagagtatagagtccatatagaaatacaattaggaaataatagaaattctgaattaaaaataagaaatattagaagtagagtatagagtccatatagaaatacaattaagaaaaaaaagaaattcagaattaaaaaataagaaatattagaagtagagtatagattccatataggaatttaaactaactaaaattcggaaaaaaaagagcctccacgttcgctgagcctccacgttcgctctcatggcctagaaattctcacattaatcggagaaaaagtaaaaaacagagttcatatataaatacaatttagaaatagctgaaattcggaattaaaaaataaggaatattagaagaggagactagtctatatagaaatacaatttagaaatagttgaaattcggaatttaaaaataaggaatattagaagaggagtatagagtccatatagaaatacaattaggaaataatagaaattcggaattaaaaataaggaatattagaagtagagtatagagtccatatagaaatacaattaggaaataaagaaattctgaattaaaaataagaaatattagaagtagagtacagagtccatatagaaatacaattaagaaaaaa

SEQ ID NO: 1444 - DNA, 977 bp, Oryza sativa
tgcagcttgttcttcagaataagctcctagaaaaagcaaaaatcagatacaagataaaataaaagtgcaggtaatttgtcgtagcttcaaagtcatgctagtgctagtacagatgaggccgctgcaacagctgatttgagtcccaccgagggcacgaccaccatcgcttgctctgaaaccttatgagtgatgatcgtcgccgccaactgcgagcccaaaccgtcgcggactatagtagtgtggagattatgggtaacccatatctacacggagacggtatttggattgggtaccggatacctaatgtagatagaatatcttatttgtatcttgggtttgtttcttaacttgtgtatcaaggaaacaccctgaaatttagtcggttacgactgtatcttacctatattttcatattccgttagggatatagattatcttttgtaacccggactccttcccatatataaggggggtccgggcgcctctaggggcagttgttgatttttcccgaatcatacaattaataatacactcggcggattcatccccggacaggagtagggtattacttcttttttaagaaggcctgaacctgtataaatcttttgtctccgaacccatacactttccaagcttgatagccacccccttttattattgccgaaatctagtttcgacagttggcgcgccaggtaggggttgcgtcaagcttttcgccgatcagtgcaatgggtcccgtcaccggcatcgacgacctcgtcttcccacccgggcaggcgtttcggttcggcagcctcgacttcatcaccagcaacttcggcaagatttctctccttgactcggaatcgaaccagtcgggagagaaccggatctcagtcccgtttggattcccaaacgcggctgaaacctacttcaagaccatctcactcgagtcggcttcaaaccactcggccgagatcgcatcttctccaacgaca

SEQ ID NO: 1445 - DNA, 844 bp, Oryza sativa
ggggagctcggtaattcgagaaattgatcttgaggagaggcgggtgtctgtacccgctccgtcgactcaggaacctttctaatgttgtgccagcaatgcatgacgttgcggtaccaacacctgttgttatctctcctgtggcaacaatgaatgaaagtgaagaacctattctacaggattcaacagaaattattgccacatcagaggaggagctgcaccagcctcaaacatataatgtgccagaataggaggcccctagaaggcctgaaagagtcgcatatcgaggatgatcccatctcatatgaagaggccatgagaagccatgaaagatgaaatgaaatcaatgaaattaaatgatgtctgggatttagaagaaattcctaaaggagccaaaacagtaggctgtaaatgggtctacaaaaccaaatatgactccagagggaatatagaaaagtttaaagtgcgacttgtggcaaaaaggcttcacgcaacaagaagggattgattacaatgagacattttctccagtctcttgtaaagattccttcaggattataatggcactagtggcacattatgatttggaattacatcagatggatgtaaaaacagaatttctaaatggtgatttggaggaaaaagtatacatggcgcaaccgaaaggttttgtcatgaaaggaaacgaaaatatgggatgccgtataaagagatccatttatgggttaaagaaaagcttcgagacaatgctacttgaagtttgatggaacaataaagaaatttgggttttcaagagaatgtggaggacaactgtattgattcaaagttaagaatgggagactcattt

SEQ ID NO: 1446 - DNA, 540 bp, Oryza sativa
cgcgcgaattaacactcatttatataattagttttattaagtagtgtatgtttcatactacatcagtcccaaaatacttgtcgctttgatttttttcttgcaacctttgaccattcgtcttatttaaaaattagtgtaaatataaaaacgaataagtcacacttaaagtatttttataataaagcaagttacaaacaaaataaacaataactctataatttttgaataagacgaatgatcaaaagttatgtaaaaaacacaaaacgacaagtatttttggacggaggtagtatctaaacatcctatgtgacctaggagtatgtgactgggacggacaacagtgtacaacctttcgttgaacaacagagacgtacacgtacgcaatgttgcacgggtcacagatataaaatgcacacgctacaacgcagcggatgtactcattgcgttggtgcactgcacgcatgcagcgagagatgcccgccgacgctgacatgacgcgccgccgccgctcgccgtcgctaccgtgcgcggtgcgcgtgc

SEQ ID NO: 1447 - DNA, 853 bp, Oryza sativa
tcgaattctgcgtgtgattcgatcaattggacacttaaaaaaagaacaaatataattaagccatacggttggagctatgctcctggacgaactgcttcatctcctccacgagcttgccggagtcggcgagctccgggaacgcgtggaagccatggatggcgtccgggtactccaccacccgcaccgccttccccttctcgcgcagcgccgccacgtacctcgcctgccatcccttgagcaggtcgaacccgccgatcaccaccatcgccggcgggaacgcctccgccagctcgacgcgctcgccgccgcacacgcgcgccgccgcgtggtcccgggtggcgccctccggcaggaactcccgccagaagtagtccgtcctcgccagcgacagcgagaggctcgccttgtcgagccccacctcctcctccgtccgctcctcgccgccgaagaagggcgatatcagcacggcgccggcgagccggagcgacgacgacggcgaggtggtggacgccgcccagcgctgggccacgtggtgcacgatgttcccgcccgcgctgtcgccggcgaggaagcagcgggagaggtcgacggcggcgccgagctcggcggcggcctccgcgaggccgttggcgtcgaggtagcggagcgcggcgaggccgtcgtcgtaggcggcggggaagcggtgctcgggggcgaggcggtagttcacggacaccaccacggctccgaccccgcgggagatgcggcggcagagcgcgtcgtaggggcgcgacgccgcggagaagagcacgaagccgccgccgtggaagtagacgacgaccgggagcttcaccgccgccgtgttcgtgggcgg

SEQ ID NO: 1448 - DNA, 2120 bp, Oryza sativa
atcccaagtttcaagcttatggccaatagtataccaccaaaaagatgcagaaccggtacacttattaatagcagccttaatcatttgagcattagagaaatcatactcatcaaattgtttgtctactgctagctcccaattaacataagcggcggaatcatacttaccatcaaaaactggcaatttagattctaccattgcaagatcattttcatgtacctcgtatgcaatgcgtgaaaaagtcgctatatctcgttgatggtgaagaagtcgaggttgagcataaccatctcgtttccccttgtgcaatcctgccatggttagtagcaaacaagaaacatacacaagaatatacacgctcctatcaactactaggtagtggcagctgaaatattacacacactcaagcttttcaccaagctcttacaagttcttaccaaagcaagcggaatgttaatgtacactgactcaaccaagcaccccaatggagtttagatgtatcgatgccttggcaaacatttactgtacggctgcaatcaaatctgtggagctctgggtaggcttaaatatgtagcaaaggaatagcaaatgctcaaagcaaagaatgcaaagttgaataattgttcaaagtcaagtaccgagctggtcctaggctagaacgtactagagacgcgagcctagacacaaacgataccacaagatagcactagaaacaactcatgcatgctctgatatataaaagaaatctcaatgatacaactgattttctcttttctttttcttctttatttttctttttttttctttttttcctttctctttttttggtgcggcttttgttttctctttttttagcacctttctgcctttttttttattttttttgattttttttaccaaaaaccgactcaaggacctcaatgtaaggtcaaagggactcaaatgtaaatatgaaaattacagggactcaactgtaaaagtccaaaccaaaattaaaaattatacaaaaatggaatgctcaagttatgtcggttccgtttttgcaaacggatcttgaatccgacaccaaaataaaatttcaccgaagtgtttaaccaacccagacagaaacaatcatgagggagtgtgaatcggactcacaagtctcggccacgagatgacgcaagggaaggaatcccactcggcctcggtttggaaaggtaccaggtgataaatagaaacatactcgacactaaatagaaaccaaaccagtcaatctaatctaatattctccttccatctttctcacgcgcacatgcacaagcgcaccatcacggcacagccaccaaacagaagctatgcaactcaagaactcaaaaactaaccgacagaaacttctgaaaactacgaaaaaagaaccgtggcagcgagccgattccgttttcgtagatcccgacgacaacagagacacgggggcggcgacgactatggtccaaaacgtgaccagaactcgaaactctaaatgaactagacgctaataccagcaacacgactcgacaatgcaacacaaaactcaacaacgcaaaaactgaaaagaacaatgcaaaggcacaaagatggctaggtataggatacaattttttttgttgggaaattttctggttataggtagataaaaactcaccgagcaacgaaagctctgataccacctgataaaccctgaattcctctcgaaactcaaggctgttgttggcccaatctttcggtgagttgtgataactacaatttggaagaaacgttgacgatccgactacaaccgtactagacgttgtgttgcgccttagcgatcgatacacctctccgtgggttgttgatcttgccggtgcagattaaccttattcctgcaagcaaatcgaagaaacaagcaagaacaagataaaagcaatatgaattgcaaataggaattgagcacaaatgataagttggggtttcgaatacaagcagacgacggtctagccgacacgcgcgctgcaaggaagtagcaatggctaaactttcatctaaacaaaacccgagataccctgaaggggtaccaagctatttatggagataggaggaccctaggtcgtcctccacttgat

SEQ ID NO: 1449 - DNA, 520 bp, Oryza sativa
acttgttttactgcagagatattagcggcagcacataaaggctcaaatgggatcaacctcttcactgacgagtgtgataagactgaatcattccttccatttggctctgggagtcgagcatgtgttgggcagaagtttgcggttcttgggatcgcaatgttgattgcttctctgcttcgcagttacgaggttagatgtgataattttttctgtatcttggcatggccatgtgaagagacacggccacgaactctgttatttattaccctaaaaaaactgttatttatttctattcactatgagctcagcgagtttctttagaacaattcctgactaaattatggttacaccccccttgagttataaaatttggcccttattaaggttgtattctaaacttgtgatgttgcttggaattcgaacctgcaggtccaacctcatccagctttatcccaagaaatggaatcattagttgacagcaacagccttcaccatattcccaacccaaagatcatcctca

SEQ ID NO: 1450 - DNA, 1634 bp, Oryza sativa
tttacgaactagtaggagagaggacaaggtagagctatataatatttggtaggtttaatttgtttgcatgaaagtatcaataactaactaattatctttggtggtgtacatccgagaatttttttgagaattaatattatttttatggaaaatcgcaaaagtagtggccaaccggggaaaattgcgaaagtagctccctgtcgaacgggtgcagttcgatagggcacctatcgaacgacgggcagtcgacaaatccctatcgaacggctggagttcgacaagctcacctgtcgaacggagggagttcgacagggcccatcacccggcgccgcgaggcctgtcgaaccgggggcgttcgacagggccctccaccgaccctgtcgaacaatgggcattcgacaggccggtttaaagccccgtccacccaggccgcgatgcttgttcgatttgtttgaggaccacatcgccagccgccgccgagagtcgccacatcgtcgccgtgagcgccggagggagcgaggggaggggatagcaggccggagaggaggccgaggaggcgccggccgggaggaaagggttggcgacgccctccagcagtgaagttaaggtatacattagtaatccctaagtacaatgcatatgaaagtttaataaaaaattggtttaagagttgttaattgtttcgcattgttcgatgttagtatgtatggttagcacatatttgttattgctaaatgttggtagaggtatttaagtaattgtatggttaaattagttcttagttagtacatattattgatatgttgtgtgttaaaataggtacaaaggtgttatattttatttggattattaaactagttgtttgttactaatagttgtaaattagtacacggcaatgtagtataagttgtaatagggtaattatcgaatgattaaatgattaaacgtgagactatttgtcatgttttatcaggatgttaggtgatatgcccattcgtctgtattatggcgatgctcctatacaaatatgtgatagcggggtggatttgactgtatatgccttccatgatactagtctgaatgcaccggagcatatgggtttgaacgacgtgttagggtggttgtataatatgtttggggtagatccagtgcacgataaatttgtcataaatgccgtgtggccagtgaggggtcaaactctgccttatgttcaccccacgcagggagtatctgggtcggcacacttcccttacatgccaacgggggacaacgtgttgaacacatcagcatggggacttcatatcactccgcgtgcgccagagcagggccacacaccgcacacatgtaagtcattttaaacaataacacgctttagtttctaattatatgtatcgttactaactacgccatattttttggtttctccctcttgtgcaaacagacgatgagtacggttcggcgtcgacgcatcacggaatgcctgcttactcccctcgcacagcattcattgaggacttcttttccactgatcctccccagggagaagtagggatggattactggcacgcagcacctcaggtcacacagccgacgcaggagacggaggccggtcaggggccagacgtgacaccaca

SEQ ID NO: 1451 - DNA, 1912 bp, Oryza sativa
aggtgttgttaaggaaggcgtaggcgtggtggaaaatggggtgcgggcgcgcgtggtcgaggcgctcgcggaggtaggcgtgccacagcttgtagctccccgggagcgcattgagcgcgcgctcgtagatgacggcgcgcttggcgaacggcgcggcggcgcgggcgacgaggtagcgccaccaccccttgagcttgaacggctcgcgcaggatctcctcctcgtacgccaggtcgtcctccgtcgggtacatctccggcgagatccccagcgcctccgccgccgccgcagacgccgccgccacggccaccggaccccccgcaggcgacggcatctctcgctagggtttagtgctccgccgcggcgaggaggatttgcgccggagagagagagagagatcgagtcgagacggagaggctggcttggcttggcttggccaggccggcgcgtcgttttgttgggccgatgagttggaacccgagtaggcaagggcttgagtggttttggtgggccttcagggattttgggctgaacttttttacggaggaattgggcttatttggtatttgagtaattgggccgagttttgtctgaaccagagcccaaccgtcagtcatctgcttctgctactctactcaaatatttctttccccgattttggtatacatttgtcaatttttttgttaaaaaaactacaattatactgtatttatatttgactacagatatatagatagtcctttttttcctgaacagaaactttaagttttttttcttagagaagaaactaaagataaaatattactatttaattatgtgattacgtgtaagagttatttgctgcaatgcaaatgttgaagtatagtcgtgctacggtttctttatatgccacagaccaggaaaaacttggcaagagaaaatagggtgcttttttggatagatgtcgaatcatgccgcacctgaattaggcagactgactagtgagtagtgactaccatcactgatacaacaaatcttggcgttggacattatccgtacgagttcttctcaacaatattctcccttggtccaaaaaaaccaatctagatggggatgaaataccacctagaacaacgaatctgatattccatccccacttaggttggattttttttagacggagggagtagctgaacaacgaaaatgttagcccctctatttttttgggataataggcagtgatcccagtatatgctgaataaaagaggggcaaaaaccacaatgttaatgagactagatcctaggtggttgcgcgcacgcgaaggaacggacgacctcctacgtgcagcgggagggagggaacggaaggaagaagaacggcttcgtttttaaaatagtagagatatcacgtacaaactgccagtataccactaaggcgacatctaaatacatttcagcatgctcccataaaacttcattgtcaaggacaagaggtttggtatacttcgaagttcgaaagaaaaccaacattgttacattaccggacttctgctaattaaggctcaatcttgcacaacaattcatctatggaaagaaaaaaggagccattagctcataactccagattatttaatcaataatatgaaaactatatgattgatgatgaccaacaaaatcaatggaaagcctctatcagattcagagagctcacatcattcgtgtgcttttcaccttgctcctgaccaatcctccattccaggagtctatcagaattcagagagctcacatcacttttgtgctttcaccttgctctcgaccaaacctccattccaggaggcgcacgtgcatctgcataatctgcatattgccgaaccaactgagcacgatttcaggtgagcttaacagaatctgttcttgaacaagaaaaccaaga

SEQ ID NO: 1452 - DNA, 703 bp, Oryza sativa
cttgatatcttgttcatccatgatgtgagcaacggatgtatccgtagtagccatggtcacatcatcctccccttcttcacagaaaaccgtcctcggtttttccatatggtgctctttgcgtagtccatttacagcaacctgtttcttccaattaaaacaaggcaaactcgagacaatttggttagcaataacatttctctctagcttgtatgttttatccacatgtacaggaagttctaaatccgagcagatgtaaagtctatgcacaaaatatattccaagatcattatattcgccaaagatgtgaaatataacattggttggacatggcaaatcaaaatgagcaaatattttgtccttcaaacaattgagctcacaagaatcatcaaacagaatatagcccaatgtatttaaagaagattgcaattgaagttcatcattctcgctggacgtgtgaataacatgcttaaattaaattcagtacatggagaatcaagattaaacgtagcatgttcattcactagttgtggaatggatataagtgaaatactatcatacaactcttctttatcacaaggaatagaatgcaaatcaacttgtgacaaaggcaattcagaagtaggttccactaaagtttgctctaggtcagcatggaaagtggaaaaatgtaattcatcagaagcatactcacttgagtaatttt

SEQ ID NO: 1453 - DNA, 5677 bp, Oryza sativa
cgcataccataaacatgacaaaggtagtacacatgcacagatgtaaaagaagtgataccttacctttttttgcagcttcatgaagaggagcaaagcctgctgcatctttcttattcggatcagcacctttgtcaagaaaatacttcacagtaatctcttgtccatccaacacagcgcaaaacaaaggtgtcatacctagcaagggcattacaaacaagaaatttaatcagataactccaacaaaacgatacaggtagtgttgtggtataacagctttgcaaatgcacaaatattagctgctacaattccaaatatgcaaaggagcacttcatgaaatacttatagctcagactgcatttatatgacatgcaatattaaacaatggaatcattcagaaacaccacttaataagttcatatcaacaaggataatactatagttaaaactatacaaaactcccatttcccaagttcttagaaccaaaatttgatggcatgtatataccacgcaaaaggaactagaagaaaaatcaagtgcataatagatgagcttcacaaagtgaactgcatgcattgtctagacacaactgtaccaatcaagagtaggcaaaagcaatataaaaaggaaggctgaaggagataatccttcaaataagaataaaaaggcatatcaccaacactttgctattgtgattctttcttggatgatgttttcttatattatctatggcccgttacaaaaaacaaattactagattagtgcaggaattgagttttcttcagggaaattcttgcagtactccctcagaaaatactacctcacaagacatcatacattcatacgtcccaaaggtgccacagaattgtttgttttcattaaaaaaggtgactagtcaagaaacaacacttaagaatcaaattatagtactaaacggatttattcacatagcagtgttacattggtgtgccaattcagatagcagcatgtcagcactatagttaatgtctccatgataaggtaaagacagttcctgaccctatcaagactaacctcctcacatacaacagctcccattacaattgcattgctcacgggagatgcactaagcataataaaacaatgcaataacctggaaaggcacataccggaatcatgattagcttcggcattgacatcgaacccaagctcctccaccaagtacttgcagagatcaatttttcccgagcttgctgcctcaaacagtggctcatacccctccatcctcacagaggtgagcgattgccgatcatcctcatccatgctatcaaccacctcttcaataccgaaagtttcaaaagaaaagtaaggcgcaaatttgcacaaattgtaattctagttcatgcagaagttgtttttttttgtgtgtgcatgtgcataaaacaagatcaaagttctagagaaatggagacacaagtacctcacgaaaatcacatctaagcacttagaaaagaaaacaaaaccaagtggaagagatctcttacagaaatatggcatcataaagataagtagtattagtaattattaatcaaaagaaaacaaaaccaagaggaagagacctctaacagaaatatggcatcataaagagaagtattattagtaattattaatccctattaagaataatggcaaacaaacaaattcatatccagattactagattagtaccaatttgaaccaaaaatagacaggaaaaccctccgccgcattaaacacacatacacttctatcaacaacacgcacgatcggggtatacacgatcatatcgtaacggaaccagaaacgatgcatgaggctaaaagccatctcatccaattgtttacacaaatgcacaaaaagatgggagaacacatttgagtagaatatcccccaacaaagccggcacagaaaatgctgaaaaaaagttcccgatcaccagttcaccaccacacggaagctaaaaaaaaaagccctcaaaaccctaaccaaacccctatcccaggaagaagcacgagcagttcgggagtaagacgggcgcggggtagagccgtaggatctcacccttgaggcgcgcgacgtcgccgtccgtacacgccatcaggaactccatctgcggtggcatcccgccgccgacatctgcaaacacgcacgcacgcacgcacgacgaacaacaccacccaacccaccattagagatcccttccggagagcagaatcagcccgagcagaaacgatcggggagcagcggacagcggccgcttagcacgtactgatggtgcacccgaagccaaggcgggtggcgatgccgctgattgccgcggccgccgcctccgcctgctggccacgcgcatcgctcccgcgccgccccattcccggccctcctcctccgctccctccaccgccgcgatccacaccaccaccaccaccaccaccgccgccgccgcctccgcctccgccgtcgcggccgcggtgccttcccttatccttcttctccatggagctcagcgagcacggcgagcagaatgggatgggggcgaatgggcgatgtgggttttgcttgcgagaagcggagagacgaggcgatggcttctaggagaatgaaggaaggtggccacgtctcgtccgctttaatcgcagcgcagcgcggagggattgagatcatctctctccgccgcctccgaagcaccttgcctttagtcactgacaggtgggtccatggttcgtcgggaccacatgtcagtgactaaggcatatacataccgaccttttgaaggtagaggagcctgacccagcgggggagaggagggagagagaaagtccggagtggcacgatcggccgacacgtgtatgtacggacggcctagatggagcggggagctgcggccttgcctcgcatgagacggagggcggagattgtgggacgtgccgcgtgtaaaatggtaggtgtaccaaaatatataccagcgtcaacgagatggtcgctgccctgcacttcgccgtgcatttctcctcaagtggataaagctcaagattctctctctctgtgatccaattgtgaaatcatttgctgcagagtttttctttgtaaattcaggtctttcaaaaatagttttttttgggcagatgtgactactaataactattccctccctaaaaaaaaccaatttgtgtagattcgttggggaggggtcacacccctcctaggttgccctccttttttttttaatggagggattacgatctaattaaggtgcttgtcgagcaagaagacgcatgatgatgaggctgccgaatggtggagctcatccttcactttccttttatatatacagtggataactggagatcgtcaccagacaacagcgtacggagatttttctttccttatacttcgcccgtcccaaaatatatatacattttataggttgacacgagtattaagaaggtagatgagaccgtgagaataattggagaaaatacataattggttgaaaagagaaagcagctgaagaagaatggttgtgattagttgataggaggtaggtggagaaatagctttattttgagacaagacactgtgctaaaaatagcttcatttagagacggagatagtatatgcatatgggctaaggggattagggtaagtaggtggcgtgcacatagtaaaggattgcaactgcgaagccacagaccttgcctttaagcaataactatgcaagccacgctatgcgtgtctctagcctatgtgacacacgaaatcagcccaaggccattcaactccacagtgcatgttacttcttttgcatggctttgattggggcgagctagtgtcgagactacaaagctcacaatacaggtgaccaagacaatgaaggtgccccagcccaataaattaattcccccagctacccttctcctctctcttccctatcggcatcgcctccctcaacctgttgcccaccgcctgagctccctctccttcgcctctctcctccctatcgccatcgcctctctcaaccaggcgtcacggccgcaaatgcaccacttctcgaagaagaggaagtcgtcgtcgtcttcctcgtcatccgcacatggctccgctctgtctcctgggcgtggaagaggaagttgccgtcgttgtccagcccgtcgatggcgaagtcaaggatccacctcacggcggaggtggcaggatgaaagtgcgacgcttggcctcatagtggctccactccgtttcctccgctgtgtggatgaggaagttgtcatcgtcatccagcccaccggcgacgaagttgaggatccgcctcatggcggcggcggtgaggcagaagcgcgacgcttggccttgtagtggctccactccaactcctccgtggcgtggaagaggaagtcgtcgtcatcatctagcccgccagcggcgaagtcgaggatccacctcacatcgacggtgctccgttggcctccgtgcgtttctccgaaggggatggcgaggtttgtgcgggagtgacggaatcggtggcatgggagggatcaatccatggccgggagggtgattttgggaataggtttttcgatgtggcgcgaggagacgacgagatggaggctcgaccccaacaacgcaggcacgattcgtttgtgggccatgtgtggactcacgaagagcgagaaaactcatctccctgcgtggaggtgagatgctctgcagggatgcgcaattactcgccacgtaggcattcatttgagctggcggcacaaagaaactcaccacgcaaacacactgtgaagggcctaagcgtaaatggcatggggtgggccagaaacgtgtgtgtttcccatgttaatattttttttcgtacgtgtagtattattatatcgaagaaaatatggtgaactaatattaacatttttttctgcagtagctatgtaatggacgtgcactagagttcttcacaaattctactttcgagatgaccgttaattgaatagttgtaattttgagcaaatatttgctacttcctccgtttcatatatatatatatatatattaatgaatctagacatatgtgtatgcctagattcattaacatatatatgattgtgggtaatgctataaagtcttataactgaaacggaggtagtactagacagtaaaaaaaaagaatttggtattaagtgctgatattacttagttaaagagtgattaatcggttatcactcatgtaattttcaaaagacaatactgagttaatacgtctaatagattttttttatacagaacgcatgtgcgcgcatccatcactatacacatttgtgtgtgcgtaatatttatggagattgaaatttaaatcccgatgataataaggtgacaacgatacataaaagttaaataaatatgaacatatacaaattacatagacatacattcagtaccaactaatgataataatagagtaaagtccatcaccggtccctaaacttgtaccgctgtgttatcccggtccctaaactcacaaatcgactgttcaggtcctcaaacttgttcgattgtgtcatcccggtccctaaacttgcagatcactcgtttaggtctaccaacttgtttagttgtgtcactccggtccctaaacttggatttgaatatcatatagatcaaataggacggt

SEQ ID NO: 1454 - DNA, 1294 bp, Oryza sativa
tttgggaccctaaacagttttaattcaaacacttctcaactacaaagttgtaggtcacgtcgagggctacaattttgatataaagttcatcttcattagagttcacatgaaaaagttatgaattattttttgatataaaatttttagactgtactgtttagggaccagggtgacacaactgaacaagttggaggacctaaacgagtgatttgcaagtttagggaccggaataacacagtcgaacaagtttgaggaactgaacggtcgatttgcgagtttagggaccaggatgacacaacggtacaagtttagggaccggtgattgactttactcataataatatctgaacttgatcggacattgtatagtagtactgaactcggaatgaacaacaggtaacaatctgatagaaaatagtgtcaagatccgttatgatgaaaattaaaaacacattgcaggagcacaatcagagcaaaattcatctccaaattgttaaccacgagcataaagactccagccacgagcaactttgtccacacgtcatttcacttaacgtttcacgtcagtcaaataatgggattggatcacaggtaaaataattccacatcgcaaacacaaaatggagtgcggagtaatagtttgctgagaaaaacatgattataacatcagaagataatgcccaaattatgttctacaggcagatgattcctatcctacaacataatcggtcaacagaacctagctaaagttctttttcacatgctattgtgcatgtatgggtgctttcaaattatctaggggatacaaaaagacttgttttcttggataatgctacgcaaagatctgagcggctgagcatcattgcattaatgaatgctccaaaacagactaaataattctattatacttacacaaggtgcaagtacaaaatttgatcatttctatgggaaagacaaataaatagctaaaaataaacaagtctctggccatatcaataaattaattcctaataaacaccttccacatgaatcatgatcaagttaaattgaatttagtcagtatattgtgtgctcaattgacaagtggcatgcagctaaaatgtccattatgtagagtttataaattgttttatactttaattagatatgtgcagatagatggtttaaaatcaattgcataggacatggccaacgctttgcaaatttacacggataataaatgtatgactaaatcagttctgggacattacgaagtggtatctgcagaaatcctctcctgttggagaaatgtcag

SEQ ID NO: 1455 - DNA, 1836 bp, Oryza sativa
  unsure (1)..(1836): unsure at all n locations
aattaacaaattgagctaagcaacaccagctttattcaaggcacttatactgcttaccacctcctaacataggatggtgaggagtgctgctgataaacgctccacccggagtagatggacaccaagacgatctgcacggagattgtattctgagttccgagaaggcgagaacatgttattgtgatataaaagttagtgcctttgcagtaatgcacatacaagtccaagccactaaaggtttattaaggtccctgaaattacaagtagaagttgataaaaacagagcagctatccagtgctattacagttagtgtcaaatttcaaatgtacatgcaaacccatttcaaaggattgctgtgagagtaattttcccttaagaaatataactgaagatagtgtgtggagtcaaaattacaacagttctcatagatttatgaaaaatttctgatgtactccctccgtcccataaaaaaccaacctagtactggtgtgacacatcctagtactatgaatctagacatacctctgtccagattcgttgtactaaatgtgtcacatccagtcctagattcatttttttcgggatggagggagtaaaaggattagcagaatgtttactgaatggtagatagtactcgagtagtatttatttagtcaagataattcagaaatatttgtaacaagcactaatgctatataactagtagcatgtatgaagttactgggtcaacaaaagtgctagagaaggcatctgaaaagctgtttcaagacggtaagctcacattaatggcttatttatgtaaaactgattgaaatacggcactagaccattttactccagatgactaattgcttcatactgagttaaaaaccctacatattcagaacaaaagagtccaaacatctcccacaaggtgaactatacatgataagaaaaagaccaaccttatttgcgagctgtatagctttctggaacatatatctcccctccagcttcaccatgttgctccccactgattgttttccttgcagctgaaaactcagcactcatagcattcattccttgtatcaccgcttcctccactgtcccgtaaccatgttcatcagcatattttctaatatcctctgnnnnnnnnnnnnnnnnnnnnnnnnnnnnnnnnnnnnnnnnnnnnnnnnnnnnnnnggcaccctccgatggtaatgtttcatcatggaaagacatagcggtcacaggatccagagatagagcaaattgatccaaccatctaaactcaaatcttgccttgcttagtgtatcgtcccatgcttgtgcatagggatggccctttgccaaatcagcagcatgagcagaaattttgtaggatatcacgcctgtcttaacatcatcacggttaggcaatccaaggtgctcctttggtgttacataacagagaagtgcagtgccaagagccccaatgttggcagcaccaatggcgaggtgatgtgatcataaccaggtgcaatatcagttgtcagtggccccagtgtgtagaaaggtgcttcattgcaccactccagttgcttctccatgttttcaagaattttatgcatcggaatgtgccctgagccttcattcattacctaaaaattgagaaatgtcaaaaacactgcttgacaaggttaaaaaaaattgaattgtgtagctaatggaaacaaatcatcattcaggcacatcaccgttcaaagtttctactaccaaattattagggaaacaaaaacgattcatcatttagagcatgtcatttacaataaagagttttaaaccacatctctaacatcttctcatatgtttatctg

SEQ ID NO: 1456 - DNA, 6238 bp, Oryza sativa
acgtgaaactatgccggtcattctctttgccgtaagaggaatgtaacgaagaagcacgccagcatggattgtgaagtaatcaacaccctgctcagcttgttcgattaaagtatctctaaagacttcccagcttagattttcagcaataccattaactttctcaagtgcttggtaaataggcaccgtcccaatagggactgaagaattacgaaggatccattcccgggtctcatggatatgacgccctgttgaaaggtccatgacagtatcagctccccacattgtagcccactggagcttgtgtacttcctcctcgatggagctcacaacagcagaattcccaatgtttgcattcacttttacaaggaagtttcgtccaacaatcatgggttccaattccaggtgcctcttgttggaaggaattatagctcgtccacgggcaacctctgaccggacaaattcaggactaaggttctcacgtgtggcacagtacaacatctcctctgttatgattccctgcttagcgtaatacatttgtgtgtatcgaggaccacctaacttctccctcctgtcaatccattccttccttatctttggaagtcctgcaaaaaaattcaaatgcttatgcaaattgtcaaatatgttagggggaaagagagggaagaaccctcaaccatcctatcagtatagttatttgaatatggagaggactggacatagttacttatgtagcgaaaatgtgagaaaaggtagcctaggcactgcatgatgtcaacactggtttgtataccattttggtttaacagtattagttcagttgttctggtgtcatctctttttactggccgttttggtactatcaaattaactatgcaattacattcatgtatcaaactgcacgatacctaatatcatacgtccatgttccctatggaaattatttctattagttttgaaataaattggtataaatgaaaaataaaactccgcaaatagtacagaaatataaaaaaaataaaatttgtaaataaaaataacaaaaagagttcaaaacaatataaggtatcataattgcattagagtgaacataaaagaacaagaaataatttccactaagccgctgatctttcctttcatgcaggattgataaaaaaatgtaagatgttatgttcattagcttggtttgggggtttagtttgacaagagaaatgaggtcagtgagttaccaatccttggactaatgttttgtggaccactggtgtcgtatgtgtcaaaatgcttctcatctccggtcaaatggattctcctaaatgggatcttgaggacatggccagattcctcgtgcacaatttctctgaagaacatagtcacaggcaacataagctttagtggaggcgttaacataccggaatgtaagtaattccaatacagttcttaatgaaaagtgaaatgtaaatcttgcctggattcttttgtgctccttggaaagcattcttcaaatgatgggagtggcagaaattctggagcagaaggatcaacagtgtgcttgttttgcctgggttttgctggctctgctgttgactggtcagtcactgaagctgctctaggccttgaacaagtgaagttagcgctcctgtcctgcacatcttgaggacgtgcaataccaccaaatccaggtaaaactgcagttttgggtaacttcagacttttcatagccattgctgaagagaatgagggttgcagggcagccatttcctgtccaaaggtagagaaaaattaatgattaaagacagtgcaacgctatcaactcaaaagctttatatctgcacttgcagaaaactacagtcctaatcttatctccatgtaggctatctgaagatgacgacaaatgcatgtagcagtcgaaataacccctctagctctgatgcctttaatattcagagttcattcatgatgcctgatgaactggttttgattgaaaaaatgattcatatttcaattctatactggagaactctattcatcccttaaggggatatcccctcatttttgcatgtcacttaaaaagtcatcaaaaaatttaaaataatttagtaagatagatcaatatgtgatatgtaacttcacaaacatgcatattcaaattcaacttatataagtaaaaacaaaaataacaaatttaactatgaatagaacgtgtaattcacggttaaatttgttatttttgtttcaaattgtataagtcgaattttaacttgcatgtttgaaaaagatatatcgtataatgatctatcttgacaatttcttttcaaattttttgataactttttgaacgctatgcacaaaacgatgggatgtccccttgagggacaaaaatacacttccttctatactactctacatctcagatgaaacatgccttacaaaggagttgtggaacttgtgtctcccctctcccgtgtgcactgcaccgaacaagagcatagagcatatacccatgtggaaaaactagcgtccagaatcaaagaggccccccatgtaccaatacgatcgagaactagataaccacggtagcaacagaggccttcaccacgcgcgcacgatctatcaagcatcaaccgtatcatacggaaatcacacccgcaaagacgcaggcaagcaaagcgagaccagccaaaatccttacccccctaatccacaacgcatccagaaacctacgatgctaccgctagaagcagcatccaaaaccgcaaccccggcccgtcggccgcgcgagatcccccacggattccgacgaggcaaatcccccgttcgttctgatcgaaacgaatgccggagagcggaaggaaaggttctctcacctcggggcggcggcggcggtagccgggagccgggagggagaggagaggaggggcgacgcgggcggaggaggaagtgaggaactcgtgagcgggatgggggggaggggtgcaagggcggaagatatttttatagcggggggcgcgcgggggattgcagatttggggggaggatagcggacgggtggccaaaagagagaacggacggccaaaagcgacggccgacgggaggggagatatttctgtccggccaccacagatactttctctgcgccagcggacgcttccaacggtccgaaaaagagaattgattaggacaggagggatgatggcgtggcgtttgcagtagtatggggacggttaattttgggcctgtttattgatgacgttttcagccatacaattatttagtaaagattgaattacgttttgggccagattttattacctaagttttattttggaccacccttaaacatatcttttcactttgaaccggataaatttgctattgttataatttggaccaccacgaacgattttttcagtacaaacaacgaccttaagcacatcagctctagtatacagccgaactcttctatgtatggttcatatgtttgccaaaagagaagttagacgtgacgagaaaagttgttcatgatagttcaaaccgtaataatgataaatttacccggtccaaattgaaaagatatgtttaagggtgatccaaattgaaacttgaaacttgggtaataaaaggtggtccaaattgcaatttactctttagtaaaattgataattatatgaatatatttagtttgttactaaatattggtaatgtgtatagaattttgacaacattattaagccaatcctatcaaaattttgataatattgtcgatttataaaattttagaattttcaaattttgataaggtttatttggcaccaattcgaacaaaccctttgttcgttggttgaggtggtattgtcgtgctatcctctaccgaacctcgggtgttgtatgttagtgtttgatatgctatatgacggatgatactgtaccggtggggacggtattgtgctaagaatataatcccacgggacatggattgttttgttcgccgagagaaatggacaaagcctttttcactgtgtatatagggtctaaatcatcgtttcaagtgacgaatacagggaaatacatgagaaaataactactccctccatttcatattactaagttgtttgacttttttttagttttacttaagtttatagaaaaatatgttagtatttcaactcaaaataaatatattgttaaaatatattcaatgttacattaaatgaaactaatttgatattttagatgttgctatttttctgtaaagttggtcaaacttaataaagtttgactaggaaaaaaaaccaaataatttataatatgaaattgtggggacacccgataaagtcatggtgtcccacgaatacgtaactgcccaggatgttcagttacgcatgaaatgatataaaagcataaacttcgattatatagtacttaagtcacttaattcacaacacaacataaatacaaaccattacatatatggcctataaagccttatttctacaaacagataaactgctagacttcaccacaggaactgcctgagcgtaggatgacctagaaaccatagctgtcccactctaacgggtcaacaggatcttcacaagcatcctcctcatgatctgaacccatttatgagtacaaaaggtactcagcaaaacatgcttatgatagcaaatgcagtaattgcaatataaaacatgcagtattaagagctggaaggtttaaaccctaaccttaacagttatttcatagagcctatcttaataagcatttgatataaacaacagtattgaacatttaatttaaacaataataacgagcataaaaatataaatgttacctataaataacttgaatagaacatcaagtaataaataaattaaccatattaattaatagccatttagtttaacttgtgcccataatctggaatcacccatagacacatctccattaaccgggagcacggcgtattcgaatactcaacgactctgcagtgtttgcccagctttacccacacgatacccacagctggccgggctgaaaagtaacaaggtgtaatattgctccatatatctctcccttctacctagtaagttaaaggatgctcgggatgttgctcggagtgatccggtctgaggtgtgtaccaacctacctccgcatccacttaccattgttcgttactcgatgggcagcccagaacttcatgggcccatagggcagttctgaactctcggggcccatcgagcctacatatataaatcatataaacatgaaccatgtcactttgcttcacacacttgaaagctaatggccagtacaccgaaaggcctgcagaagttcaatcaattggagcaatatacggccaggttcgacaaatcgatcctgtggatgggcgaaactatatcattcttattgacaaagggggttgattattatatcaattttaaataagaaataaccataaatatatccatatatccatcacgaccataaacaggtccataaaaccaaacacatgaactctatcatgtgtaccacccgctcacatgcggtgtcaacagttcttagcatatagccataaatagttccataagcatgttttcatatgcaataataatatccatattaaatcaatagcatgttaaataatgaaccatttgcttaggtgtttctcaaattttatcctaagtttgttagactctaaggctcattaaggtgtttataacaacaacagaaaatataatgcaataatagtaatataattaatttaaaagaattcgtgcagtctatcgtactccaaaggacaagtacgctaccaaaataactctctaactactgggattaaattgttcaagggagggtgcatgtcttgcaaccttcgggctcgatgtagtcgtacaaaccatctcctcctggcgcggagatttcacttgctccgactaccggaccaacgtcaatgctttctatttacgcaacaatcatcaccacaataaaataacagaaaaataaagccacccaaaagaaaatagtaccccaaagtgcaacaatgggtgaaaaggatttaaagaaataattttagggatttttggaatttcggtgaacggcgttgtcggtgacatggggccggggggtatcatgactagaggcttggggagccacggtcacccacgtggcctgaccccctcgggggggtcgggcccgagggtgacgtggccacccctccctccctctgtctccccgaggggt

SEQ ID NO: 1457 - DNA, 32681 bp, Oryza sativa
  unsure (1)..(32681): unsure at all n locations
ccgaccccctgtggtgtcgccgccacgtgtgtgggttaggtgagcacagcggcgctcacctaaccgcatttatagcgggtcagacgcgcgcgccacgccgcattcaatgcggcgcagcgcatgcttatccggtccatgaccggtcgcagggtgtgaccggtcacagaccggtcagatcgcgggttaggtggcaacaggcggcctgtcgcacgcctcgccccgtctcgtcggaatgatgagagcttcctggctcttgtccctagccggagccagcgtgctaactcctggagttggtatgtcagtcccggtcagatccattccaggcttcagcgcaagtatagcaaggaagtcgctggccattaaatgaaggttgaaacgggcgtccaccgggagagcgaacgagcggagcagaaggcgtgtgctctgcttgtcagaggtcacttccggctgtagactagccctcattgtaaaaagcatgttcctttcttaggcagtaagaggcccatgtggtgacccctaaccagataaaaaggaggcccaggcctaagaaagagagaagaaaaagagggtgctggagcggaactctctctggctctccggctctcggtaattccttcacacacagatccaccagaacacaggagtagggtgttacgcttctcagcggcccgaacctgtctacgtcgcccgtgtcttgtgcgcttcctctctcgctgacattcctcagatcgagggcgaagaacctcacttagcgcccccggccgaaccggcaaaggggggcctgcgcggtctcccggtgaggagccccacgctccgtcatctggcgcgccaggtagggggcgcgcgtgtctttctaagccctcgtcctctttcgtgtgcgccaagcttctcccgctcagcccaatggccgaacgggcagtggcgcacaacctctctccgaacgctagcggtgacgacggggagcagaacccgcgccgtcgggctcgcaccccaccgtcccctctcgccgaaatcttgggcggggagaggcgctcggggaggtcagaggatccgcgacatcgccgcccgcgggcgacgggggaggacggtgtaacgccccgattttcgttcgggtttaaaaatcattaaataatgcattttctagaaattaaataaaagttaaatcaatttaatcaagtgaaataatgggagaattaaaattttcccttaaaaatcattggccgggaatattttgcaatattctttgtgccctaaaatactctccggatttttccgtgaattttcggagttcaagaaataattttaaagtcacaaagttcattaaactaatttaaataaaaagaaaacaaaataaacttccccttcctccctttcgggctcggcccaaaatcctctctccttcccctcccgcggcccggcttgcctccccttttggcgcaagtctgcttatcctccctcccggcctcccctctcactcaggccgacaggtgggacccgtgggccccacctgtcatccccaacctccagcccgggccggcaactgccatggccgcccgagccgcccacgtcgccgcccctccccgcgcgtcttccgattcccgcgcgcgtgtgggcgcggtccaccccacgtcatccccttcctccaccatttcccccacttctcccctccaaaaccgacgccaaactgcccccactcacccacgtcgccggcgcccctttcccccttcaaatccgtcgccaaccggcctccccgtcgactctcgaggctataaaaacgatccccgggctcccctcctccgtttccccctctttcccaagcttccccatgcccgaaaccactccgccaccaccaacctccctccgccgccgccggttgccatcttcggccggccacctccgccgccgtagccgtccccgcgccacaccgcttgcgccaccggcctcgccacgcattgtcgcacaccgtccgcaactccgtttccccaaaccacaatcaaaacaccgattccatcgctcacccgagcaccgccgccgtttcgccgccttcggcagcctcttgccgccgttcccgtccacctcatgccgcgctgccaccaccactagcttcgctgctccgccggcaagcccggccaccacgccgctcctccattccacccccgagccgcccgctccacggtgaacccgagccacagccacttttgtgcctccagtcgcacctctgccgtcgccctggccaccgccaagccgtgccgtttccttcaccggctcggccgcttcaagccacagatcggtcgccgctccaaaccaccggaaacccaccggtgctccattcctttcgatccccggtgagcccgccgccgcctaatccgtgccgccggccacctcctcgtcttcgtctcgccgccccattcgctcggtgagaaccgcctccctctccactctctcgccgcctctcgcgccgtcgccgctcgccgccggcgtcgtcgccggtggtctaggctcggcggtcgccgccgcctgtgggcgtgcctgcctggtcgtgccgctcggccgcccccggccgtccgatcggccccggccgatccggagcgtcgggtgcgcgcccacgtggccggctgccgccgtggactcggtccacggtgggctttgccgctgacgtgtggggcccgcccctttgtgacgcggtccgcgcctcaccccttgctgacgtcagcatagcctttttcctttgaaaaattaaataataattgcgcaataaatcggtaataattgtagaaatccattaaaatggctcaaaacttctaaaattcatatctaattcattcgaactccgaattgagccattcaacttgcaaaattcatctaaaattgagctctacatgtttgtttagtttttatgtactgtttccttggtttttattagagtttgtcctcgttttgcgtgccagcgtgtagtttccgtcgtttcggaagtccgcggtcgcgaggaaaagagttcggaagatcaaagtgaataagcaaggcaagtcacatattccccttgagcatgttgatcccaatttacaaatgttttactgtttgcaaataaatatgcatattttgctaattacatggggtcagggtattacctatctgctcgcttgtgccatgtttacttgatatctatcctttgtcaaccgggggtaataaatcgactagctcatgttacttatgtgacctagctagaactatatgcttagccatgcttaattaccactagctcagttgatgggataattacagtattagacctttctagtatcttgttgagctgcgtgctcgagacatctggccatgcttcatggtcgtaattatccaactaaaatgcaactgaatggtgggctgtgggtgcatggttttgctggtcgcacccatggcagttaaggaccggttcgcgggatgccctggaagaacttatcgtacttaccacaagccagcgtgggcaacggctgggcttgtagtgtagctttcctctagccgacgcatccaggcaagggtgggcgtgatggagtttggatgggccctgcgacggcctatgtggcttccggattcacctaggcacgagaggggactgcccgctgccttgcgaggagtgggggtgaaacctgagatgtggtgtgcttggttagagggggttatgcgaagggtcctgtcacggcctctttccggtatgtcgtggtggcatgtcggcgcacggaaacgtgtcgtggggctgtgtcttgtgggtacagttgtagacctctgatcagagtaaaactattcgaatagccgtgcccgcggttatgggcggtcgaccagattcaccgtgattagtcccaccttaataaatcgactcaatgcactgtagttcaggtgggttggttgggcctgttcaacgtggtgtagcgttgatcagtggagatttaatgttactttaattactcaacagttttactgttttgctcaataaaatgttttacaaccgcctttatgcaaatagccataaaccgtccttgtgttccccttgcacgtctgcatcgttggtgtggcttgctgagtatggtggttgtactcagccttgctattattcccccttttcagaagtgtagtgtttctgagctgaagatggagttagaggaccaaggctcagaccccagttgagttttgcgtgtggagtggagctgaagccccgctaggatcgcctttttccgctgctgctgcttttgtttcggtgtgaggactaagtgcctcttctgtaagtattttacgcgttatttacgtttggaactgtttattacttgtcgttttgtgtaccctggctggtcctggacagggatttaatacacaaaatagtctggaaatttgggctaaatttctgggcgtgacagacggcgagacggggcgcgtcgccgcctcgtctacggcgatggcggcacgccccagggcgcgctccaggctgcgggcgcgctcctgcgtcacccgcccgtcgtccccgatccagagactccagcccgacgttggctggatgacgtggccgacttggtcatgacggcgcagcagcgcctaagcgccggcgggcggtcctccgccaccgagacctctggcgctgccgccgccggctccaggtcgtcgaggcggagggcgcggcgagcggcggccgttacccgccgttcgtccgccattccctcatcaatgcctccgacccaagaagatgtgcgtggggggccggatgcccgcctcgatatcgagcgccggcgcgactctcgtcacgccgcccacgcaacggagggcgcttcctcgtccgaagcgccacttcggtccgggcacgggggccggccccccgtgtccccggttggcggtgctggctgtcgagcctttgtggcgagccttcggaacgtccgttggcccccaaggttccggcccaccatcaccgaaaaatacgacggaagcgtcaaccccgccgagtttctccagatctacacgactgggatcgaggccgccgggggtgatgacagggtcatggcgaatttcttccccatggccctgaagggacaggcgcggggttggctaatgaacttgccacccgcgtcggtccactcttgggaggatctgtgccagcagttcaccacgaacttccagggcacatatccgcgcccaggcgaagaagcggacttgcatgcggtacagcgaggggacgatgagtctcttcgctcgtacattcaacggttctgtcaagtccgcaacactataccgtgcatccccgcacacgcggtgatctacgcgttcagggggggcgtgcggcacaaccgcatgctcgagaagatcgcctccaaggagccccagaccaccgcgcagctttttgagctcgcggaccgtgtggctcgcaaggaggaggcctggacctggaactcctccggttctggtgtggcagctccggtcgcccccgggtccgccgcttggtcagagcggcgggacaggaggaggaagaagaggtcggcccgtcccgacgacgagggtcatgtcctcgccgtcgagggcgcctcgcgggccccccgaaaggggaggcctgcgagcgacaaaaagaaggaggccggcgctcccagcagggagcgcccgacgggcaagtggtgcaccgtgcacaacacctccctccacgacctcgcggactgccgcgcagtcaaaagtttggctgagcggacgaggaagtgggagaaggagaagaggcaggagcgccgtgagggcaaggccccggcggctcccgccggcaaccggcgaggtgaggccaagcagaaggcccccgccgaggacatcgacgatggcgacgatgacctggggttccaggagcctgaggccaccgtcgccaccgtcgatgggggagcgtgcgctcacgcttctcgccggagcctcaaggccatgaagcgagagcttctggccgcggcccctacccatgaggcgactcggcgggcgcggtggtcggaggttgccctcaccttcgaccagaccgaccacccgccgtgcgttgcccggggaggacagatcgcgatggtggtttcccccaccgtttgcaatgtgaagttggggcgtgtcctcatagacgggggtgcagccctcaacatcctttcccccgcagcctttgacgccatcaaggccccggggatggtgctccggccgtcccagccgatcatcggtgtgacgccggggcacacctggccgctgggtcatatcgacctcccggtcaccttcggtggttccgccaacttccgcacggagcgggtggacttcgatgtggcggacctcagtctgccctacaacgcggtcctagggaggcccgcgttggtgaagttcatggcggcggtccactacgcctatctccagatgaagatgccgggccccggtggccccatcaccgtccatggcgacctcaaagtcgcgcttgcttgtatggagcagcgcgcggaccacctcgccgcggcgtccaagcccgcgggtggagacgagaggctcagcacctccgtcccggccgccccaaggcggcggatggtcacgtgcgacaaggtcccggtcaaggaggttgccctgggcgacggcccgtccaagaccacacgaatcggtggtcttctggacgacaaataggaagacgcgctcgtctccttcctgcgggcaaacgccgacgtctttgcctggagaccggcggacatgcccggggtccccagggaggtgattgagcaccgtctcgccgtgcggccgggtgcaaggccggtccagcagaaagtgcggcggcaggccccggaacgtcaagccttcatccgcgaggaggtggcgcgacttctggaggccggattcatacgtgaggtcatccatccggagtggctggcgaacccggtcgtcgttcccaaggcgaacggcaagcttcggatgtgcatcgactacaccgaccttaacaaggcatgtcctaaggacccttaccccctgccacgcatagatcagattgtcgactccaccgtggggtgcgaccttttgtgttttctagatgcatactctggttatcatcagattcgcatggctagggaggatgaggaaaaaactgcgttcattacccccataggaacttattgttatacgacaatgcctttcgggttaaagaatgcaggtcctacttttcaacgtactactcgaatttctttgggtagcaaattaggacgtaatgttgaggcctatgttgatgacttggttgtgaaaacgcgcaaccaagagaccttactctcgaatctagcggaaactttcgaaagtctccgctccgcccgcataaagctgaaccccgataagtgcgtgttcggcgtgcctgcgggcaagcttctcgggttcttggtctctgcccgaggcatcgaggccaaccccgagaagatacgagctatagagcggatgcgcccccccagcaagcttaaggatgtgcagtgcgtcaccggctgcatggccgccttaggtcggttcatatcaaggctgggagagaaggcgctacccctatttaagctcctcaaacgctccgggccgtttacctggatggaggaggctgagagggccttcactcagttgaaggcgtacctcagttctcccccagtcctggtcgccccggagccagatgagccgttgctactctacctggcggcaaccccgcaggtggtcagcgcggcgttggtcgtggagcgcgacgaggagaaccctcactccgcgcatccccaccctgtgtcgactcgacccgggagagagcagggaggagaggcccccgagccgaacggcggcccgaggcccccaacggccggagttggccctccgcctgcttgtccgacggtgccaggcgcccccgacccccaggatggccccggggccactgcgggaaggccgcgcctgtcgcctctgaccccgaggtcgtcggcacagaagccgagtgcgccccgcgcggcctctcggacgaagagcgccctggagatgcggccccaggcgaagaggatcggccccgccgaaaggtgcagcggcccgtctacttcgttagcgaggccctccgggacgtcaagacccgatacccccaggcccagaagatgctttacgctattctgatggcttcgaggaagttgcgccattatttccaggcgtatcgggtcacggtggttatgtcttaccccctcggccgaatcttgcataaccgagagggtactggacgggtggtgagatgggcaatcgaactctctgaattcgatttgcgctttgaaccacgccacgcgatcaagagccaggccctcgccgactttgtggcggagtggaccccagctcccgagcccgtccccgctcccgaggccagctcgggcccctcgcagctgccccacaccgcctactgggtgatgcagttcgacggctccctgtctcttcagggcgccggtgcgggggtcacgttgacctcgccgagcggagacgtcctcagatacctggtccgcctcgactttcgggcgaccaacaatatggcggagtacgagggactccttgcgggactcagagtggcagctggactggggatccgccgcctcctggtgttaggcgactcccagttggtcgttaaccaggtctccaaggagtaccgatgctctgacccgcagatggacgcttacgtgcgccaggtgcggcgtatggagcgccatttcgacttgatagagcttcggcacgtgcccagacgggataacgcggtcgccgacgaactctcaaggctcgcttcctcgcgagcccagaccccaccgggcgcctttgaagaaaggcttgcccagccgtcggcgcgacccgaccccctaggggagacggacgcgcctgaacggcccccgaggcccgtcggagtccaggcctcgggacccgaggggagcgctcccagctcccctaggttgattgcttggatcactgagatccaggcgtacctcgcagatatgactctacccgaggaccgcgaagggagtgaacgcgtccggcgcatctccaagcgctacgtgctggtggaggggaccctctatcggtgcgcggctaacggagtcctcctgaagtgcattcctcgggaacaaggcgtcgagcttctcgccgatatccatgaaggcgagtgcggagcccactccgcctcacgcaccttggttggcaaggcctttcgccagggtttctattggccaacggctctcaacgatgcggtcgacctggtccggcggtgcagggcgtgccagttccacgccaggcaaacccatcagccggcccaggccctgcagaccatacctctttcgtggccgtttgctgtctgggggctcgatatcctgggtccgttcaggcgggccccgggcgggttcgagtatctgtatgtcgctgtcgacaagttcactaagtggcccgaggcttatccggtcattaagatcgataagcactccgcgcttaaattcatcaggggcatcactgctcggtttggggtgcctaaccgtatcattacggataacggcacccagttcactagtgagctcttcggtgactactgcgaagacatgagcatcaagctctgcttcgcctcccccgcccaccccagaagcaatggccaagtggagcgcgccaacgcggaaatcctcaagggcctcaaaaccaagaccttgaacatcctcaagaagcacggcgactcgtggatcgaggagctgccagcggtgctctgggcgaaccgaaccacgccaagcagagcaaccggggaaacgcctttcttcctcgtctacggcgcggaggcggtcctcccatctgagctcaccctgaggtcccctcgggtcaccatgtattgcgaggctgatcaagatcatcttcaccgagacgacctcgactatttggaagaacgaagacggcgcgcggcccttcgagccgcgcgctaccagcagagcctgcggcgctaccatcagcgccacgtccgggccctatcactctgcgtcgacgacctcgtcctacgccgcgtccaaacgcgtgctggactgagcaagctctcaccaatgtgggagggtccgtatcgagtgatcggcgtcccccggccgggctccgttcggctggccacgggcgacggcacagagctgcttaacccgtggaacatcgaacaccttcgtcgcttctacccctagtgggggtcgggtgtcatgtctcgggctcgggcgaaccccgcaccccccctcgggcgtgcagggttggccgggggctaccacatgcatatacttatcttttttctcttccgtatttcaataaaagcattttcgatttcctgaggactgtgtctgtgccatcgttcccttttgaagaatcttggcttggattagcacgctcgtgcccgaccctgccctcggtggcccgggccggctaaaatcgccaaacggggcccagaaccgagccgtgccccggggcgtggtgaactccgggggggaattggcaaaggcccacaatcggggcactagcctcaaaccgcgctcccggcctggccagtctcgacacgtggatctccccaggcactagccccgacccgcgccgtttgaggctggggcctgggcacgagcccttgttcaagccaagacacagaaggactgcggcacagaccatcctcgtctcatgcacacgacaaacagaattgacacagaaatttcctctttacttgattacagattaaatcagtctatacaagaagggggcccgaaggcctcggaagaagaaggaaaagttattaagattggcggggccctgggggctcactccgacgcgcccgggtcgccggcctcgtcgtcgctgtcgtccgcaccgtcgtcaccgccctcctcgtcggagtcgagggcgaacgcgagccgaggggccgtaccctcgaagctgtggacgatgtggtcggcggcgtcccggacctgcgcgcgcgcgccgtcctcggttccgggagggaactcgtccagcgctgcccacggggagaagtcagggtccctggcctggtagcttgccagtacgagctccaccgccccccgggcgaggtccctcgaggatgacttgatcgtctcctcgagctcctcggggagccgctggagggtcccggccatctctgagaggcgctgggcgaggcccccctggttggcggcgtacttcgcggtccgcccgccccaaaggcccgcctgccgcccggcgcggtctagacgggagacggcgtcccgaagcatgccaggccctacctcgctcgccaagcggagggcctcgacctccccggcggacgagtccagtgcgccatgcagcccggcgatggtgtgctcggcggctgtgaggcgggcggctaggtcgccgtcgcccgcggccgccccgccgctgtgagccctcgcgtccagctccttcgcccgcgcctcgagctcagcggcccgctgatccagtgcggccctctcggcgcgggcgccttccagattgcggcgcgcctgctcctcccgcgctgcctcgcggaggaacaggctgtccgccagccgctgcgccgtagcctcggcctcctcgagagctcgcccccgctcggtgagctcgtcctcgcggaggcggagtgcggactcctcttcggcgcaagcggcctcgtgcgccgccagtgttgcctcccgggtggcgacggcggcctcaccgtccgccaggtctctctccttcgcgtccagggcgcgggcgcgctcctccagcgccgtggcgcgagcctcgagggcctcttcgcgctgtcgggacgccgcctcgttctccgccgcccgccgttcccgggcagcggcggcgtcaaggactccctgggcggcgtcgagcttcttctctagctccgccgcccggctcccgtattggaggcggaggtcgtcccgcgcctcgtcgagcacggcggtggcgatgagggcagtctcccgctcctcctccacctccctagcgatctccgccaggtccctacgacgggcctcgagctctgaggcgtgccggcggtgtgccttgcggcccgcctccaccatggcctccaccgagcgccgcccctcctcgacgcgcgcccatgccgcgtcgagctccgcccgctctacctgcaggacctccatctgggcacttaacccgtccagcaccgtgctgttcgcggcggccaaggcctgcaggaggggctccgcgctcactggggcagcggaaggcagaggggagagccgcctcggtgtgggtgccgcgcgactcggcccgccgatcgacgtgccggactcgggggcgtcccccgaagctggctcgtcccaagcgtcgcccgaggggtcgggcccgagcggcgcgcccgcgacctcgtcgtgggtggcctcggaagtcgtcgtcgcctcgggcggagtcgggtcgggggcttggcaggccgcctggcatgcgcgcgccgcttctgcctcccggacggactccccggcccggcggagtctggcctcctcccgagcggcctcctcagcctggcgaacccggacggcctcctgggcagccttctcggcttcccggaggcggtccgcggcttctcgccggtcagcttcctgcctccgggcctccgcggtcgccgtctcctcggcctcagaccggccggacttggaatggcgggggggggggggcgacgggatctcgctgaggcagaagaaaaaccagaagacaaaaagaaacgggtgagtgaaaactcgccttgggagatgggagaatgaatacggccgcggtgggcgtggggacgaacctgcggggaggtcggctaaacgaccacctcgggggcgagatgagattcccccggcatggctcggtcccccccatcttgcggagccgcttcttcttccgctccccctcgggctgcagcgtcggcacggcaccctctgggcgcctgctgctggcacgcaccgccccgccccctcggggaggagatgggggaggggtaccctcctgcttcctcttcccccgggcgtcggcagggcggctgccccccgggcccccgtcgcggggcccagaaacacgaccccctcccggggtagatggttcccccctgcggctcccgcccgcgccatcgtggcctcggggggcccgctcccccgacgccccgaccgcctgcatgatggtcaggatgttggcgcgctccggatcgcagcagagggggaggactccttgggggatgagggatgcctccacggagctgagattcagcacccgttggaccaccatcttgaagtcttcagggacccagtcccatttgcgtccctggtgggtcctcatgtagtcctcgggcccggtgtactcccaggcgccccgggagcgccgttggagcggcgcgatccggcgacgaaggtagtcgccgaacaccatggcccccgtgagcccctgggatcgcagacccgccaggcggtcaagaacggtgtcatagccgtctcccagatctaccgtcgcccgccagctggaggcctgcgtcgggggctggctcggaagtcggaggcgcgcttcgtcggcgaggggggtgtagaaccagtcgctcttccagtcgtcccacttcttgcggagaacgcagggaatgtagcggttcagcacctgcccccgcggctggaagtagcagccaccaactaccgtcggcggcgacaccggctgtacggtgaagaaccaccggaacagccggagagatgggcgcaccccgataaacatctcgcacaggtgtgcgaagatggctaacgtcattatcgcgttgggggttaggtgcgccatctggagatcgtaaaactccagaatatccatgaaaaaagcagagaatggcgggaccagccccgccattgcgaaagagaggaagaagacggaccgccccgggtagtgtggcgccgggcgtccctcgcccagcgcgaccacctcccggccggcggcagattccggcatgaatcggcgcggcagcccggcctgcctctcgctcacgatacgggaaggcggcagcacgctaccatcgagcggtgcggagccccgtgccatgacgccggcggaggaggagcttgagagcgagcgagtgcggcaagggtagggcacaggaaacgaagagttagagcgcaagtggcgaaggcaaggggaagagtggcgaggggaaggaaacgaatcccttcctcggcgtctttattcccttgccaacgctatgcccgtctcctcgcttcccgcgcccactacctcgccccctcgtttctcgcgcccacgcctccactaaccccactcgcccgtttgcggcgcgcgcggcagatgtgtggccgtggcggttgagatggggcagatcgtgcgcgcattaactgcgctcgccaaccgagaaaaacgccatcatcatgtctccaggcgaaacgaaccggctcgtcccgattcgcgcgctgctcgagtaatgtagcggtcttgaagaggccgctcattattatcggtcggttttcccttaccgatgcacgcgatttacgaccgctgggtttctgcccgcctgtagagaccggccccacctgtcaccgggcctaaggagtgacgtcacgcccgagcgcttccctcgaggggggcgatcgccctgacgtaacgccgggggctactgtcggtgacatggggccgggggtatcattactagaggcttggggagccacggtcacccacgtggcctgaccccctcgggggggtcgggcccgagggtgacgtggccacccctccctctgtctcccggaggggtcgggccgctcccgtttcggccccgagggctggggcgccccgaccccctgtggtgttggcgccacgtgtgtgggttaggtgagcacagcggcgctcacctaaccgcatttatagcgggtcagacgcgcgcgccacgccgcattcaatgcggcgcagcgcatgcttatccggtccatgaccggtcgcagtgtgtgaccggtcacagaccggtcagatcgcgggttaggtggcaacaggcggcctgtcgcacgcctcgccccgtcccgtcggaatgatgagagcttcctggctctcgtccctagccggagccggcgtgctaactcctgagttggtatgtcagtcccggtcagatccattccaggcttcagcgcaagtatagcaaggaagtcgctggccattaaatgaaggttgaaacgggcgtccaccgggagagcggacgagcggagcagaaggcgtgtgctctgcttgtcagaggtcacttccggctgtagactagccctcattgtaaaaagcatgtttcccttcttaggcagtaagaggcccatgtggtgacccctaaccagataaaaaggaggcccaggcctaagaaagaaaagagaagaaaaagagggtgctggagcggaactctctctagctctccagctctcggtaattccttcacacacagatccaccagaacacaggagtagggtgttacgcttctcagcggcccgaacctgtctacgtcgcccgtgtcttgtgcgcttcctctctcgctgacattcctcagatcgagggcgaagaacctcacttagcgcccccggccgaaccggcaaaggggggcctgcgcggtctcccggtgaggagccccacgctccgttaggcgtaccctagggctaaaattagggtggcgtcaacgggtgctcggattgcaacgaaactgacacggatggattcagaataattctaggagtttgttataggtctcggatttcgatttcgaggtcaaacagatgtcaacttgataggaaaataaaaatgatttttcttatttatttttcaacaggaaaatcggatttcctgttcttctcgttctctgcacaggaacaggccggaatcccacattgccggtggcagaggaggccggttttggacaagggggtgccggttttgtgatctacgggttgaggcgattccgtttttatggttgacggcgagagaaacgccgacggtgaggctggtggcggtgggcggaaacgggaggcggaggcgactccggcgaactccgagaagggaggcggcctgatgaagttcactaaggctagaggagtccgagggtggcgatagccgaagttagggtggcctggagcggcggcgcgccatgtggccggcggcggccgaacagagcagtggcggcgggaggcgacgcttgcgacattccggcgatgaattggatgggtaaagagagggggaagggagtactcgtcatggagaatccaattttaccttcaatttctgaggatttgcgacgtatgcgacgaattttgaagctcaatcaatggcgtgttttggggatttttcctccggtgccgacgattgagtcaacggtggttggggcggattcttttgcctccggtcttgagccttctagttgagagacgaaggaaatacggaggcgggaagctggaggtgtcgtggcggcattcgttcgtcgttcgtcctcgtgcgagagcgtgcgggcgtgtggcgtgcgcgggctggcacgagctgggcgcgagcgcgcatgagcgcagcgcgggattgccgcgaggcaacacggggcggcacaggcgctggctcagcctagccgagtagaggaagaaataaaaggaaaaacggagagaggaagaaaaacagagaaagagggaaagagaaaggaaaaaaaatggaaaaagaaaattaaggtggaaatagggaaaaggaaaatatggggaagattaaaataaataggatttgaattgatgtggaatttagacggtccaacattcgggatagaattaaatcggattaaaggaattatttgagggatgatacgcactttgcgacaaaattaaacgagaaaagaaacaccggaaacaaacatggaaaataatattttaaataaactactaactcgacagttatatttttagagaatcaaagcaaactaaatcggttttaaaaagttgtcaaattttagggctgttacagaaatatagggagtaattgtatatcaataaaaaaactataggaggataaatattcaattccaatatagatatgagctcaattttctatgcacacaagaatgataacattttcgcacgcggtttgcactacccatatgaaaagatactgaaaataatttttaaatgataagtgcccttacagcgaaaaaaaatctttagacctagcagggttccagtcaaatgcaaaaaatcattttttatagtgcccttgcaacaaaaaaaaatctttatgcctagaaccaataggtaaatatacgtttaggtatcgattatctctacgtgaaacccacagcatccatgacgcgcatgagacccacccaggttcgtgaaaaaaaggcccccaaatatgcatcattaactctcaccgtacacaaaagaagtaacatatgtaatttggatttcccatcgcaacgcacgtgcatctttgcaattcttaaaagaaaaagaaatgagagatgaaaggaaaaggtccacttgaggtcccttatcttgtcgtcgagtttcaaaatcgtccctgtgaagcatctaggcccccgttgttagttttggtaattaatgacaagcgctaattgtggactaaccgttctatcgagttataagttttgagttaggttcacatcatgtgtgcacatggatgactaccgatggattaaaatttgatggcgcaaagcaaagaaaagaagatggttgttggtatttcttaacgacattactagaaatataattcccaacaatggcgcagaaatacttctggtatattatggttacagagttcatccgcaagcgcacggatataccattgtagcatttcacccgagagtattccaagggtatcgtatttattttatcctgtgggaagatcttgtagagagaactcaactaataatttatatgttacttgtgataatcatattttaagcaggtgttatgataatccaagtgtagagtgacacacaagcattacctactcatcctcataataaataatctaaactaggtggaaagaaaagagaaaggaaatctattcctatacttctaatatacctagtatacatactggctaataccctctatccgatgtcatcctagtacttcgagaagccacccctgactgccgagttccttacgacagctcatcatgaccatccaatcggggctaaatatggaggaataccctccccaggaaattaacttaggattatatataggcgcagaggaatacccgtactgagctatcaccatcagcggcccacctctcatccgcaatttataacctcaaataatgatatcccgtaatctagacaccacgtctaaactaccagatactactctaatatcatcgtcatgatatagagtaattgcataagcaaacactatacccgcaccaaagcatctcccagataagctagccatatactcagtataacaagaacataatgtanagttggtactcatatactcgaaaagtatttcaataccagaaatgtatatagaagagtattctaataaaagtacaaagcttacaaaagaggaaaggaaagctactaaagccatacccgaactcttccgaagactttcggactcctgattcctattctaattctattccaccagctagatactactaaactaaacttgagaggaatgagagagctcttgcttgaggtgtgtctttaagtgaagagagtgagctccttataaagaggtggttatgatggttgtggaaggggaattgtccgaagtacccctcaaccgccatcaagagaagatctggagcgtccctgccaaaccccacatccaacggtggagaaatgctttaattttaaattagtcgaggtgtagggcgatcaaatttgctagtttatttttagctttcgccgtactattaagaggggtaatgacctagcaaagagatgatttaaattgccacgctaggtcatgtttgcatttagacttgtgcttattttcatatcattgtatcttgctgttgctgtggtgagtgaccaggggcggtcaaaccgccacacagtggccggtcgctatgtggcggtctgaccggggcatgtcggccggtctgaccggccccctggtggccggcggcagcgctctgggcggccgatccagagccgccagagccgaggttggtcggaccggccacccaactgcggtctgactggccaggcagttggggcccaatgtcagccttgcaacggctagaaatctagacgttgcacagtagcacggtatgaccagccacacacctccggtcaaaccgacagtacactgagttgggggatttcgcccccaacggctagttttagttggtgggtgtcacaccccaatctagtatcaccgtacaacggcacctgacaggagcgtgtcgtagggaaaacggcgcaaaccgcttcctacgaaaccgcgatctcagtaccagtcccaggacatagcgctggtacccacgatgacaaatatgaatcattgcaatccttaaaataaatagaggacttatttaccttaacttagttgcaactcaggacagcccgagaatgcatccgacgacgcggacgaggaaacaccaacaacaacagcagcagcggaaccaacgatctaacacccaacaccacaggcgacggctgggaaccaggatgaaaccctattcttcacttcacttcatcttcaacttcacagcggaggaactatatatatatttgtatagagcaagggcgagtactttcgtactcagcaagtcacgggaacttaggtgtttgatgcaagcttggaagagaggcaaggttgttttgcaaatcctttgtttgaaatcattttgaagtcactaagtgatttatttctttctaagtttgggccgaaaagagacttgcgtctcgattctactttaagagatgtttttcaacaactcaattcgtaatgtaccgacctcccgggtcagatcattacttctcggctcctagagccatttaacttgattaatcggctcccagagcctttttcattttctcgaactcccagagtccagctgcccagcagcacaacaatttgcttccactcaggaagcctagtctatgatgcccgcagacatcccgaagcacacagattcgtttcagaccacataggtcatccatctgccatataggctgattctggtgacgattcccacaccacaacaatttttcacaaagcactgacaaacaaatctatgctataggaaacacctcatatccgcccatgaccgtgggcacggctgttcgaacagttagttaacctctgcagagggggtacactttacccacacgacattactaacccggatcacccagcccgtgagatcagccacgtcgggagatcctaaggctttcatgacaatgcatttcgaaagtcgacaccaccctgttgaatccacttgtctcttggcatcaaggcttccttggtttgctatttacttagccaggggcatcctattgcacccgtgtggtcacacttattatatgctcggatgaatttcccacaggaatcagtccttatatgcgaatacgggacaatgccacataggcacaacccccgcatcgtgagttttcacaatttattttattttcaaacacgccaacaccacatgtcgggttttcaaggcttctcaaacccacttcccaaattatcgacaaacaatggtgtatgtggaatagttagtatatgcgctcagagagcacggataccgaagtaccacaaaggtggagcaacaaggaatcagggtggtacggcctacaggaattagtgcgactactgggtaggtccgtcggtttggcacgcaaaccgaggccaagcaagttaagtgtgtgattctaataatgcaagttgtagacaaaataataatgactttccaattataggagcaattgattaaagggtgacttgccttgctcaaggtcttcacgaagcttcacgaatcttcgagaaatcccgcgattgacgaaaatccggtaatcgcaactatacgcaaacaatcgacaacctaaacaaaagaccaagaaaaagatcctatttggactaaataatagtgccattagattgatctcaattttagagggttactggaagtggaatggagtcaatcgaagttatgaattgcgagatatgaattttggaagtttagttggaatttctggaatacgagaaatggtttgtggaatttatagaaataatattctccagaatattattgacagtcactgacgtgcggggccaagggaaatgatttatggaatttcagaataaagaattgatttatggaacaaaggaaaaatgatttatcaaatccttttgggaaaggaaatcaaggagggatgtatattggacttgtttagggtggcattggtgcggcccaggtggcttgcgcagcgcagccgaaccgatgggctggcgcgcgcgtgtgtgggagacggcctaagaggggcgcgacggttgcgggctgaggcgcggggcgagtgggccggctgagcatgacccacgcggcgcggggcaggctggtggagcgaggccgagctattgcgggccggtggggcgagcgcggcccaggcacacgacgcgggcgcacatggctgcgggaagggtgagggctgaccgggtcagcttgactcggtcaagccgaggtggctacgacgtggccaccacgcgggcataggagagagagggaagcggtggtgaggccgaccggggatccaacggtccacggcgtgcgaggaattccggcgagcggcggcgaaccggagtgggcggcgggcaccggaagcgagagggggtaagggcggtcccatccaccggctcggatgagggagaggcggccggcgacggcgggatgggtggcatggcccgagcgcagccggcgaggcgggcgactggggtggcggtctgagaaggttcaaggggacacggggagggtcgcggcgcaagaaatcggcgagagaccggccggcgacggcggcggaagcagagctacggcggggcggcacagcactgagaggggcgtcaccggggaaacagagagggggcgcgaggagttacgggagggcgacgacgaactggttcgacgagagaaaagggccaacgacggcgcgcgactgcgtggtggcggacgcagcatagcgtgcggtacgaggaggaagaaggcggcgatgcggaaacagagcgcacagcgagctaggcgagtgcggggacggcgaaaaaggaaggtgaggagctcaccgacaggaggaacggtgtcggcgacgatggcccgatggtgagaagggcgggaagccagcggggagggcggccgggctccacggaggatggtgtttgcgacggcgaacgcggctcgacggggcagaattgcgtcggccgagtggtggtgcctggcggcgaacttgatgccgaggcgagcgcgccgggaaggagcaggaggaagacggcgacgagacggctgcagctccgaggttgacgaggccgacactgaggcgcacgtggccatagacacagtgcaacagcgggaaggaaggggctcgggatgggattttataggcgaggaggcgcttgactggcgctcggctagcgagcggcaatggcggttcgtgggtaacctgaaatcgagcgacggcgtggatgcgtttggatggcgaggtcggtggatcgggcggcatgaattgaatcgtgagtgcgggaggggcagctcggctagttcaaggtggggcgcgacgagctggcggctggcatcagcggcgtcagggcactctgcctccaagagcaaggagacaaaggtgggagagagaaaccaatgtccaggagggaaaaagaaatggaggacggtggaaaggggagcttgctccttccgttttggggaggtgcggcaggcgaggcgcgtgggagcggtatggggcacgcgacgcaggcggcgcaggcgcgacatggcagcttccaatagtaccacgtgtccacgtctgatacccatgagtatcagatctgatacccagttactaggtttgaatattgggttgaataccgaggtaccgagtatgatacctatgaatagcagatgagatagcgagttatcgagtctgatacctatgaccatcggatcgacccatgtaaacctaaagaggtgtacgggtagtgtcgtattggagtattgcatagctattttgtatcgtaggagaaaagagcactgccactagtcgatgtagacctgagggtctccaatatgaaaggacagcacacaacacgttttcagagataaaaagaatccaggtctgtttagatctcctagcaaaattttacaccctctcacatcgaatgtttggacatatgcatggagtattaaatataaatatccgggcctattgagatctcctagcaacattttatactctctcacatcgaatgcttggacacatacatggagtattaaatataaacaaaaaaaaattaattacatagattgcatgtaaattgctagacgaatcttttaagtctaattgcgccatgatttgataatgtggtgttacagtaaatacttgctaatgacgaattaattaggcttaataaattcgtctagccgtttacaggcggattctataattagttttttattagtctacatttaatacttcaaattagtgtccgtatatcgatgtgaccggctaaaactttacaccccttttaaacacccccttaggctgtgttcgctcctcctggttggtaacactcccgtccggcatgaaaaacggagcggtccattagcacgtgattaatttagtatttgcatttttttttcaaaaatggattaatttgatttttaagcaactttcgtatagaaactttttgcaaaaaacacaccgtttagcagtttaaaaagcgtgcgcgtggaaaacgagagagatgagttgggaaaatgggcatccgaatacagccttagtgagtaatggataagtagaatttatacactataccgttgagacggtacaccgtcccatatatttctccaacggtaatatctgcaacggtagcatcgcgtaaaagaaagagaaatctcccgtccggttgtctcctccgctgcttgcgccgccgccaagacgagtcgcggttgagcatgtgaggggcggcgatctccatccggcgagcagagcaggggagaggagaggatcctggtgaggggcggcgatctccatccggcgatcttctcgggcgctcgcgctcccggtccccccggcggcgatggcggccgcggcggttggggtggcgagcagagcacgccggagttctggctcgaggggagtggcattctgccgatggacgaacggcctcctccacccgcgcttcgtcttccccgaggccgccgcggtggcgggctctggggctggctccgctcaaggtacaatccgccgcgaactccctaggttttctttttggtggctcggttgcgggatctaccgcgcgtttgggtgctcggagattccgatgggtgcgcttgcttgcttgcttcgcgttccgatcgatcgttcatcagatcaatgtgatgtgatgcctgtcgcatgattcgagttctatatagtagattgatgcattaattcatttgtgtacttctctgaaatttggggatgtgagtagtaggttatctgaacttcacgggatgctatcggaccaaagtaattagagaatttccctagggtgtttgggtgctggattggagatgtttagagtggagactggacaatctacgttacaggagttcttctggtgctacgcatattttgtatccacttgtttaagcttatgctttaggaaatgtgctgctctgccccggcacacacgttgcattaggaaatgtgctactctatagtgaactgcggaattaattcctcaccatgtgttttctttggggatacagactgcattgcattgagaaacgccattatgccaatgaaaatttctccatatgcttcctatactggttcacatagtgttcaacactgtaagttcctgacagctggaacttacagctaggatgctgtaagttcctcacttcctgtgcccatgttctgaactgttccatatgcatttcccacttgatgttatttcaaattgctgtgttccacttttgggccatatatctggcagtaattcaaacagatatagttttgccaggagttctagctaacgtctcttcccggtccttgagatcacatctgcttggttttgcatgtcctattgtttgaaacttgctgcctattagaacctccttagttgtctcaatacttttacttttattactgctacattaattatcttgttgctgagccctgcaactaaaaccctcccccttcccccctctccactgcagagcacagcgcgaccacctcagacaaacccgaggttttcttcttctcctttttgatcgatgcagccgttgttcttgcggggaaagggttctttttttccttttttattttgtggaggcgcggctgtgggcgatgggcggtggctgatgatcgggggattaccaccaccttcgtgatctctcgtttttctctgtggaattggggtggatggatggatggatactctgttcatagatggcgacagtccaagtttattcctttttatttttgtatgttttttccttgttgggtttgttctgttgctgtagttgccgtttcttggcttcttgctttcaatgtgttctctcttctccttctcttttttctttctttcttttttgttgttgtctgttcttgggggtaagggtgtcccaatcgtattggacaagccttcgcgtatgtaactgattggaattggagtgtggagttagacgccgacaggtgaggcagatgaacaagagttcccaacccaaaagttcactaatgaagtgaagtgtaaataaaataaaaagtaaataaaagggagaaaatactaatagttgcttggggagttgggattctccaaaagatagtgtctttttttcttcctttttcggttacgcttggtgagaagatgatttatttggagatggtggacgacgcctatttctgttttctggctgtctaattctgatgatggcgtctcatgtttttcaggtgcgttttgcgtgaagcgggttttaaggatggttctaaacaaggtgctcgagctgttttgtgtgaagaagaaggattccaagaagaaaggtgctgcacagctgcactactgcccctatttaacatcatctttacgtcagctgcttctgtttgtttgattgatcctaggatgctttcctcatctgatggcatattatcagttcgtcttgtgcactctttcttccatgaattctgttttttttttcaaatatgaacgtgttttctggtgaaaggatactgcagattaaatggggttgtcataatggattgacattattggataattgtggctgctgtacattattgctatatcagatgctttgaggttaacaaagtataccaaaatgtgatatgtgtagtaaacttaatctcaacagattgagagtgctactagtgtgattggatatattcactggagagtgaacttgtgaatagtctggtattatgaatccatgagtcttggtgatcaatattgttttgaagtttgttaaactgtataatgaaaaaaaacttaatatttcattagcctgtatacccagccacgaaatccgcatctccctctgaagcatggaattctccttattttgtttcagaaagataaaatcaagtgttttgctcttctgcctggagctttctaataaaagaatattttcatgcaggcaaagccattaatcctctttgtaaagttatcttttcatgcaactttttcctccttgtttgtttttgtaattcttatgcttcatgtagctgaacctgttcttttaaaaaattaaaatgaacaaaaaaaaaaaaagccccccccctccccgtttacccccaaaggggatatttgttactttaacagaactacacattatctaatgttcatcactctttgctttgctgtcagtcggtagtattgatgcaagtaaacctcttttttgcagttaaatgagcttcagtatcctattctgtatctctgtctttaagattggtgtgcctttttttgtaacatcttggtttgaaactagttactctactggctttcagttgccgctccacaccccactgcaaatgtcagcacaaacaacagccttttggatcccttttcaactgggaatggtactgtgctatctgtgcaaaaacatgagcctgaatgttcaagtgttatatcatcaatgacaaggacagaatatggatttgaaagtgatggttgcaatttgtttagccattttgatgttgttcaagatttttctgaccattactatgcaaagaattcaccagggaaggtaagctgtgcgttttatgaattctatttctatcaatagatccaactgtgaattaatttcctgtctttatctgtggccactgatcagacctccaaagattgggtgaagacaatccaaaatgaatggaggcttctacagaaagatctacctggtcagtacatgcttttatatggcaaatcattgtattcaattttatcaaaccgtcagtgcctagatggtgaacacatataatggtcctttcttatactgacctctgttttatgccaattatatctgatccgtgtgacatgctaacagactatgtttgaaatctttcttgagttaaaggtagtcacatgctcagtttgggtttgaataggatatattcattggttataccaatttgtttgtggtttggagttttgttacaactgttgctgaatcccgaactagctaatgatattgtctatgcttgatgtataaaatactttattcgtgctatatctgatttatctgttagtttttgttaatgtgtcacatatcttttagttatggtctgcatttatcgtcccttttccatgcaatcttgtcatagaagcataacagtcttcagaacttaatcttgctaagtttgggtaatgggacaaatggaaaagaatgtacatatctcaaatcatgttgctgaaggaagctaatgtatcacaagtatcattacatacagtttacatttgcgccttaagtttttcgtttagagcaactgtgactgaaatagctgatgtcttcaatactagaaacttgcatctcagtctggtttcaatcatgcagaatctatctatgttagagtttatgaggataggattgatctgctgagggctgccattgttgggccagctgaaactccatatcatgatggtctgttcttctttgatgtttgctttccttctgaatacccacaatcccaccggtatgaaaccacttcacacacgctttccaccattattttcatgttactaccaccactggtataacctctttaaaataatatccaacgtgtacagaaagttcattaccatatgcatttcccacttgatgtaatttcaaattgctttgttctacttttgggccatatatctggcagtaattcaaacaaatatagttttgccaggagttctagctaacgtttcttcccggtccttgagatcacatccgcttggttttgcatgtcctattgaaacttgctgcctattagaacctccttagttgtctcaatacttttacttttattactgccatattaattatcttgttgctgagtcctgttttgatgattatgcacaaagtattcagttgttctggtacctaaatgagtagtttgcttgctggcgtatcacatgacttaaacaataatacttctctttttgtaactgaaattaagtcaataaaaagggaaaaaaaacttgctattacatacaaatcaagaaattaagtcaaaaaatggagaataaaagaatggtaccttcagtgtggcccaattgaaaggttggatgtgatagtatgccaagattgttaggtttacatagaatctttcgtgagaaccattgccattgtaagatcatccacaaagaataccatcaatgcatatgtattatcatcctgtgtacaaaaatagcaggcagcaaattaaccaataaaaaactgctcatagcataaacaactaaacctaaataggaccacatatatcattcatgttgaactaataatgagcagcaaaccagaacagggatcagtggctagatcaaataggtacacttgcatatagtatatagaaatcatagtacaacacaaagggaaaaatcgttcattgctttaagtagaactgcataccaaattgggtttatccgagtcgtcgccatacgctggtacagtcatggcttgttattgttgtcctagtcatggctgagccgccgctctcaatctctcttatcgtccctggcgtcctagccatcgctcggatctggcactaaatggagtggagagcgattagaagagggcgagagcgagggaggcgatggtggggtggggatggaagaggagaagatggtggcggcgactcgtgtccctcgcttccctgtggccagatccaccggtgacttatgcgatggcctctctcggagagagcggcggcggcgcggtgaagatggctggaggagggtgaggaggcacgcgggtgaggatgggtggcggcgctagttgtgacgacgcgggtgagaggaggagggcggctagggttttggtgcggtgtggtgacatctgcgccgttcattcccaatctgacgagcgcacggcttaggcagccacaaaggaacacgtgggtggtcagatcgacgttagtgcgagatccaacggacgacaacaatggggcctggcacgtaattaacagaactgtggtggctttttttgcaaaagtgatagctgacgtggcatccctacttccagcaatcccacggcatttagagagattaatatatccagtggtccaaaaccaaattggtgtgttggctggttaagagtgagtgcaacttttatacagtcgcatgtgcctgttaaatatagttgttagtgctccacttgaaaaagttgctgttatttgtttaaatcttatgctttagctggaaaacagtataatctctaaagcagcatcggcattttcgaagatcttaacatttggttgattatatgcagcttgacgcatgtgcacatcccttctttgatgagctacgagagcccaatgcacgcctgccatggcaaatggtcgtccattccctcctctgttcaacttcaagcatgaagtaagtaaacgagaacattttcgaacagtcgctttttatgttacatttatatttacctgtcatggatgcttatcaatgctcatttctgcaatgcagctaactggcgcctctccagaactcgtccacagactcataccggatcatatcagacggcaacatggcctcaacttgcgcatgctgggagttagaatggcaccgtaacgctcaccgttttgttcgtttatttttccatgagctggacattgcaatcctagatgactccattgtcttggattgggactccatctcagattgcaccatccatgattcttccatgatctatccatccgtcaagccatttccgcaaggactcagtaccagagaagtacaattatgtaaaatatctagccatgggagaaatgcgtgctgctgctgctggtgttaagtacgtgacagggcatgctggttgagtagtaggtaaggttaaggataaatgtagttggtggagactgagagacatgttaagctagggaaccctgctttctttttttctcctttcattttggtttcttcccattttgtgatccttagcattgccctacagtagtgtagctgctcccagtttttgtttgctctttcatcatgtaaatgccaatcccaatcccaatcgcaatgaaccctcttcctttacatcctggtctactccctgtgagtcttaggtctgtgagtttgtgctgctggttcttcattcaaggtggcttgggtgtgcgttctgatcgatttggcgtgacgtgtttgtttccgtagggaaggactgcaaggagaagcaccctaacgtcaagcaggtatcttgtggcgcgtttgtgttgctctgctgcattaactgctacaatgtgtgttctgacttggttgatttggtggtgacaagtgcaagtccatgtctgatgctgtgagttcctcacttcctgtgcccatgttctgaaccgttccatatgcatctctcacttgatgtaatttcaaattgctgtgttccacttttgggccatatatctggtagtaattcaaacaaatatagttttacccggagttctagctaacgtctcttcccggtccttgagatcacatccgcttggttctgcatgtcctattgtttgaaacttgctgcctattagaacctccttagttgtctcaatacttttagttttattactgccatattaattatcttgttgctgagttctgttttgatgattatgcacaaagtattcagttgttctggtacctaaatgagtagtttgcttgctggcgcatcacatgacttaaacaataatacttctctttttgtaattgcatttcttggttcaagcttatatctcagttgaccataggctatagtggaaagttcatagatcaaatatgttaagagtaatggaatctatttactctactgtgcatttaattgaagcagagatttcttaatctggttggctatttgatatcaggtgaaagcaaatatttgaatgatattatgtgaaacatacgacaggttttggcacttgacaaatgctttgttgacccacgttgtttattaaatcccacacaagaagtaatgaagagggcattataccattaacagatgctattcccaatattccaatcgtaagttttattttatgttggtgaaaatctagttttcattgttttctccataaatgccttgcgtgtgtaattcttgtacatatactccctgaactgttattaatatatttgaacagtatgattcatatgattctgtcccgtgtttgattaaaaaatttaggatatcgcctaaaagatgctattagctgttacaatcttatcatgagcaatttatgatctgcacaaccagtaagtgattgctaatttcacgttagaatgatggcatagagtagaatgaattgtacctttgtttataagttaaaaactttgggttatttattcttgtatttggtaatacaatgatgtcctgttgccttgcttctataacatggcaataataggtcgggctactcaatgtcgctaagggctactatggctcagatttaccttttttttaaaaaaggaaagcactaaactaattttaatttatctttgtaatgaatgattttttgggattgtgtttctgtgtgtgtgcgggagggggatgcgaatccgtatatgttgttaggggcatgcggatttggaaatttcaatacaccgggaagggcaaatttattgcattgttcatgtatatggtatttctctcaagtacaagagtacattgatgacatatattcagatgtttgcaaatttctttactgtaatcttccattatcagcttatagccaacaggaccagtttattacaagggtaccaagataagtttttttttttctagaaaggaagacaaatggaaaacctgctacaagt

SEQ ID NO: 1458 - DNA, 1469 bp, Oryza sativa
taagttacaacttgtttttttttagtttgatttcttcatttacaaactctctttttgggacttccttttggactttaaagctttattttatttctgaaatgcaaatttccataattttgtttgaacttatggttactaggttgtgaaaagaaaatatttacttacattccaaccttgcggctttttttttgtccctcgacgcttcatttttcgtccacgtttcaactctatgttttgagttggattttatttatcttcgaacgttcttctctattaatggttttgatatgctatttggactttaaaactttgatttggtttctcacttaccggttgttttttaatcccttagtttcagcttggtattttcagtttgatttcttcaattacaaactttcttcttggaacttcactttcgactttatagcttacttttgctctaaaatctcattttccgtaattttctatgaatttacgcttactagttttttttttctgaaatcctaatttccgtaattttgtttgaattttttgttactattttgtgagaaatatttgcttgcatttcaaccttgcggcttttttgtctctcgacgcttcattttctgttctcgtaactttatgttttgagttggcttttatttatcttggaacgttcttctctattaatggttttgatctactatttgaacttttaaactttcatttggttattcacttaccggttgttttctaatccttgaatttcaactcgatattttcagtttgatttcttcaagtacaaactttcttcttggaacttccctttggactttaaatatttattttacttctaaaatgtcaattttttgtaatttcgtttgaacttatgtttactagtttgtgaaaataaaatatttgcttacatttcaaccttgcgtcttttttgaacgcttcattttctgtcctcgtttaaactttatgttttgagttggatatctttatcttcaattgttcttctctattgatggttttgatatgatatttcgattttaaaactttaatttggttcctcacttaccggttgttttttaacccttgtatttcaacttggtttttcagtttgatttattcaattacgaactctctttttggaacttccctgtggactttaaagcttcggtttacttctgaaatttcgtttttcgtaattttctatgaagttatgctttctagtttgggaaaataaaatatttgcttacttttcaaccttgcggctttgtttccctcgactcttcatttttcgtcctcctttaaactttatgttttgattttgatttcttttcttcaaacgttcttctctattgatggttttgatatgctatttggactttaaaactttaatttggttcctcacttaccgttcgttttttcatcctggaagtacaacttggtattttcggtctgattttttcaattacagactttct

SEQ ID NO: 1459 - DNA, 2941 bp, Oryza sativa
  unsure (1)..(2941): unsure at all n locations
ttgagtggctgcccatcatgtagagtttgaggcataggtttctgatggaggtgtctctctgtggcacagatagcaaactcgtagctgctttggtgagagctgacatagcttgatccatgtgcacagtcgttatgctactgaacgctggggcatgtaggaattctgcaacatccaaatccagcttagttaactaccaaggtaggtgcctccaccgcgttgacagggcgcttgtctttgcaaccgtactaatgttgagtctcgccaagatatccaacaaaatatcgtcaggtagattgctgagcctatcgccctcctccgcttgctacaataattagattacacaaaatatgttagtggcttgaagcattaaaactctaaagaatactccctctgttttttaatagataacgccgttgactttttcttacatgtttgaccgttcgtcttattcaaaaaatttacgtaattataatttattttattatgggttgttttatcactcatagtactttaagtgtgatttatatcttatacatttgcataaaattttttaataagacgaatggtcaaacatgtgagaaaaagttaacggcgtcatctattaaaaaacggatgtagtacttataattgaaaccaagaacttacaaaggtgtgtccattatctatctccatgtggaatctgacttgccttctgcagcgaagctgctatgttgaaagcccaaagcttacgacctgacttttttatgcagcaacgaagttaagagccctttatgcgcntaggaagccaagaaacncaatgctngtgtttgttgttcatgacaaaggttcggctgcccttttgtgggggggacatgagcattgagagtccgactagaataatgatatgcccaagggctcccaaatattcccaaattttcttggttccaatagtcgccgccgatccgacaatctgcccctggaaatagcacactttctcctcggaggaggcaggagaaaggatactcaaaaataaccgacaatagtatatgaaagcgagaagatgagtagagtaaccacaggcgagcggcggcgtaccataccgtagttcggaaatcttagcgtggtagacgccgggcagggtggtgacgggcggagcggcggcgggcgcgcggcgggagatggggggattggcgaccgacgagcctaagaggaaggaggagacgaccgtcgggagatgggcgaggggagaggcttcatcgtttggcttattcatatatttacataaaaaaaataatttgtgaatacaacttttatatacgtattcttaacgatccaaaagtagaggctaaaaaataaacttaggtgaaaaaaatcccaaaaccaactctaaattaaatgttaaaaatttaaattttggctgataagcaaaagatggggctggaagtgcgaccatgtcgcacacacgggccacggcctcctgacctcaacaagggaaagcggagatgggccgatggctactcgtcacggcccataaaagctcgcttgttttgggccccatatattgggccgggcatcctcagatttctttttctcagagaaaattctgaccggagaatctctcgatcaacagccaacgtggtaactcaccgtgcaggccggaccgccagcagaattcctaattcccgcgtatgcgccgtcaacgcgtacttccggcccacacacgtgtttctttttctcttttttttttggcgcagttaatgtttgcagtgtcataattgtaaatcccccatttgctaccgccatgtttcttcctttttttttcacagttcgatgtcgcacgggtaggagaaaaaatcataattagtttactagtaatttttaaatcttaacttaaaaattttcagatttggtcttgaaagttttcaaatctcgagttgaaagttttcaaacctcgagttaaaaatttttaaatctcaagttgaaagttttcaaaattttcaaatctgaacttgaaagttttcaaatctcgagttgaaagttttcgaatctcgagttaaaaattttcaaatcttaagctgaaagttttcaaaattttcaaacctggactttaaagttttcgaatatcaacttgtcaagttgaaagtttcaaatctgagttaaaagttttcaaaatttgactttaaaatttgaatcttaaatcaaaagtttcaaatttagtttaaatttttgtcaatctgttaataaaaaaatctaaaaaaaagataaaatctttaaaaaaattcctaattactgttattaatgttaactaatagagatagttaagtgggaagtgcgcgctagcggcacactcgcctgctagccactgccactgccacagtgcaggttgcatgacttgcatcccaaaaacaaacaattaaccaaaaacaaaaaatcaaagcagtatagggagatggtgaggcagctttcggcttggacacttggacgtatacaccaccgactggctccgtccatgcttggctgctctgcgccgttgcctctctcatctttgaagatttgaagaggatgcaggcaatgcagctcgagacgaagccaaaaacagcgcctatgcaatccaagcacggactctctgtaaaataatacacactcacactactagtagtatactaccactacggtatactactatgagacgacgacgatggtaaaatatcataattcgataacgtactactcaaagtcaccaggttttttcttctctcttttttttgttgatgttttgtccacaaaccaggcaatacaaattccaatgttctttttgagaaacttcaccagttacggtggaagaaacaatcaacaataatacaatgtgaccatatatataggtacatggtacactaaactcagtaacagattctgcgctcccgcgcacgatacagccatacagtgcatcataaaacattac

SEQ ID NO: 1460 - DNA, 1521 bp, Oryza sativa
  unsure (1)..(1521): unsure at all n locations
agaagaaagacatctgaatttgagttaaaaggacaccaacntaggtggtgtgctgtgcatctacacctctcagttttggttttaattcctcttcactcaagacttgtaattgtccagaaggattttattattaggaacaaactgagactaacccttgtttgtgcaatcatttaaactcatcggtgtgctttgtttctgttttttttttctcttttcagctttgggtacaacctgaacaaaaacaattctgccctgcattcaacaatctaaagactttatctattctttgtgtttatgttgaatttgacctgttatgggctttaaacctccttgaagctgcgccatccgttgagctacttttcattgatgtaagttttcctttcgttttttcaaaatgtaacaacatgacagtaaatgtagctggaaattctcactatttgcaaaagatttacacaaaccaatttctcacactaaatgcagacctgggaacatatatgcttggtggaccaaatggatgaagagggaagaaaggatatctatggagaaagaacacatccttcatgggagatatccgagtttactggcaccagaaaatggcaattgaaaaaactccagttcactggctttaggccactcaagcaacaattggtctttttaaaggccatcatggagcaagctcgcaacctgcagactgttattctgaaagaggaagaaccatgcgaggactgtgaggcattaggcacgcctctttcttgtataaaagatcatgacttcccaaagtcgaaggatgagcaagacaatgtagtcgagcagctcagagagaagatttcttcggattcgcaaataattttccagtgtttgtaacatccccttcccaaattattttcctatagttttggaaaatgaatatatcctatgtacatccccgtgtacttgctacttgcaacggaggagttgtttgtcactgaataaatatctggaatttctattttagcttcatcctgatatccaaatacgtgtggaagtagttcaatgccatacgtactggtagcattaagaagaaccattgtaaatctaaccaaagatattactacctccgtcccaaaataagtgcagctgtaaatattcgtgctcaacgtttgaccgtccgtcttatttaaaaaatttgtgaaaaatttgaaaacatttagtcacacataaagtactattcatgttttatcatctaatagcaataaaaatactaatcataaaaaattttgagtaaggtgtattggcgatccttaaacttgtagggttatatcatatagttccctaaactctcaaaatgcatatccagatcctagaacttgtcaaagtgtatcatctgggtcccaaattaactcatcccctctaggatcctacgtgacgctgatgtggcaatgccacatggacgtgacgtgtccttttctctttttttcttcttttctttttagttttcttctcattcttttttttccttttttctgtacggtccacagcgaa

SEQ ID NO: 1461 - DNA, 938 bp, Oryza sativa
atttaagataaatcaaataggtttaaattaaaaaggtattcaaataaagaaatttaaataaaattttaaaataggaatttgatatcaaaacaaaagagtttgaaattagaagaatttaggtcaaggtctcactgggatgggatctgtggttggagagacatgggtgcttgaagattgaaatggaaattaaaggaaaaagatttactttatagaagtggggcccacatgtcatatgtctcttcttcctccggttcttctctccttgcttcgttttcttcctctctgttagccagggaaccgagaggaggagaggaagggcgccgatgctgtggtggctaagatatgactgcgccggtagaggatggtgttcccgaacgatgcgcatccggggaagtcggtggttggcaaagggagtgaaggagatggccggaacggcgcaggcaagagtatagctctggcaacaagaggaggtggctgtggtggttggtttcggaagggtaaaggaaggggaaactaggaaaatgagttcacctcgtcgaggcaaacccgatggcgcaaggatttaattagtggaattccggtgagggagatcggccgacggtaggtggcagccggacatggcaggagagagagagagaggcagagctcgaagagctcgattggtgtgtggaaaatggagggggttcgtcttcttatataggcggtgagaggcggtggcgaatgacggttgcgaaggcagtcggcgacttggccacggtgacggtggcgtggagaagaggagcacggcgtcggcggcggcacatctggaaggggcgagacggcgacgacgctgtggttgcagacggcggcggcggcaggcccacagggaagaggaaggaggcggctcagctggggctgggtcgcttgggctgaggagggagatgggctgaggggagaag

SEQ ID NO: 1462 - DNA, 1034 bp, Oryza sativa
atgcattattcaattctttttcttttttgcgaggaaacattatttgatttcgaaagtgtacactgctactggagtgttgaaacctgaaaaatggaactgggagactgcatttctgttgctgtctcctgtggtttagcctttcatttgcaaagttattagttgagctacggcttatagaccgagtaatataatgatggtgataggtgaacaaaactacaaatttcgttaattcggattcttccaagtgaaccaaaatagtgtattcctttgatcacaaaataaccatcacaaaactgtcagcaattttgagcatatatttgcaatttgagctctgaaggtaatgagtagtggaaagcatgtacaatttgatcacaaggtctctcatcttgatctatttatcgttatccctttcttttaccaactcatttgtaccaaaagaatcaatcatatggcaactaaaaccccatatgaaaaaaaaaatcctgtcgctcacatccatgtagatcacctgacataatctgcaccgtcaagaaaatgagcatactgtgtcccattcagtttgttgctcacatcatcccagttcctgacaaggcctggaagaggactagtgtgaattttcacctgcctgctgaccagctttctcaccggaactccgaggaattcttgtacctggaacaatgcctgcattcatagagatgatattttagcaaagcgagggttatcattgatccttcgttacagcatttgaatatgttttagtacatttctgttgcggacaatatcctcgtagtagaggatcatgtgccgtgtggtgttgaagtggtccaagcaatctctgatgtatttctcggcatttctgatgtttggaatcagatttgacacatccagcaccggcttgaatttcgctaatatctcagcctgctcagaaaaaatatataagcatttcattttttttttcttccttgccaacatgattgatagtgatgttacatttctcttggaatggaaatatgtaggatttaagtttcaccaaa

SEQ ID NO: 1463 - DNA, 736 bp, Oryza sativa
aagcaaggttccagtatctaaggaaaagagatcccagaatgtatcaaagagtcaacgtaagaaatatctgcattgatctccataaaatacaaatatagcaaaaagactaatccagagaataaggttcattcaagtaacttacttgagaaatatggttgatgttattccggatgaagaggcggggttgcttttctaagactttgttcataacatctaggccctgagcaagtgctgttgcaggatccttggactgagaaggtgtcaaattcccaagcaatttctcaagataattaaatttaacattggcatttggccagacttccaaagcttgagtcagtagatcaagagcttgcttgtacattgagctagattccttatcctttggttcaatcaccagcgacacctgttcaatcaacaaaactatatgagtattcaagacctcagatcaaaaaagttctgctgaagacactagtaaggtggcacaaagtgatcaacattctcattatatcagaaaggttcacatgagaggatggaaccactaataggaatgccttgtcaatccactactgcaatcaaatgttacactgtgctttgtctcttttcaggagaaaaggcaagccaggccgcatgcctcaaaagcaatcacaatgaattaggcaatgaggcaccaacaacaaaagcaagtaccatcagaatgtccagtattattttttttaagaacattatcatgaaatct

SEQ ID NO: 1464 - DNA, 968 bp, Oryza sativa
tgcaatattacaaatgacacattcataaatgtaagtaatttatttttataataatgctattcatgaaaaagatcaagataaatttgttcccttatagctgcaattattgcaaagtatgtttcacagacacttatttaaactaattaaacaacgtatccacacatttaaatagaaagaaaggttatagtcgcgcgaacgcgcgacttaataagctagtcatatgtgaaaatggcacaaatgttctgaaaatttttgaaactttgcacatccatagtgtcgcaaaagttgtgataaaatgagaacttacgtgtatgcactagtaccaaaaccataactataaccacaaaacatacgattcagaaatgcagaaatcacagagaagccactctacggttgtgccttgaagattcctccatataattaatacaacccctagtgctgaagtaataatacagagacgaaactaattatgcatgtctaaaagttcttgttcagtttttcagggacggagagattgaccgactatgcatctcaacaaacacttattcagatgcattactaaaagtactttttttcagggacggagggcttaattacaatgacagatttattacaatactttactatccaagtttgccgcacctaggtttagtaagccgcaggtttttagccactcttggcccactctgttacagaaacagaggtatcactctagtccagaaagcaaagccgaccaagtcacctttactgagattaacgcaaaatcagtctttatttcttgagtatcatagccatggattttctccttgaaggaaacataatgctggtcgaaactggatggaaacgcgcccacttcgaacttcaaatctatgaaagaatccctccttacagcaaccaccgacctctttaaaccacgtgactcactgatgacaccatcaaagagacggatttccttatccaagttactg

SEQ ID NO: 1465 - DNA, 1087 bp, Oryza sativa
caatgcacggacatttttttagtatatacatatattgtcgacgttggatgtctcgactacggtatttggacagtatggggatcgttggtgctaggatatacacgagactgaggtaaaagagatggagacagggatttttatacaggttcgggcccctgagttgtcaggtaataaccctacatcctgttggccgaagccggtattgctcttattcactataatcacaccagtacaatatgtaggtagcctatctaactgttgtcgacatgtcggtctgaaggtctgactcgtagtcgacaacagggtagtcttcctcctcgaatccgtgcccagcgagatcagagatagcgctttcgtatctcctgacggtatccggagacactgtaggggaatagccatgcctatccttgaagtcgatatccggcggcgtgtcttggcgtatgtaggcttgtatgttgtggcttctagtgggcgtgtgttgattgtcatgggtgtcttccatggtcctttcatggtggttgtctctccctctgtcctcctaggagggcttgtatttatacccataggtgtccccttgtccaagtagaactagggaaaccaatatggatacaattcgagtagtccttgtcgtttccatgtagaactctggttgtctttccttatctggaactccctcgaggtcagtttccgtataagacatggtatgtggtggatcctgccgagatttagtcaactactattatgtatgtggtatccataaccctaacagtagcccccgacttcgatgcaaatgaacgaattcatattctcaaccgcgcgcagacattggagtaactgttatcgagctcatgtgaccgttctcggtgagtttagagataacgttgaacttcctttgtcagcctcgtgcgggcaccgaaagggtttgtctaagttaatctctgatgtcgactgagaaagtatagagcgtacgactaagtctcatgtcttgctgtaatcgagaatttggattgaagtcaagaaattttatctcggcgggtacaccatctcttcattccgtattccttgtcgagatccagcaaccattctc

SEQ ID NO: 1466 - DNA, 13206 bp, Oryza sativa
agaagtgaaagtagtgggagaaacgttacatcgctggtcgaggaccaggcagtagtcgtaactcgaccacttgaagcaaatgtacgagagatcactacgatcaactggttgagaaccggtgagtaggtgtccatcgatcatttggagtcgtggtacgaggaccgctacgctgccggtcgaagaccagtcgtagctgttcctcaaccatctgaagtcatggtgcgaggaacgctacgctgccgtagtcgtacctcaaccatctgaagttaaggtgcgagagattgctagagcagaattatctctcgaacaccaatggaagttgcggtgtgagagattgctacgtactggtgcgagaaccagtgagcgagcagaattatctcttgaacaccaatggaagtgctagagttggtttattgcaagtgtatctcatgtggccagcatgacttacgtacccaacttatagcatatctggatgtccgttcgcaatcatgtcgggtgatcaagccgacgacgttcgcgaggaattatccgttaacaaccttttctcgagtagtccagccatggccgatgctatgagataggtcatcggtctttgttggtaggttgggtgcgatatctccgcatttgtcgagaatgttctcgataatggagtgtactcgaccataacctactcgagtgctcaattgttcctgaaattattttctagaaggcaagacatatagcagataatatcgagtatgtactcaaaaactgtgtggatcttctagtattatcatgatataacgagcagattaaatatcaggcattatgtaaaccataaacaagcatgatttatacagaagagaacggagtgagcccctagcgttagaccatagttggcctatcatcggaagtactcgcacaacggatattgtataagaagcatgctctaggtaaacataataaattatagatctgacaatgctgtatgatctgaataggtacgataaattgcatataaaatattgcgtacctttgtagatatatgccggatatatctacggcattagtagatcaatttgaaaaatcaatctaccaattaccttattgcgtactcgttcgacatcatatgatctgacatcttttggtacgccgcggagcttgagggttggataatctcgatagaccaagttgtcgatgacgatgatggttccgatctggtcggaagatgtattttagtcgggttagatctcctcacagccgaagtcgtcgagtagcttgttgtcggagagtccatctcttaaacctatctcgtcgaaatcctagagcaccaaaatccccctacctggcgcgccactgtcgacgtttgatgtctcgactatggtatttggacagtatggggatcgtcggtactaggatatacacgagactgaggtaaaagagatggagacaaagatttttatacaggttcgggcccctgaattgtcaggtaataaccctacatcctgttggccgaagccggtattgcttttattcaccataatcacaccagtacaatatgtgggtagcctatctaactgttgtggacatgtcggtctgaaggtctgactcgtagtcgacaacagggtagtcttcctcctcgaatctgtgcccggcgagatcagagatagcgctttcgtatctcctgacggtatccggagacaccgtaggggaatagccatgcctatccttcaagtcgatatccggcggcgtgtcttggcgtatgtaggcttgtatgttgtggcttctggtaggcgtgtgttgattgtcatgggtgtctttcactttcatggtggttgtctctccccctgtcctcctaggagggcttgtatttatacctataggtgtccccttgtccaagtagaactagggaaaccaatatggatacaatctgagtagtacttgtcgtttccatgtagaactctggttatctttccttatccagaactccctcgaggtcagtttccgtataagacatggtatgtagtgtatcctgccgatatttagtcaactactattaggtatatgtggtatctataaccctgacatatatatatatatatactgttatacacatacgtatacgcaggggcgaagctacagccattcataggggtcagttgaccccgacgatgtttcacgaacctctcgtacctctctttattttaccatctatgaccccagcgaacagaaaaactagaccccggtgattttgttgattgttccgtcaaagccaaactagcgactgggaacgatactaacaaacaacaaatagaaaatttgctagcacttatgatttatacgtgagcccaacatacatatacgatagagatttgggtaaaaaaaatccacaaattctcttgttgcgtcatcgtattccttcgatcactttaatttgtcctgctccggcgctgcacatcttaacatcttaattatatcatcttatttctagcagaacgaaaggcaagaaattagtggatttgataatctttggtgcatttggtgtctttaacaaattaataatgtatactccctccatactggtaaaggaagtcgtttaggacagcgacacggtctccaaaacacaactttaacttcttgtttctacaaaaatatttattaaaaagtgatatatgtatacttttatgaaagtatttttcaagacaaatctatacatatattttttacattttcaaactcaagagagttattcatgatttatattcctaaggtttgactaaacgacttcctttatgagtatggagggagtagtttttaacaaatttgtagacatttcattttatcataatgtatttcattaattttgttttgtattatatatagtcttagatcattaattacaaactagatgacatttccgatttagtgttggattccaatgtagcgatatgacatttttcaccaaattttaataagttttgatatagttttgtcgtgaattctcaaaaaacattcaaaactccgctcagaatatacttttcgtcccacgtcgaaacatcaaaattacatgatttttggtgggttttggtcgaaaacataaaccctggttaatactgaccccggtgaccatttatcctggcttcgcccctccgtatacgtatattggactgttggactggaggggcgcgcatcagccacccccgacggtgaagcggcgtcctgactcctgacactcatttggcagctacaacctgctggcggccattcatgtcatggtcatgggaactgggagcaggtgggcagaaccagaagcggagcctgtcgaggcggcggtacttgatgccgacggtgagcacggccatgacggcgccccagatcaccacgtccatggcgagcggcgtccgcgactgcgacgtgatgaacgtgagcacgaggctggagtaggacaccaggaacggccactgcacggcgcgcgacctcgacggcacgccggtgagcagccccagcgtgagcagcatcgagctcccgaacccggcccagctcgctgccatgaacagccagtaccgccgccggttcttgtcccgcatgatcgggtcgccggcggcgtggctcccgtcggcggcgtcgtcctgccagtacccgcccgggacgttcgtccccagctggtacgtcagcgccgtgatcagcgtcgccaccaccagcagcgtgtcgttcttgttcgcctcgaaccccggcgcgtgactgcggcgcccgccgccgttctcccgccgccggttgtcacccagctcagcgtcgtcgacaccgttcttctgccggctggtctcacccagctcagcgtcgtcgacaccgttttgccggctgttgtcacacagctcgccgccggcgcggccgtcctcaactgcgccggtgtccatcttacctaaccactcttaagcctatgtcaaagtgcaaaacttagatcagagaaagaacagtaaaattctagcaggaatttgatgacgccaatgcttcgcaagaatcacaaagcctgtgttcttgttgtgtcaaacatgctatgcatacgcacacaaaaacacacatttatactggaaattttcttagttaggctatgtttagttcccacacaaaaatttataccctatcacattaaacgtttgaacacatatatgaaatattaaatataagctaaaaaaataacaaattgcacagattgcgactaatatgcgagatgaatcttttaagcctaattgctccatgatttgacaatgttgtgctacagtaaatatttactaatgacggagtaattaggcttaataaattcgtctcgctgtttgctgacggattctataattagtttttctattagtgcctgaacaccccatacgacaccatatataatacctgatgtgacacgccaaaactttacacccctgattaaaacacccccttaattactttgcttatctctaacaatcattgagaggtaatttctcagaagcagatgggaagcacaaggagtggctcgtttagggcctgtttagttcactaaaagaaaatttctgggtgtcacatcggatgtttgtccagatatcggaaggagttttcagacataaatgaaaaaactaatttcagaactcccctgtaaaccgcgagacaaatcttttgagcctaattaatccggcattagtacatgtgggttattattgtactagcacttatagctaatcatggattaattaggctcaaaagattcgtctcgtgatttcccccctaactgtgtaattagtttttttaatctatatttaatgctccatacatgtgtctacatattgatgtgatatttttggaaaaaaaatttggaactggccttacttgtccgagagctgcaactctagtcgagcgaggacttctatgctctaactagtcagtcgtcatcaagttgccgtggaatttatgcagttagaagttagaacaaacagaagctgatgtagtggatatcttattcaaaacctaaatcaacgcatcccctctcccccatttcacacctcggaatccctctgattatcttagtcaattcaaaataatctgaacttggatttccttatctgacagagaattcaggaatatccaacttgtcatcacagcttatctcatcttatgtacaactgtaacctccgttgtataatatatgacgaagttgaattttctcttaaaccattgctgaagcatatctcatttcatcacgattaatggctaagattgcatcgataatgccatgggatcctggtggctgctgcttcctcaagttattagctatatcagctttgtgggcaagctacattttccaggccatcggattgttgttggacagttgagtgatagttctatccttcacaagccaaacatttcgatttgcttgagctgtcttttgggatgctcgctctgttggcaagctgagaaatgaagtccacatttctaaagctttatgacagatagagggtttgtaatgtcaaaagttcacttgccgtaaacttgtagacaagtcgaatttgaaggagagatttgaacgagaggagattgaatttgtaggagagggggattctcaggagttattgggtttagggatggcaataggttaggtcaggcacgagcatagcaaatccatacttggcttgagactcacgtgcccgtgtccgacccacgcctgcgaagtctcttgggcaaaaccccatgcccgttgggcacgggcatgcccaacggatacccattgggtatcacagtaaatatcttaaccccatgcccgtgcattgccgtgtcgccagccgccgcctgctcccatgcgccgccacctgtgccctggcgccgccgcgtcgccatccacagcagtgccgccagccatcgccttcgcccgtgcgccaccacatcgacgcctgcgcttgtgcgccgctgcgtcacgctgccaatagcctcccgcttccttcccgtgctccaccgtcgccgtgtgaagacactggagaagagtagaagactgagagagtgagaggtggcagtggggaggaggataaggttaggggcttggggattttcaggctagggttttattgagtgaatatatattgatgctgtatacaaataggtcaaatgagctattgggtcataagagaaaggttaaactattgaaggtctcaaggatatacatggactaaaaaaaattaatttttggctcaagctgtcaagcatgggttacccgcgagtgaagtataaaacccgtatgcttctaataaattcgcaggtatcgggtgggatatgcccaatgataaaaataggtacccactcccatatccattggttcgagtatcatgaatacgcgaacctaattggattgcactttgcacccttggctgttcggaactgcgaaggtcacattggtgtgtttcaaacggagtctcttttcgaattaattttgcccgtccgtgcttgggctcgtgacctgagaaattgtgtccaatgggctgtcgcccacgctcttcgccagcttggtccatgggctctctctctctctctctctctctctctctctctctctctctctctctctcattcatcctggaggaatggcactaattcgatcaagccaatctatgtaaccgcataaacccatttgcataaccactcggaatcgatggactcactgggggggcaggcagtgtgtgtgatgatgcgaatccaggaggagcctgcagcggcaagcaatgcaaaaacgaagcgaataaccaaccttgagtgtccgtgctgctgccaccgcccactgaagtggctgctcgtctctacggagtaggagtatgtgggatgtggcctacgcctatggtttttttggtcggtccagctagcctagctcatatgccctcgtccacccatgtaaaccgcgacggaagcatggcacaatccggcacaccaactcgtcgattcttccggcaaattcttgcttgcgtgaggcccgatcgagcatcgaccgacactagctaccaacatgtcctaacaacaaactgtcagtacacaacagcaatagttagtgatcgatactggtcgcattgttatcttgtactctagaatgtcatggtcaaatatcaaatatttgtccaaaatcgttcgtttcgtttgacctctgacgacctcagccgagttttgtgctatccatatttagttttcttcttcttcttcttcttcttcttcagcagcgaagccggtgacagtcacgcttttatttacaggagtattttttacccgtcctctacatctaattagatatgtacagtattttaaaattgaaaacttagctcctaaaacaacacaatccaaaattcgctctttttaaattagaaccatagccacttaaataacacaatctaaaattcgcttatatagagatttgaattcaatatcttaggatgctacttaggttaccgcaatcactagactttgcctttgacaataacgctagccgtgctgcacaatcacacgaagttagttaaattaagccaatcattgggctcaaatccgtgtccctttcctcgaaggcgaaaaggagttgttgataaaggcttcgatgctgcacacgacctttcttctgcagcaaactataccttgcctccatttgcaccaagaccagagcacgcacgcttgccactctatatactggcacacctcgcggccatggcgagacacactcctcgctcgccagcaaactgctgcttgcgaccgcgacaatggcgtccaccggcgcgctgcttctgttgctcttgtttgtgcttgcgtgcggcggcaatggcggcgcggccgccgcggtgttctccgggtgttcgttcgagagccaggaggaggccgaggcgttcgaggccgcgctgctgcagcaggcgtgcttcaacgtgacggcgttcggtggaggcggaggtggaggtgggggcgagggcggctgcgtgtcgcggctcgacacggcgcgcggcggcgcggggagtggccccgtgccggtgctccgcgcggcggtccgggacacgctcggcgaggcggtgggcgccgtggcggccgtggcggggctcgcgtcgctgtccaaccacgcgcgggaggagatggccgtgcgcgactgcgtcgagctggtggggtactccgtcgacgagctcgggtgggcgctcgacgccatggccgaccccgacggcggcgtcgccgcggcggaggaggaggatgagacggagccggagacgaggcgccgccgccgccgcggcgcgcgcgccgaggacgacatccacgcctggctcagcgcggcgatgggcaaccagggcacctgcctcgacggcttccacggcaccgacagccgcctcctccgccgcgtcgagtcggccgtgacgcagctcactcagctcgtcagcaacctcctcgccatgcacaagaagctccgcgacatcacgccgcagcaccaacaccaacaccaccaccaccccggcaacaacaacaacaagaacggcacagccgacggcgccgccgccggaggggatgacaccggcccgtcgtcggatctaccgccatgggtgacggacgtcgtcaacgatgtcgaggaggaggtcacggcgacgcgcggacgagggaggtcgtcgtcgtcgggaaggaaggcgatgcgcgtggacgtggtggtggcgcaggacgggagcgggcggtggcggacggtgagcgaggcggtggcgcgggcgccgagccacagcaggaggaggtacgtgatctacgtgaagcgaggggtgtacgaggagaacgtggaggtgaggaagaagaagacgaacatcgtcatcgtcggcgaggggatgggggagacggtcatcaccggcagccggagcatggccgccggctggaccaccttccggagcgccacgtttggtaaattctagtgcaccgcagtgatttaatttgtctttttgctaattactcctacttttgctactcattttggttacacactcgttacttcgttagtattcatatacgaataccccgctgcgttgctgcaaaaaattaagatgcatatactatatacaaataaaatataatttaattaaaaactaaaacaatttgatataattgagcttaaaataattgagattgtagattttttttagagaagaaaaaagagacaatttagactatagatctatcatccaaatgctagaaataatttaagtgatgtggtttaatgagagaagagaaaaatatcattaactatacttagtgggatgaactatatgagtatataggattagaccaacatgatcgccaaatatatagttttgaaaggctacatatatccagttggatatagaggctgggtaaaaaaatatcattctctaaaaaataaaaaaaataaaaatatagttttgaaaatatttttgttatttaaacatgtttgcaaaacatatagcccaatacctatgaatgtatatcaaccaaaagtcattgattcgagagtattgtatagaaccatgatatttgtggtctcaaggttttactaaacccttcacttttagcaagaaaatacggagttctctaaaaaaattagtgataaggaacatcctttatactctagaacaatcataaaagcgatcatacgtgcatgtatagcagcttatacctttccagcctattatctactcctatagatcgaaccgaccgaccacaatcgtgaccgcatgcaaaagtgcgcggcggcacccagtaaattagccgcacacgaaccattatgacagcaagattcacgtgtgctttgcttgcatcaagccctcatctaggctggcagataaaccggctcgtgcatatgcatgcgcgctaagaaaagaatatccttagagcatcaccaaccgtctatctatataattccccaaaactaattttgagggattttaatccaaaaatcagctccaacagatcccctactctcctacctgagttttggagttcccttcccccgattcctcgctccgtttatatgcggacgcgaaagtcgcacccaatcacgcaatcccgcctctctcccttgttcccgcgtgtggaaaatagcgatctttctacgcgtgaaagaaaaaaaacagaattttctcttggtagtttaacaaaagggtccacttttaagttttggggattaaatttaggctatctgttggaggaaggagttttttcacttcctattttcagtttagaaaacccaaaaacaaatttttaggagaaaattatagataatctgttggtgatgctttaagatgtcctcttgcaaaaagttttccatcctccacatatctagggtttgtttgttcggtttattccggactattgactattacgatgtagtagaattaattattcccttttcaaaccccctctaattcatgctacttagggattaaccgagcaatgccttagagttgatgttgtacttaaatttaaaccgcggcacaatgaaatcaaaacataaatttgaatgagattttaagtggagttaaatttgtacttcatccgtttaagttatttgaccttttcttagtcaaacttttttttaagatttgatcaagtttgcataaaaatataataacacttttaatacaaaataaacatattatcagaatatatccaatgttaaatttaattaaactaatttggtattatatatgttattgttttttcttataaatttgatcgaacctaaattttgactaactcaaatgttttataatataaaacggagggagtaactgaatttggtttgtgtgtgcgtgcgtgcagcggtgtcgggggcggggttcatcgcacgggacatgacgattcggaacacggcggggccggcggcgcaccaggcggtggcgctgcgcgtcgactccgatcgctccgccttcttccgcatcgccgtcgagggccaccaggacacgctctacgcgcactccctccgccagttctaccgcgactgccgcgtctccggcaccgtcgacttcatcttcggcaacggcatcgccgtcatccagcgcaccaccatctctaccctcccgcccgccgccggccagaacgccggcagcgtcacggcgcagggccggagggaccccaaccagaacaccggcttcgccctccatgcttgcatcgtggaggccaagtacccgacctacctcggacgcccgtggaagcccttctcccgggtggtcgtcatggagtcctacctcggcgcaggtgtccagccgcgcggatggctggagtgggacggcgacggcggcgagctcgccacgctattctacggggagtaccgcaactatgggcctggcgccaacatcggcggccgggtgcggtggcccggataccacgtgatcatggacgccgccgtcgctgtgcgcttcaccgtgcggcggttcatcgacggcctcgcttggctaccctccaccggcgtcaccttcaccgctgacctcaacaggaaatgacgacgtatacacggatgcagatgctctgattgaacttccccctgatatgtgggcccgcgaacggtggggcccacatatcagtcactacgttcctctgactttacgtcagagaatcccaaataccacatacacacacaaaatcagttattcatttggtttggttaattataaattggatatataccagaaagaatatgtttttttttgaattaagtatatactaagctagttatacgcatagctcatatatatggattcatgtaattgatgaacaatagatatatatacaagtttcatgtgaacatcctccaaacaaaaatttctgggagtacttttttaggtctatattaaaaaacttccgtaaattttgttggtgaaaacgtttaaatgtaactacaatgtcatttatagtgtatattttgatccttgccctcgctcgatcctgtcaatttttattcacccaccctagcacaaatcttcaacatctgacggttagaaaatcgcaagtttttttaaaaaaaaatcaccattttttttaaacaaatcctttttttttctagagattttggaaatgtattagaacttgagaaaagtggttgcaaaatcatttggtcaaaggaggcaaggcccaagaaaagtctaaggcccaggaaaagtccaaggcccaaggactgccctgaccctgacacgcgccaagctgttcctccagtttccacgattcttcgtcgtcttctctacttctccctctccgccttcaaaagcgacgctctccacctgcgtcctcgtcatcctcccctagacagacaaactccagctcctcctcctcctccgcgctcgagatcccgcctccgcctccgcctcccccagtcgccggcgagcaactccggtgaagcgcgagctacggattaaggtgcgccctccccctcctcctcctctcgctaccgagcaagtggtcacggatcttggaattggattggattggattgttcacggatcgggggatctcatctcccccttgtccccggttggatccaactcctcctcctgttgttgttggtggtggtggtggtgatgtgagggggttcgctccaagcataggtagatctccccacctttgctgtttgtttgctcgctccccgggtcgtcgtcgcctcgcgcggacccgatctgatcccgcctagagcctcgaggggggatggtggatcatggggggggggggagtggtgagaggatctgtctctgtcttacggattgtggcgtggagcgctgttctcgtgggcgtattacgtatttacgtgttgccttgctttgatcccatggattgttttgggtttgggggggcttcgctgagatttggagctagaattttggtagtggaatacttgcttatgtgccaaacaggttgattatatactgtgccctccaaatttcgctatgaacagcattggggaataatgtctggtgatttgaggcgacatgctggtgtagattacactcgtgcggtggattacacctaaagagcaaatggtccatatgtttgttgctgctagcatgaactggagcaagatagagcttgctgttgtacttttactagcgaaaacgtttgctgtctgcaaacctgtttatcacataatcacattgttacatcctcccccaagttattcttaatgatttagatgttttttttttcacataacatttagatttatctttcctcgttttaatctgtcag

SEQ ID NO: 1467 - DNA, 1870 bp, Oryza sativa
ccaaaagaagcagtctaacttgaaacatgtattacacattaaataggaagttgtttttagctgaatagtgtgagtgaagggaatttgaatttgtaatagaacttgagaatttacctgtaactgaacaaattttgcgttattcatgatcacgatgacctgcaaatctgacatcttttctgacaaggtcttgatggcaatatgctggaaaaacttctgcaagacaacttgctcgctaattgattcgttggaatcaatatcagcaaaccaaaatactcgactcaattttgtccatggaactgatagtttatgttcacctccaatgaatagataagagggatcagccaaattctgtagaatcttgaggcccttagtcactgaatcagactcgaatgaatgaggaccaggtgtacaggcaataatcttagtggggtcataatagttacaaagtttacaagcgaactgtaaacttttatcattcatgacaagaatatgcccatcaccagcagcaggcagcaaccttttacaacatactgaagtagctctgttttcctgagagcagattccagatgtgatagatgaagaaaccaaagagccagagtcatgtgaaaatgaacacgagttaccatttcgacaaccctgatcaaaataaacaacatgtcagaaatagaaaagaggataaaaaataccacacaagcgctttagggttcgaaagttatagcaactctttttgtttctaaaagtcgacatttgtacctgtaatgtgaggaagaacttgcatattggtcttggagcacgagaagaatgagaaaaatggcatgtatcacctcgattacaagatccattaagaaagaacacacacatctcattttccaacgctggttgaacataaccatgaactagttctctataagttaccctgtctgccgcagattgtgtcttcatctgtgaagaaaacaggaaccattattgatggttgcatatataatgtatttcatatatataagaataatcatatgcataaaacttataccgcacctccttgataagtgtcttcagtgttttaacaacagtagtggttccaaaatcagctggagaaacataaggggttgcagcacacctgcgatgtgaatccaagtgagaattctcagcttctaatggaagtgaattcacattctctagttccagcacttcatggcgaagacacatgtggtggaattcggaaggctgaaggtacattggaggatttattttcacaagaaaactaggtctaaatcggtgaagtgtgcccataatatcatcatctgttcaaaaggaagggttagcaacacatatatcatattggaaacacaataggacacatgcctcatactaggtatgtttctttacacaaagcacatttatacataactgcaaggtgcaccctttctactatgtcttgtacattttcaaaatcatattggaaaaccttacatggaaagtaagaaaggtaatcagcatatatttaaaaaatgtgaacatatgtgcaaccaaaatatacagcagatgaagagtgagattacctactgctacaagagtgcaattcacttcataaaatttttataatgaggtacaggtaaaggacgtacaaatttcagagatgtagttaagtgctgttggcacaaggttatgaaatgcacaccactcatcttcaggtttagcaacaaaaccattagatgccttcggttcatgagtgttcaccacatttatcagacaatccagacgatacttgtcctgcaacatatgaagacatcactttactaatgtaataaacatttccaaaagcagataaacaaaaataattgccctgagtcttatataataatgttttctg

SEQ ID NO: 1468 - DNA, 1116 bp, Oryza sativa
gtacgggggtcgtttcatgcttaacttcatggctcggtccttaattgaccagggacggcactagccttttccggataccacccaaatcctccgtccgccccagttatagttggccatatgggccgcccggcacggcacggcccaggcacgaccgggcctgggccgaggtcagtcgggccggcacggcccgacgaacaagccgtgccgtgccgtgccagcccacgggctacaaccacggcccaggcacggcccaagtagcctcgggccgtgccgggctggcccgacggcccggcaagcccatcgtgcccgtgccggcccaggcacgccctggcaaaaaaccccttcaaaggttcaattcaacacaacaaattgacataacacatcaaattcatgaaattcacatgtaattcatcaaataagtcaaagaatcacaaacaattcatcaagtcaccagtttatcaaatcatgcatacatcaagtcacagatttacaaacaaatgaacaattcttcaagtcaccaattcatcaagtcacagtctcatagatttacaatcagttcaaatcaattcatcaaatgcatacatcaagtcatctactataatccatcaagtccatctcagaatcacaaaccttagaaagttagaatataaaaggggtttatataagctgtgattgtgcaatggctgcctcattaaaaacctttctaggtaaaaactcacacctcgtgagaaaaccctagaaaggaaaagagtacagcccatagctaaaatgttcatatcaattacaatcatccagttcaagggtttacatcaatttcatcatcaagatacatattctcataagcattttgaagctccacattctcagtagtatgctgactttttgcatctgctagctcccagtccttgatcattgccagaatttccaccagcctagggtttagacgccgccgacggtcctcgatgatcctgccagttaagctaaaagtagactcggacgatatagtagaaacaggaacagtcataacatctttagctaagattgaaagaacaggataagttagtttgtgctgttgccaccaactaaggatattgaagtcatcatcatattggttga

SEQ ID NO: 1469 - DNA, 1343 bp, Oryza sativa
aactaagggtgtgtttagttcacgctaaaattgaaaatttgattgaaattggaacgatgtgacgaaaaagttgaaagtttgtgtgtatgaaagttttgatgtgatggaaaagttggaagtatgaaaaaaaagttgagaactaaaccaggcctaagcacggcctatctggtctaagctttcacaccttctaagccttatattcctttcatcttccatctaagaaaaattttcactattgtactagaaaaccgttgctccttgtattgagattgttgctacattgaaactgttgctgattgagctaattgaggtggtttgctaatgaactggtgtcagaactacctattttgcaccaaatctaccataagtagccaagagtctatggaatccaagtgtacgcaagagaagattgattgttgtatattttggagagactaaaagaaatggaagcaaaatagggacaaattctttgaggagatcagtgcctccattaaggcaactactgttgtacgtcctcatggtttcaatcatcttcaccgcctatggcactgtctcctttagcacttacaaaattgttgatgatgtacccaaacaacagcatcacttgggtaacggcaaaacacggacacaatttattaggtcacaagccaaaacacggatggcccaaattaatttgaaggaagactccatttgaaagacaccaattagacatgaatttttttagagggtacgggataccgttagaatggtacactttaataaatccttttcttttctctacctacctgagcaaccacgcataaaacaaataaagcagcggtgctcatcttgctgcctcgctcagccacatcaattgcaaggaaggaggcaggcattgagaagaggaaggatgaagaagagccaatgggaggtccatcgtcaggcgaccaaaaagcaatgacatgtgtcccctctctccttgacttgataccaggtacctagggtaccagacatgatacatataggtaggtactaggtatcggataccttgatactagactttggtaactttggtatcgagtgggtaccagaccatggtacccaaataccaagcctgatacttgtaggtatcacttatgatatcattaggtatcatgcctgatacctgagtatcatggtaccagagtaccaaaccatgtacctaaaaccaagcctgatacttgtaggtatcacctataatattgttaggtatcatgcctgatacctaagtattatgataccaggttaccagaccatggtatccaaatatcaagcctgatatttgtaggcatcacctatgatatcgttaggtatcatgcctgata

SEQ ID NO: 1470 - DNA, 1210 bp, Oryza sativa
atcgactcaagcgtgaagatggttcagatgtcgacaattcttagaacatcgagcatcttcgtcgtttttatgcttagacattatttgtgtatactttttcctctttgactgccaacatcaagttgtttcttgaagttaccagtcgggggctatcataataatactggagtatgatttttatcaattcaatttgtttacttgatttatcattgtcttgtttgattttttggcttagttaatgaggacttagatttttttgacaacttttgcaggttctaagctcaataaggtttgacaaaaacgtttaagaaatcagcgactaaatttaaattatcaagcacagcataaatttatcagtattgtacagattgagcctccatcatcaaagattacatcatatggaatcaaccagactcagttttctcatcatcagacccagtctgaccaagattggtatcttgaaatctctctacaatgtctgcagcaattttgtcagcagccttttgggcatcattaatgatgtcaacggcatcttcttcgcttgttccatctgcaaagccatcaatggcatcaatatcgatcttcggatacaaggacttagtcatcgctagagccatggttgctcccatgcttccagcctccatgatattcttgaaacatgtgtccggagcagctctcaatttgtcgaagacttcaacagcatcgattgtactcgggccattgttattgtagaacatggcttggatcagcggtgtagcagcattggcgacttcatctctagcctcttcaagttttttaatcttggtaatcaagacatcaaactgagcctgtgatttaattttgcgatctgcatgaagcaattgtgttagcattgaggatgcggagacaagtctatttctggacttccgattgcaattaccttcgacatctttgatggccaagtctctttcctttgcgagatcacccttgtccttttcgagagctttgattcgtttctccagctcggtgatcttggcagcttggactattgtacatcttggcggttagctgagtacaaacaccaactcagaatgaattgagcaaggacagatgttaccttttgacgaaccagtcaactcgaagttgctatcttgaagctcatcactccgatccctgagatcgtgttcagttttcctggctagttacctagtttcatggagttgagctctga

SEQ ID NO: 1471 - DNA, 2052 bp, Oryza sativa
gagaaaattcctacagatgacatttcaaattttcagccagcattgcaaaagatgcgaaagatcagatgattcaatacttaccagaggagggggttgaaggcatgataaggcaccattggcagtatgtgcgagtaatcgactacaatgccggatgagaaaatcttatacatcctgtctttcataatcttaaattcaagagactctggatcttcgcgtttgggatcactcttgccatcaaactcaaaggcagtacgggatctttccttaataggcgccagccagctcttgataaagtgccgagtgatttgctccccatgcagaccttgttccttgagcttcagcatgcgatttagcagagtgagggcttgagcagcttcatcttctattggaagcgagttccatgtatcttgatatgttggaggaagacaagagtactcgggaagcgctggcttaggattttgcatataaaaccaatttgcatgccaacccttattggatgttttgaaaggcatggaaaaatatttctggctcaaagtgcccctcagttgaaaaccggctcccccaacaacacactgcttgctcttgtttggttggggcttcaggaagaagatgcaacggaatagggcaaagtgcggcctaatccctagaaaggcttcacaagcatgaatgaagtttgcaatatgaacaatggagttggggttgagatggtgcaaactaatcccgtagaattcaagaatccccctgaataatttcgaagttgggagagaaaaaccaccatagaagaaatgggagaataccacgacctcatgcatgtccgaggtcgggaatgcttcgccacacgccggacgccagccgatgatttccttcgccggaagaacaccgtgctccaccatttccttcaagttctctgttacatcggtgggtgcccattgactctcaaagctttctctctcctccgccatggatgcgagatgggtgatgggatatggagcaagggcggcagcgaatgaaaggaaaattgaagcggcaattgcgcagatgattttcgcaagcccacgaagcttcgggagaggtggattgatgtggatttgctagccctaattttcgccggcgtggttgctacactatagcgaaggatagggagagtggaggagatctcggcggggaagacgaagcggcgttttgttcagcggttttttcgctggggtatcggaagatgctaatgggcctgggccttcttagtattttcagcccatttttattatcggcgtggctagttgtgatccttagggattttggcgtatattttttctttggtaaaaattgctcacgacagaatagcctagtgccgttaaaatcctttttgacgcagttagataattcttgggaattactacgatgcaaataaaaaggtgcccaacagaaaagtgttatactaattttgttggcctttttaggctacaaagttgtttgggttttattaaggtgactaatggtcattctctcggcatgttatatgcttcatttgataatggcgtgggtcgtagcttaggctatttatacttgccatttatcattttttatacaacatttgataaatcctttaagagttttactcggatttttaatcatatatgttgattaacagatctttagagtgttttcactcggatctacctatgccttttgagcatactcaagctaaagcagtcggctgaatgtttatcaagtgcctcatatgcttagctatatcattgctttggtaattcagttataaattcactcggatggatgtttaatatacaactaatcacatagtcgggggctacacctaattaggtgcatctaatcgatgcacccgatttttttttttattttagcccttcacagtctttgattcaagtactaggtagcccaaggcaggaatagttgaagcactcggattatcatcttgaagattacaagagaagattatttcgtcgtctgtaaaggtctcaggggctactgtggagactatgcacaccccatacccacatggcatgtatatccgac

SEQ ID NO: 1472 - DNA, 20613 bp, Oryza sativa
aacagtacatataagtaatttgttacaaaatacttcctggatacagtaatggaaacctacttgcttaactagatgtcacaagctaatgacatagaaaagtcaaatcatttttggggcaatatagttgctggcgactaatcctaacaggattaaccaaaacagatatttccagaacctaacagagctttggcatctgtcagtttgttcttgcagctccactcgattctgttcgttgtccttcaacttagcagcattgtcctcaatcagaacatggcacttctcaatgtcgtcttgaagacgatgaacctggtttctcttctcttccaactcatacttcaaagtactaatgatttcttcgccggattgtctggcgccattgattcagtatgcaaccatatcatcgacatactgaaaaaggatgtcctcccaaatccaaaccttgcaatgatacttcgaaatgtctgaacttaccttctttgcgcatttgagaaaacgcctattgggattccgagctgtatgggatgcgaaggttcgtattgggtcctcacacgcacacttgagctggggcggggataagccatagaagaatgtatggacctgcaagaatgtagaatagaactgggtggattgttgggtggatggaggaagatgcactgtgcatcgccatggctgctctaccaacagagtgcaggatgctagggtggagaatagtcaagatattcaggctgctagggtgcagaggagtaaagacgagagagagaaattcattcaaaagtacagaacggtacatttatgggcccggttgacttgacatatatgtttggtacacgggggtagaaaatgtgtgaaacagcgatatacgaaggaatacgcctggtgtgtgggaccaggagcacaaatctcaaagagaaacgggcggtgatgcatgtaggggaacgtccccttaaccgatcagaatagtttgccggctaatactctctccattccaaaatctaagtatttttagtataatgacaagtcaaatatttttaactttaactattaataacataaaaataaacaagatcatacatgttactatatttatcattaaacagactatcataatatataactctttttatttaaaatatctttttatagatatttttagttaaaacagaatctctaaagccatggcagagtctaaaaatatttatattttgggagtgggagagtactcatcaaagcagaaaatatatatggccttgtttagttccaaattttttcttcaatttttcaattttttcatcatatcaaaactttcctacacacaaacttccaacttttccgtcacatcgtttaaatttcaaccaaacttccaattttgatgtgaactaaacacacacactatatatacatatatacatatatatatatacatatatatatatatatgtatatacatatatatgtatatacacatatatgtatatatgtatatacatatatatatatgtgtgtatatatatgtatatacatatatacacatatatatatatgtatatacatatatacacatatatatatatatatatatgtatatacatatagtgacagaccgacagtatgctactagagcagaagttcagactgagagaacagtaaagtgagctgcaaggtgaaacagaccgaaaaaatcatgcttaagcatgcagagctgtgcctatgggcaaaaaaacattacaaaatatacacagcaaaaggaattcatacgaggcagaatcagtgggctttgttcactgtcaaatgttgatgcacacattgcaaggccaaaatacacactcctctgaatctctgatgcatcaatcagtttgcgaaaagaaaggcagggaagagggggcagcggccatgccataccgtagctggctaggcaggtactctgagtgccctggggagcaaagtgggcagggaaagacgacagcggagcgagcaggtggtcccgcctccgtcgagaaggcgcttctggcaccatctgcaccgctgggccgtcctgccacggatggggatcaatctcgtgctggtggcgctgctgtggagaatgtccgcggcgagttcggcgtcggcgatgctctcccagacggaccatagccaatgaccacgcgaaatctgcacgcacagacccatccttgagtggaacacgagtgggagcagatggtgatggtggtcgtcgcagtggcagtccccatagagaaaggcctcgcgacacgtggtgcagaataggtccagcagctgctcaggctgagctgagcagccaacttccaagagagacagaacccacgggtgcgccgccgcagcagcagcgtggtcagcatgcgcccagcaagatatcgtacagagcgtggccagcctgctgtagagaccatcgagcgaggcaatgtcggagcagaccctgcagcgggtgcccggtgatggctgaagcaagtacggccggccaagaaacggagacgggagccggtcactctgcacccatcaccattggcattgcaaacaacacatgagcaaaattttcaattcctccacaagcacaagcacaactgcacaagaagaagcaacaagtcaagcatttcaattacctcgattcctaggaagatgggcgccatcctctcggcccctgtcaaccatgcgcaccagtcacctcggaacatgccgaggacgagcacctcgtgatcgtggacgccgccacggccgaacgcgtcgcaggacgggcagtagtagagcatgcccactcctgcggtcgcgtcggcgacggcgctcatgtcgtcgacgcagaccaccgatgatagcatcctcctcctcaggcatactgagcagacgcctccctcaccctcatcggccacctgccgccgacgacagacgacgcacctcgccacgagcgcctcctcctgaacgccatccgcgccatcaccatccgggcccacctcgccaccgccgccatgaccgcgcgccgccgccgcgccggcctcgcccgcctcgccgtggtcgcctgcagcgccgccgtcatgcgtgccctccgtgccatccaatccggtctccttggccgcggatgaggaacgtctgcaaaaaaccatttccaatcaagaaccattcttttggtcaagaaatctggcaagaatcgatttcttaatgaaaccatggaattcagttctcttcttacctcggggagctgtcggccaacaagaaatccgccacctcgccaccgccaccggtcgccgcgtcgccggcgccgctgctcttgccgagctgggccacgggtacccccatcctgaaagaacgcaggagagatcgaaacaggcgcgcgtcgggaggcgaactcgaggcgccggtgcggaggaggaagaagaggagagccaagaaaggggagacgaagggcgcgcgtcgggaggcgagttcgtctgagacgaagacgaagcggagacaaggaagatgggcgcttgtcagtcagtatacatggccatatgggccgcccggccgtgcctgggccgaggcttgtcgggtcggcacggcccgacggacgcaccgggccgtgccgtgccagcccacgtgccgcactcacggcccaggcacggcccaacacgcctcgggccgtgctgggccggccccaaggcactacggcccatcgcgctttacctcagcataagtctaatttttctccctcctattgggctgtgacatatatagctaaaaaaagtctattttacctccctcttctttgggctgtgatatataaggaaaaagtacaccgaaggtccctcaacttgtcatcgagatacaaaatcgtcccctaattacaaaaccagatacgtggcatcctcaacttacaaaccattcactcagtggttttaaccccggttttgtccgacgtggacgctgagtcagcgggacccacatgggccccacatgtcagacagaccacgccggccaagtcccggccgcgccgctcgccctcaccggcgccggtccatgaggctgagggtgcacccagcgtcgcggaagcgcaccatcgcctgcagcggtggtgcggggtctccgcagtggcggcggggatggccggcgggaagaagctgaggccgctcgcccgcgtcggctgagtcccggccgcgccgctcgccctcgccgtccctctctgctctctactctcgcagggcatggggatgccggtgctagggcacccacggcggcgcgcgcggccggcgacggtggctcccgaggcgacgcgagcttcccccaggcggcgcgcgggctcagggcagcgcgagctcaagacgtgggtctccgaccgcctcgcggtccagctcgtcggtggagatgaggagggagcgggagtggcggcgggtgcgggagcagcagtcgcggtgcggggaggtggcgggcgggacggcggcggagtgcgccgcggtttgctgctgcttccccttcgccgtcgttgagcttgtcgtcctcgcggccgtccacgtccccgccacgccgtctgtggtgggcgccgccgcggtgtccgctccacgaagcggaaggagatgggcgagctcctcgccctggacgtcgcctccccaaggtcgctggccgtcgcggccaccaaggctaggaaggtagaggccgagttcccagccacgcccatgaccgaacacctcgtcgacatggagaagcaggtgtgggcgagcttctacagcgccggcttctggaggagcccctcgcaacgagaggacaggaggtgatcgccgccgccgctctcttcttcttctcctccttccccacggttgttggtttcttggctttctcctcccttttcttcagaaaagagaagacaaataactcgatcttgtgattaatttaaccgcaattgacaatttttttttttttttgcaactggctgtgttcttctctccttccaaaaaatttgtcgattgggaggaaagatacctgctcgtgctcattgatgtcctcttctttgccgtgccgattatctccattccattgtgcttttgttattttggtgctcatcgttggcgatgccgtcgtgcgtggcaacgcctatagcacgaggcggatgacgctcagcctgatggcgccgtcgttcttgacgaggcccagcatgaggctcgccggcaccccgtcgatcagcagcaccagccatcggcctcgttgccggcgacaacctcaccgtcccgctcagctgcgcctgcccctcgctgccgcaggtcgccgtggtggtggctcggcagcgccatcgttgagctcgccggcgagggcgagcggcacggccgggacgcggccggcgagggcgagcggcgccgccgggactcagccggcgagggcgagcggcgtcgctgggactcagccggcaagggcgagcggcgctaccgggactcggccagcgtgggcgagcggtgcggtctcctccccgcccgtcgcacgccatgccatgagagaagagagagacgaggaagggagaggagagggaatagagaaagctgacgtggattgtctgatatgtggggctcacgcatttgaccactcctcttatttaaaattttttaaaattattatttattttatttgtgacttactttattatttcaatactttaagcacaccttttcgttttttatatttgcaaaaaaaaatgaataagacgagtagtcaaacgttgcaagaaaaactagaaatctcttatattggatggagggagtagcaaagattagttccaacaaccggtagtcattaattaccaaaacttcttctaacacacggttataggacttgctctttcactggccggggcggtgaagcctaaccaacggtgtggtgagggattaatcggccgacagcatggggagggagggcaagctatagagagagacaggaaaattatcaactcattttcaaaaactttttaaccgaatcatttatttattatattacaaaaaataatgatatgcactatatttaacattcacgctaatgaacagggacatgtcagcgtttgacggaacttctaaaaatcataaaaatgaaatccaacgagacaataaatctaaaaacgacagggtctactttttaaaagttccaaggagaatgaatagaaagagtggtagatcgcgcaagcaaataaaggagacgtgacaaacatgtaaggggtataaattttaaaaactataaaattaaaaatacaaggataataaagtttggtctttcatagtgttaaaacaacgagatagctatttaacaaattttaagtaaaatcatattaaaaatagataattttgtatgggtgctagccgtgcaattgcacgggctacctagctagtttatttattatattataaacaaaataatgatatgcactattattaacatcaacgctaatgagcgcgggacatgactttgtgagcatcggcgggagcgttacacagacaacgaacgcaggccaactaaagcgtcctggcaggggacacgtaaaaaatgaaaaggaaatcggaatccgattgggaggcgagtaggcgaccggccggcctgatcgagttcggaatcggaatctgaatcggcgcggttgtacgtctcgtgtggacatatatatataccacctgtccacccgtcaccagaagacaagcgtacgtgcgtcgaactatggcaatccgcaagcaattagtgcaagtgcaaccgaaaaagatcgagatgtggcagtggcagcctccgcctctccatccaggggtcgtcaccatggcgaagcacaagctacagttggaggacctgtcgcagacgtgccggcgagaccactactgcgtcaggtgcgtccacgccttctgctcccactgctgcgatgaccaccacttcgtcccgctcggctcccacatcgtcatccccatcgccggtgtcgacgccgccaccggcaagcccgtcatccccgcgcactaccctcgccgccccgacctgcccatcaccgacttcgtcatcggtctcatcaacgccaacgacttcgccgaggagcaccccagggacgcctactgcatgtactgcttcatggccttctccaccgcgctctgccaccaccaccacacctgcgccgccgactgcgtcctccgcatcgtccgaagccacgacggccgccactgcgtccgctgcaccggcgacgagccgtggttcccttacatggagagcgtcctgggcgaccccgtggctgtcgaggaggaggagggcgacgacggcgaggtggtggctgtgctgctgctgctgcccgtgctgaggaggagctcaccgaccgcgtgcgtacactgcggcggcgaggtgcccaaacacatgcgccgctcggtgctctgctcgccggcctgcgacgcggcccaccaactggaggtcgcccagcgcagggagcgcagggacgccgtgctcgccgcgcgccgcctcgccaagctgaacatccatgccgtttgatcaattcttgtactgtattagcgctcattgatttgatctcgtaattctcatatctgtatgttgacccgtgtcttttttttttcgactccccgtgtctataaactattattagtaaattactttcgtgccggcaatatcttttaattcttctcttgtgcattggggttgattaaccgcctaatgatgcaattttcatttcacaaagctaaagctattcatctacaggaacgtttagcagggctatagtttcagctttatctcttttgaagctaaaactcaactaaactgtttcagttttatcaaacaagaaagcggagcaaactaagtgataaaaaaggaaaatttttatatgcatatctttaacgatttaaaagttaatataaaaaagggagtagctatatttatggcgccaaatttttcgtcaaaaaatagtcggcatgtatttacattataagtccctaaattacatttgtaattttagtgtatttacaatgtaaattccaaaattacatatgtaagtcctaaaattacatatgtaattctcaaaattacgtatgtaagttgatgtaattcccaaaactataaatttgtaatgacacagatatttagtttttaagattacatatgtaagcccacctatcatactcctattccactattcctctctctcttctctctctcacccttcctctctcttctctcactctctgtctcacacgcgcacagcggcgaaggaggtggcgagcggcggcggggtgcggcggaggaggcgaggcgaggcgaggctgcggcggtggaggcgaggcgaggctgcggcggaggaggcgagacgaggcggcggcggcgggagctcgcgctgctcaaggcgaagtgaggtggtgccggcgggggtgcggcggaggaggcgagcgcggcggcagaggaggcgagcgcggcgacggaggaggcgaggcagcagtggcggcaaggcggttggccggggcgacggacgaggcgcgcggcgtgggcggggctcgagaggagatggccacggcgcgcgggcggcggggttgagatgccgtggaccgggtgctggcggtggtactcgccatcgtagccgacgatgcggcgggacctcctcgcgtggtccgcgtggagcccgtcatcctcctcatccgccgcgcgggggaggcccgaggaggaggtggcaatggcgtggcccgagtaggagacgaggctgcgggcggcggggatgactggctcgggcgcgtcatcgtcggtagtcgcgtagctccgtgcgcccacgctgtcgcgtagtcattcagctccgctagccgtcgcgacgagctcccgccgtggagggccggcaccgctcgtgccagctgctgctccgcgtggcgcgccggagaaggcaacgatggcgaggcagtcggatcgcatcctgctccgagctccgtccgagagggaagagggaagccgcgccgagctccgtccgcccgcatgccaccgagatggaggggagaagccgcgccgagctcctcatcccccgccgtcaccgccgccgcgtcacgcgctgccgccgccgacccgtgagactgtgccgcgagagagaggaagagtgagagagagtgagtgagagaaagagaggagagagtagtgacaggtgggtaccacaatttttttataaatagaatgctgattggactaccacgtgtacgccacgtagaccaaaaccaccgcggattgggtcgagggggtaattcgtccggtattcatagttgggggtgaaaaatgtctggttttgtggttcgggggtggggggtaattcggatgaccgcgatagttcggggggtaatttgtactttttcctagataatatgaaagagcatactacggatacatatggcgttcatcgtgcaatatattccttttgattcatagatcacaacatgtgttacacgcgtatggttactagtagggttaatttgattcatgtcattacaaatatggcatattagaaaaatatcattacaattcacgttattgattagattccactgaaaaattttaaatttggaaccatgccacttccttcattgtttccgtactaatccctcacgtcctcaccctcacctaggggtggacagaaagctcgtggctcgtatgctcgctcggctcgtgacaagctcggatcggctcggctcgtttgattttcctaacgaaccgagctggaagtttagctcgttagagataacgagccagctcgagctagctcgcgagccttaacgagataggctgccagaccacaaaccccttaggcccatttatttagaaggcccaatagaccaaaaaccaaaaccctagcttcccttcccctttccctggtggtggcggctgagctccccgtctcccccacacgccggcgccacgcgacgcggcccacgcggccacgcccaacgccgccgctctgcgcctccaccctagcaaccgacgccgccacctaaccccagcgcccgacgccgccgatccgtcgctctccgcctctccctacccccacgcccgacgccgtcggcgagctcaagctcgtcccacgcgccgccgccactctccgcccctccccttgtgcctgacgccgccggcaagctcgagctcgtcccctccgccgccaagttcctccccgtggtcgccgcctcgccggcgagctcgagctcgtcccctccaccgccaagctcctccccgtggtcgccggcgagctgtcaaggtgccggcgaggttgagctgcttccgtgcctccgtggtcaccggctgcccccaaagctcacgagcctaacgagctggctcgagctttcaaacgagccgagccgagctgggttttttgctcgttaggataacgagccgagccgagctagcttgttaggataacgagccagaggtctggccaagccgagccgagccaagccggctggcccaactcgacatccaccacccctaccctcaccgtcagtccgtcacgtgagcgcgcggggagaacgctcgccagcgccggcaccggcaagcatcgagaggacgaggcggcgcaggcgagcggtgagaggacggggagatggagagacggtgccggcgagcggcgaggacgaggcggcagccgcaccctctcaccacgccctctccacaactgtcctcgccgccgaagccgccaccgtcgcagccggctggaacccttcagcgtgttggatagtataggaagaggggaataatgcaaatattggatacattgtattgagcctcagggggccgatatatataggagtacatggggaagagataaggaaggattacagatatggaaggaatccaaacaaaccaatcctatcctaatatgactctaactaccatatactctaacatcccccgcagtccaagcgtgagcagcgcggacacttggactggagaataaaccggcaagagtgctcaacacggatgatagccctttgtgccatggtcgacgtagccaaagcgaaggagccgagagagccgtggtcgatgaagccgtgcgcagaatagccgtggtcgatgtagccgaagtcgggaagctgatgtcgaggtagccgagccgcagggagcgcatggggcgccgtagagtggtcgtggatggactagagggcgtcgtggaccaaggtgcgtgaggacacgcaggagacgaagacggggacgcgatcacgacggtcgttgaggaagatgacgtcgaagagccgatgtagtcgaaccgtgaaggacaagacgtcacaccaggtttgccagacccggggacaactcgggacgaacatgcgcgccggtgttgccaataccgcgcgggcgagatagaggaccaccatgaatcatacaccaatgtcggagaagaccagcagagaaggcctccgggacggtcgcggcgcgagaacggcgtagagggagaattgccggagcagcacgcagttgccggagaagagcgaagtgtagtcgaggaagatacagcaacgctggcgatgagtcatgctggacgaagtagaaggcgaagtagcgggaccaacggcctggacggcgacgtcggtagccttgtagaggtagctgcaccaccggcctagagtggcgacagtggcagcttggagatgcggcggcgatgctcgaagtagaggaagaagaccctgagcggctgacgatgaccagtgcggacgacgaggttgtcgatgcgtgaacggcgatgaagacgacgaaagcggcgaagctgcggtccgagaggacaacacagctgcagctccatgtcgatgcagcgacgagaagtccaccggtgatgtagccatgcttaggagggcacctctcagcactgcaacaaccagtggaggcgtggaccacaggcggcggcactgtggcccgagggggcgacgcagcggcaatccaaagcttgatggtgtagacgcgtgctcgatgacgattggttgtagaagtcgacgaggcggtgggcgacgcaaaccgatctctgatcggaaaaggaaaataacagcagcaagcagcagcgcagtacggtagcacatcctctgttcctccatggtcccgatccatagaccaagtccagcagccttgcagcctcagccgtgccagcaggaagccatgaccaagtcaacgaggagattaaatccttcacttggccacagcctattcaccttctcccgaatatccatccacacacatgcagacagacagagataagggagggagaggagctgtgcgcctgtgctgggagacgcattgtggggaggtagcagcggctggacgtggagtcggcgttgacgacgaaccggcagcctgcccccaagcagcgtcggagacggtggggagggcccagattcgatctgcatgtaggtagccgatggtttggtagctgctgcatgtttatgaagatgaacgacgacgcagaacgctagagattgatctctccagcacgatggaacagcgacgaacaaaacgtccaccggaggtgatcgagatcagtccctcgcagcggtggaacaagacgatgaaaaaaaaaacgaaaaacggtggccgcccccaggagcgagatcacctccgggggcgacggcagcggaagtggtgagcggcggccgtaggtcgtccgctctgatactatgttggatagtataggaagaggggaataatgcgaatattggatacattgtattgagcctcagggagccgatatatataggagtacattggggaagagataaggaaggattacagatatggaagaaatccaaacaaaccaatcatatcctaatatgactctagctaccgtatactctagcaccgcgctcggtggtggtggtcacgcccgcaaacaaggtcgcattgacggtgcgctgctcctgaaatcactgaaacaagcagccaagcaaacacccaacaatctgagctaaatcaaatcaagttgggatgaggagagagagcaagcgagcattagatcgatctcactggacagcagcagcgcgggctgcgcgtgcaccggagacatccgggtcgcaaagcatggagaccaccttgtgctcctccttgtgcccgtgcgactcaccgccgtgccccgcacctgagctccaccgccagaggatggttttttttagagaagagtattttctacccggcctctatatccaaccggatatatacggccattgagatagggaacttagccccgcaaataacccaatctaaaattcgctccataggagatttgaactcaggaccttgggccagaggatggatggtcccgacttctctctgatttggggaagctggcggctcgcttcgctcgggcagtcgtcgtgctcgccggagagctaggatgggagaagggcacgctgccgctgccgctactcctcccgctccccgcgtgcaccgtgccgccgccaccgctgctgctgccgctgaaatatttttgaagcgctgtcgccgctgctcctccagcgtgaggatgatgacgtaagggagtaggacggaaacatccgaccaataacgtgaattgtaacgatattttttaatatgccatatttgtaatggcatggatcaaattaacccttactagtaggagtaaaatgtgtatttgtaagagcgagtgtgcttgagcatgtatgagtgaatcagtttgtttgcgatgttaaaaaaacaaaattaaacaaaagccaccaacatttaagtaattagatcacgtccactgtgtttctactttctaaaagaatctgaataaaccaagaaaaaagcaactccaatgacatatcttttcaatattcgttactccgctacttcctccgtccaaagaaaaatacaaccaatactaaaatatgacatatcgtagtataataaattgggacatactctgtgtttagactcattgtactaaaatgtatcacattctaatattagattgtctttttttttttaacagagcgagtgaagcaataagaatggatattatgaaccgtggagcactagcagctacgatttctctgatgatgtcctcatgcgcgtgaactactttgtaggagcaatcatattcatacctagtgagcgataattacacggaagtagattagtaaactaatctgtgccaagaagcaggaacatcttgtgattcctctaatatttgtacacaaatgttaaataattgcccacacactagctaagagggctatgtttggggagctttatgaagcagctgtttggtagctagcttctgagaatctggaaaagctctgaaacccagtttctccaacttctggcttcttagtttatttttcagaatcagtaactacagattcttagaaactgtggattgtttggggctgcttctagcagaagcagctttttccaaaagctgcagctgggagaaactccccaaacagggcctaggacccattgtagtacctcggaaaattacctcgcgcacgtgtcgcggcgcgcgttttctggggagcagcttggcctagattagttctagataatgatgatattttctgaaagattttttttttacagattgaaaacttttgaaataaaatttaaaattttaacttaaattttgaatactttcaactcaaactttaaaaattttcaacttgtaagacaaattttataaactttcaactcagatttaaaaattttcaactttagatttgaaaactatcaagtcagatattagaaaacatgtatgctaaggattaaaaaaaaagcagaaaaaagcagaaaaaaaggaaaatcgcaaaaaaaaaaaaatggagcgggagggcgtgcttgctggcgcgcgccctccaattagccatccccactatacattggccgcctcttcttgttaaggcactcaccatgatccaaattcccgctcggctttctcctctcgaatggcctcctgccgccagaagccacgacgaactgctgcgctcttcccatgtcgcacgttgctacgtagctgcagtgcggtggtatgggagatcgccacaccagcacgtcgaagcgcggcgtgtccacgccgggcaccacgcggccgctgagcaggtcctgcatcgtcaccgtcggtgtcgtgctcgccgccggcgtccacgtcgtcagcttgcgcctgccgtagaacaggcagtgcggaccgtccatggacggcctgtacaagtagtacgagtcgtcctcgtccctgaccgggccgtgctcgccgcggccgccgtgggcgtcgatggccgcccgcgcgatccggcgccacgaacgcgcggtcatgtcggcgcgcagcgccgcggcgtgcgcgttcacggcggcgatcatcgcgaagtgcttgacgccctcgaagagctccgcggcgatggcgaccagctccggccgatcctccgggtcggcgccgccgaacgcgaggacgcggaacatgtaccagagctcaggccggcgcaggttgtccagtgtgaccggccgcggcgccgtgcccaggcgcgccgcgtgctccgccgtcctgcagatgatgaccaccttgccgtccccgttctcccggcgaacggacgagcacaacctcctccatggctcctcttccacgtcgccgacgacgtcgaccacgacaagggaccttgcgctaggatcgatgccgaatctccggtgctcgtcgtcgtcgccggccgccatcagatcatcgctgctgagacggtggatcttggcgaagtactgcctaatccgctcgtcgatgcagacgtgttcgaccagcgtccgcttcccgacctccggaccaccgacgacggggaggacgccgggattcgggtcaccggccgacgagcacgccgggcgcagcaggaagtcgacgatctgctccttctccatctgccgcccaaacatgcaccgctccatgaacaggtaggcgctgtacggctgccggctcaggcgagggcagccggccaggagcacgacgagctccttggcgccgcccagcgcggcctccaggctctccatgaccgtggcgtcgccgtcgccgcccaagctgagcagcagcggctggcaccggcgacgacgacggcggctcgccgccgccgccgcggcgttccgtatcctcagcgcgtcgagcgcgtacgcggcgcggcacatctcccacctcagctgcctgcgctgccgcagcatggccgggctggtgacccgcctcccctcggcctcctccatgacgacgcgtgctcgcagcagcgctcgctgcagcctgcttgcgccgtcgtcgtcgccggcgcgatgctcctgccacttgctgatgaggaaggagatgagccgaccgacgaggtcgctggccgccgccgcgagcagagcgtcctttgctgctgcgtgcgtcctctgcaacttcgtctctcggctgtgatttgttaaggttggagggaggagatttttgttcttctaaacaaatcgacgagggtacaggagaaaactgtacaaagaaaacaaatttataagtaaacacccggagacctgtggactcggtcttgagtcttgactaaaggtagccagtccgcgagcttccttgcgcccgcgagggcctagtttttgctgagggacgagattctcaggtggtgtttacgtccagggactccctgtctctagacattaatttagagtattaaatatagactacttacaaaactaattacataaataaaagataattcacgagacaaattttttaagcctaattaatctataattagagaatgtttactgtagcatcacataggctaatcatggattaattaggctcattagattcgtctcgcaaattagtccaagattatggatgagttttattaatagtctacgtttaatatttataattaattttcaaacatccgatgtgatagggacttaaaagttttagtcccatctaaacagggcctcagcagcacacaaacgagataactcattaagggcttgtttagttccaaacttttttttaaaacttttaacttttccatcacatcaaaacttttctacacacataaactttcaacttttcaatcatatcgttccaatttcaaccaaacttccaattttgacgtgaactaaacacacccaaacacatattcgttgaaaaattcaaattctaaaaattgaatttaaacatataatttaaatcattttgagacgtatgattaattaatttaagtattgactattacaaaccagaaaattagatttatttgattttttaaagaaatttttatataattcttttcaaatagtttgaaaatgatgctagaaaaaaaaaagaggaatttatagtttggagtggaagaaaaaaacatgctctcagtgagcacttatgagtggtacgcatttatatatgagatgcattttaaaagaatttgaaaataaaaaaaaggtgaagaataccgtattaccgtagagcgtagtttatggtttctacaccgagtttctttcgcatatttaaccatgcggccctctttcggcttcgcaagcgtaaccacgaagagtttgaccgtaagacgagcatgtttgtgttgttctgttaaagtttgtaaatacgtatgctgaccggcatgtggttaatttgactgtttagtacttcagtggaagctaggtattcgaataaatcaagcgaagaaaattcaattcaagcattgttacattttgctaattgcaaggacagagaggacgctggcctggttttgcaagttgccatcgcaatgcaggttttgcaggctggcctagaaaaaaaaatagtggagaaaataaatactccctctgttttttttatagatgatgccgttgatttttaacatgtgtttggtcattcgtcttatttaaaaattttatacaaatgcataagatataaagcatgcttaaaatatttttagtgataaaacaactcataaatgatacttatgtacttcctccgtttcacaatataagtcattctagcattttccacattcatattgatgttaataaattattctagcatttctcacattcatattgatgttaacgaatcgtgggaaatgatagaatgacttatattgtgaaacagagggagtaaatgttttgaataagttaacaacggcgtccattaaaaaatactaaagatagtatcacaaagtttgctagaagtaggcatgttttgacaataactaattgttcactgctgcatttttgggattcagctagtacagctcaccaattccatgctaattatgttattggccaatgcaaagaaattttttccctactaatattaagtagcataaaaaaaaaccttgtccgtttttggcataactaaatttgatagcaaatgaaacatcatggggtactcttgtttgaaattttttatgcaaattaatatggttttaatccaagctagtccagtatggttcgagaattcacccaacatttatcttaagaaaacgaccttgagtttttctacagaatacttaacgtagacaagaagtataatgacactcttgtggatggggcatggttcccctagcttgggatgacgacttcttggaatggtgactatcgtcttgaaagcagatgtacaagtcaagcatgaagtacttgacagttgacatggatgataatcctaaacacctgattgatacaaaatggacgtaaagaacccaactactctacgatcgcagaggaatggagaacctggaacgaagtaagggccctttgaatcaaaaggatttatattaaaattttatattattcaaattttataaaaaaaaatattatttgacactatgatctaaaggattcaagctttacaaatcttataaaattcctatggaataactcattgcatgtagattttggaggaaacttagcaaaagctccgatctcttggaaaattttctgagcctatctctccgatccaattcttctgtttttccaaacgatcatttctatgtttttcctgtgttttgcaatcatctgttttacacttgtattcctatcagaatcctatattttttctattcctccgtttttttcaatcttatgatccaaaggctaatagttagagacttagaaggctagaatagagtgtagagacatggggcatgcattggtcataaactcataatgtaagagtaagactacgatgcaagatcttttagtgcatgactaactccgttgggcgtccaatagggttcgaggacgtcagcaagccgggcgtcgttggcaacaagttggagttagcttgaccacaagaatgaccgaatcgactccatggtgtggcggaggacggtgaggaagcggtgggaatgaggccagagaggtggagtttgtcgaatccttcgccacatccggcgccacctacggcggagtagcttggtgaaggtgcggaccaggttgaccgccttctgctattgctgatgcggcagcggatgtaccgcggtcgccatttgtacgtccatctagtggcctctcgtagctagcgggaggatttctcctcctcaacatccgaccgaaggggcaattccgtctcatcatcgggtggaggagcgaaaatctatttgggaatgaataaaacggcgaaaatgacaaagtgacagtaggcacacgcttcatgttgacattttatcgaatcgtgttctgagaataatattccaacgaaatcacgttttaagcgtgtccaaatgtccaattttttctcgacgacggtagcactgccctagagactgcccattttcgagctggaactggaagtggaggaattggctcgccctccccccttccccttgaacccccacccccgccgcgcctgcactccgctggtacgcccacgcccacggtctcgtctccccgaccaccacaatccctacccttttcaaaaagaggagagaggggatcggaggagaatttctccacttcacccccaacaagcatcccgaccaccaccaccccccgctaccccaggagagattcacccgcaatgtccgacgaggccaccaggcgcttggccgggggcggcgggggcggcgcggcgctgagggcctcctccgacgtcgaccgcaagccggccgccgcgggctccccgcctcctggcgccgccgccgccgcggggcacaagatccagctcaagagcgccgacatgaaggaggagatgcgccaggaggccttcgacatcgcccgcgtcgtaaccactcgatcccccgcacctccctcctctcgattcccttgttccctgattcggattgctcggtttgcgatgtgaaatggtttttgtgttttttggttcgctaggcgttcgagaagcacaccatggagaaggacatcgcggagtacatcaagaaggagttcgacaagaaccacggccctacctggcactgcatcgtcggccgcaacttcggtactcctctctctctctctctcgcctccccctcttcttgctggaaatttctttggtaccgcatcatctggtgatttatgtcttgtcctctcctgttgattggggtatccgcggcacaattccatgtgctctagagcttgtaggctaccgaatggtatagaagtcgatgtgtgtttggtcgataatgacaaagaaacaaccctcgtgaaatcttcctccttgtgttttggttaaggcaagccaagttagcactagggcataca

SEQ ID NO: 1473 - DNA, 671 bp, Oryza sativa
tgtagactagccctcattgtaaaaagcatgtttcttttcttaggaagcgagaggcccatgtggtgacccctgaccagataaaaaggaggcccaggcctaggagagaggggatttgggatttttgggagagaagagcatgaactctctctcgctctcgagctctctgtattccttcacacacagatccaccagaacacaggagtagggtgttacgcttctcagcggcccgaacctgtctacgtcgcccgtgtcttgtgcgcttcctctctcgctgacgttcctcagatcgagggcgaagaatctcacttagcgcccccggccgaaccggcaaaggggggcctacgcggtctcccggtgaggagccccacgctccgtcatctggcgcgccaggtagggggcgcgcgtgtctttcgaagccctcgtcctctttcgtgtgcgccaagcttctcccgctcagcccaatggccgaacgggcagtggcgcacagcctctctccgagcgctagcggtgacgacggggagcagaacccgcgctgtcgggctcgcaccccaccgtccccctctcgccgaaatcttgggcggggggaggcgctcggggaggtcggaggatccgcgacttccccgcccgcgggcgacgggggaggatggcgagacggggcagggctgcaggaa

SEQ ID NO: 1474 - DNA, 3045 bp, Oryza sativa
ttcttgacactccgtccacttggcaacgaaatacgctaaagcttgggacttgatggaagtacatggcttgaaggatagatccagagacatcaactccaaagcccattttgcaatccgcccatttgcctcgcaattatgaagtatatctccgagtggaaacgatatgaccaccgtgaccgagtgactttgaaaataatgggataatttcctaacggtaattaaaacaccatataacaacttttgtacatgaggatatcttgtcgtggagtcggccaaaacctcgctaatgaagtaaatcggtcgttgaaccttttggacgtggccatcctcctctcgctcgacgaccatgaccgtgctcacaacttgagatgtcgccgacacatataataacaacgtctcttgcggatgtggtgatgctaggaccggcggagttgtgagaagtttcttgaaatcttcaaaggcttgctgggcctcgggtccccactggaaattgtcggtcttcttcaaaagcttgaaaaagggcatcccccgctcgccgagtcgtgagacaaaccggctgagcgccgccatacatccagtcggtttctgaaaatctttctgagaacttggcggtttcatgttaaggatggcatttattttctccgggttggcttgtaaacccctacgggataccataaagccaagcagcttccctgacagtactccgaaggtgcacttttcaagattcaactttatcccgaagaaacggatgctagcaaaggtctcttctagatcggcgatcagatcatccttctgcttggtcttgacaactacatcatcaacataagcttcaacattgcgaccaatctgagttgaaaaacatctatggatcatgcgttgataggttgctcccgcgttctttaatcaaaagggcatggtgatgtagcaataggccccaaaaggtgtgataaacgaggtcttcaagcagtcggattcctttaggttgatctgatgataacccgagtagcaatccaaaaagctgagtaactcgcagccaaccgttgagtcaactacctggtcaatgcgaggcaacccaaagggatctttaggacaatatttgttgaggtcggtgtaatcaacacatatatgccattgcatgtcttcttccaaaccaaaattgggtttgccagccagtcacggtgtaaatcttccttgatgaagccttcctgtcttgtgtgaaacgacggagtcgttgcttgatgggtttagcatcttctttaacatttaagaagtgctcaatcacctatctaggaataccaggcatatcagatggtttccacgcaaaagtatctttattagcttgaagaaaggtgatgagcgcgctttcctatttacaatctaactcagcgcctattacagcagttttggaaggatcagagggatcaaggggaaatttcttggtcttggcgtcgctttctccggtctttgatatcttgggtgcaggcacttctccttcggttgcagttgatgcagtcagttggatctcatcccgaacaagtgtaatctcatgcgtctgggccatctcacagctttccttgtcgcaggtgacggcttgcttgatgttgctccgcaaagatatgactcctcggggtcttggcatcttcatcatcatgtaggtatagtgtgggactgctatgaatttggctaacgccgggcgtccaagtatagcgtgataagtcgtcttgaaatcagcaacttcgaagcatatattctctgtacgaaagttctcccgagtgccgaaggtgaccagcagagtgatctggccgagtggagtagaagacagcccggggatgactccgtgaaagggcgcactactcggcttcagctcagtacgagggatttgtatatcgtccagagtcttggcgaaaagaatattgagtgcactgccaccatcaatgagggatcgtcggagcttgacgttgcgaaccactgggtctagtaccagggggtaccgccccgggtggaccactcggtcaggatgatccgagcggtcaaacttgattgctgtctctgaccaccgaagatattggggcgtatcgggctggacggcattgatctccctttcaattagcttttgcttccgcttggactcgtaagcttggggtccaccgaaagtatggttgaattccttgcgagagtcttggaaaccagtcggtccgtcatcttcgtcatccttcttttttgaagtgctttgttctccatcagtcggcttccgtgctttcttggcgtattgctctgcgaactgctgatagatgaagcaatctttggccgcatgatttgaattcgggtgatgtgagcactgagcattcatgatcttgtcgaaagtattgatgcgcgatctctatcgagaaaaaggtgctgtagttgccacaaggtcctcgggcttacgcttgcgatccttatggttggtacttccgctcccccctattgctggcgcatctttcttgggcttccaatcgcttcccgactgcttggacgcggtgacggcatcatcggctttggcgtactcattggctttttcaaacatctgcttgaatgtcctggaggcttgcgtccgaatttgccgactaagagttcatgacgaacacccttagtgaaatcggctatgatgacgtcgtcggtaatgtcagagatcttattgcgttgctcagaaaagcgttggatataatctcgaagggattcaccgggcatctggatcacgttgtagatgtcgcactgggtgccaggactttcgaaggtgccttgaaagttggcgatgaagtgttcgcgaagctctgcccaagatccaatcgtaccacagggtaacctgagaagccaggatcgagcagaatccgctaaagccactgacaggtaatttgccatggccttgctatctcctcctgctgcacgaattgcgagaccgtagacggtgagccaagactcaggatttgttttgccgtcatacttcacgatcccagtcggcttgaagccggccggccagtccactcgacgcaggtcacttgtgaa

SEQ ID NO: 1475 - DNA, 2340 bp, Oryza sativa
cgacgtggttgggcgtgtcttcctgaagtagagtatctagaagggtgatcgctgctaccgcgttctgctgtggggtgcgaaaaaccgctgtcccctcaacgtcttgttgtccgatgagttcgcgtgctcgccgtccagcctccaaggcgcgttgtcgccagtcctcagcctccttcgcagcccgctcgcgttcctgctgctcacgctgcagccggtctcgctcttgtgcttatcactcctcttctagtcggcgacgctcggcttcctgtcatgtgcgttgttcttctgcttcacgggcttgacgctgctccactgtctcgttatcagccatgaaaacaccgaaaaagagaggcgtataattgtcttcataggcttcgtcaaagtcgtcgaggttgctgaagtcgtagttgtagccgaagtcgtcgtagtcgaggatctccgttggccgtgagtcgacaccaggagagctgaggtagccatccaattcttccgttgaaaccgtcccgagaggctgaagtatgacaccgacttccctgaagctagattggatcggagccgaggccggatcccatctagacctacggggagaggacatccttgtggtgaagaccgcagccaaatcatcggggagcttcatcaggatcgatcgattggccccatcatcttgattaggtcatgttggagtagatgagatcacgtttgagtggtttgaagccaactcggatcagatgatcttggagtagatctcggccgagttcgggagaccgaacggggcggagacctcgtctcttcctgactagtttgaatcagagtcaaggagagagatcctgccgaagttgtcggtgatgaagtcgaggctgctgaaccggaacgcctgcccgagagggaagacgaagtcatcgatgccggagacgaatcccatcgcactaatcagcgagaagcttgacgcaacccctacctggcgcaccaactgtcgaaacaagatttcggcaatacgaaaaggggtggctatcaagcaggaaaagtggatgggtttggagacaatgaattttatataggtttaggccctctcaatgagaagtaataccctactcatgtccggggattgatccgccgagtttgttattgatcgtatgatctgggagaaaagttatgccccaagaggcacccggacccctccttatatagtgtaaggagtccgtattacagcatacagcccatattcctaatggaataggcaagtaaagatagaatacaatcataaccgactaggatcccggatatttccttaatacacaagttaggaatttaacccgagccctttaaagatattctatctacatatggtacctctgtacccagtcggatatacatgccatgtgggtatggggtatccataatctccacagttataaaatgtgaaccaagataatgaaagccctaaacttgtaaaataaaagtgaaatatttaacaaaattattcattatactcaacttaattaagaggtaacatgttctgaacatgcaactctaacgtcatgcacatatagaatactatacacctagaacacgttataactccaaaaattgtgaaaccaaaagtgttagtcttagaaaacacatccctacatatctgtggagtcaaagttagtaagaatcacttcataaaaatattttataacactacctaggtaaatactatcctataccgagcaaacttctaaaattcataactcacaaataaaaagagataaaatagaaattcttgcacctaaattcatattagaccggtacctattcactgtgcacaaatcatgcattttagagcattttgaatttttcgcatatttcaatgtttaattgcataatgtgtactttatatagatgattgcttaaacgatgaagaagtgattttggtgctgactttttctagttaaaaggcaagtcccacctccctctctctttgatcactttgaacctatgttttgaaggttattgaaaatgtttgcaaatcttacatgtcgattgtacactaatacattaaaattttgttaaacttgttagacaaactcctattatttgcattatcaccttaatcccgcatatatccatatccctcattcctaaccttaggaatcatatcctgttactacttggaatatgagttacactagtttactatattgcttagccaagcttagaatggttttacttatcacttgggctcatattaacatgaaaaatgattttattaagattctggacagagatgaataaatcaagtatttgacaaataaaatgatggaaaacatggattttaggtttgggcctcaagtggtg

SEQ ID NO: 1476 - DNA, 539 bp, Oryza sativa
ccacggggccgagtcacctgcggggacccgaccctacgagggcgagggtgggttaagtttctgacccgcgggggaggcaggggcggggctccgcatttttgcggggaggggacgggggagacagttcacccgcgagtgacccgcgaggccccggggggtgtatattaaccctttaaatgtagctcataggaggcccaaaagagcccaacccaataaaatagagataaaatgaaaaggaaccctagccttatcctcaccagtgtcttcccaactcccctcccggctcccgtacgcatcacccacaggcggaggcggcgctaggggcaagggcacacgagcacacggcgcacttctctggatctcgccggcaccggtcgccctctcccctcccctccagccttccgagtcctgtcctctccaatatccctctccggctctccctcaggtctgccgacgaggcgacgaagcacaggcgcacgggcgcggtgagggcaccgtcgagtggcgagggcacgccggtcggcgaaggtgtggcgcac

SEQ ID NO: 1477 - DNA, 2726 bp, Oryza sativa
ctcgaggcgtcggatgtttcattatgtttgtttgatgacttgaattattcacttcatccctcaactataatgaaaggtccggagagcctgcgacacgaggcatcggcgtttgggagttgtggagatcgctagtgctgatgctgtgtcttcgggagtaggagctttgctatgcgagagaacataatagataatatcaggcatgccaagctgttgggcattatatctgttgggaatctctcctctctgaatgtttaagtactaatcactagcactaacataaacacttgtatttactcggtggacacaaacacacaagaactgaacaaaacacacaggcttttggttgatgtggccactagctcacatcgttttcttgtttatatagactcagtacatacaaagagattacaatggccaaacccactcagccacaactcacgccatgcacacagacgtgggatgcccatgcactaagtaactaactaatcctacttatttgccaagaaatcccaatacatgattaccactaatcgcagcatatgcggctaatcactagcaacaactaaatctcatgtacagctaggaccgattcactcggctcatactgaccttgtcttgcttgcaattcggctacttctcgcagcactccacatgcagttgagcttggtcttcatgaacgttgtttgctccattctcgcaccaccgcatcgcacggcacgtcggcatctcgccaatgagctggagccaaactaaatatgcagtgacatatactacatgtaaacaaaatagaaccatgcatatattctaattaatgacaagattaaactctatcaatatctatacagtatatataccaggattggggccctcgtttgggctgggcccttggccgtcgcccttatggccctgctctagagatggcactgcgtccacaccttcaccaaattcggcaagcagcggagctccctcctcgccgtcaacccgagacagccacctctccatctccgtcgtcgtcatctcctcgctgcctgaagaccccaaaacgtcgctcccatcaccattgtctccctccggccgttgttcctgccaagacgaactgctgcccatcatcgtcgtcaagtccgcagcaccgagtcctttgtcatccacctcctcgtcaagcccgaagatcaccagagccgccttctcgccgtcaatccaaagcatcgtcgctatcttgagctcactgccatcaaaacctcgtcgccaatccctctgtctccgcttcgtcgtcatcttcatggtgaggatccgctttctaatctctccctcctattgtcctcatcttactacgctgtcgtgccactgtgtgtcggtgacctccggtcccgtgctgccgatgtcggttgtcgtcttcctccagtgtacattcacgtgtttgtgcacgtggttttacgcataattgtatagttgcaaaaataatttaacaatacgaaaatatccacttaaacagaatataacttcggatgttcacttcttggccatacatactctaaattgacatgttcaagtctttaatttcaagttaaatcatgacgcacatatttaggtgctttttatgtaatgtttaggtcctttacttagtgttttagtcttgttttgtttaagtcactttgatcctacaactgataagatgcataaattgaagatcaaatagtcgatgggccaataagccgatatagcaatgctagctgatgccgataccatccgatgttgatagggttttgaacaatcggctatatgtcgttggactcattcagattacaatagtttcatgagatttttgaaggaatactattgatagattttttttttccttttcctaccattcagaccacaaaaaccaatcaaaggaaaatcgcaggaagatttcctacactgttaattccatgggaaaagcacggggaagaatcaatccactccgaccctttttttggttttcttcgcgttggaacgaggcaatcaaacactatcagtgaagaacggactgaactggaggtgcttgcgtcaacgaatgaactgacctgaagaacttgaaaaacatgtggaggaggcatcgaggagactggacggcgcagtcagcgacgtcgaggaggccgcgcgtggaggtcgacggtgatgggattgaggctggcgtccggcgtggagtggatgtcgtgctggaggttgacggcagcgagcttggcgccggagtcagaaaggaggagaaaaaggttgtgtggtgctaaggaagctgggcagcactgtcatcggcatcgaggaggctgcgccgcgaaggccggtggtgatggggattgaagccaacgtccagcctatagtcggagttgaggggaggaagctaggtggcgcagccaaagcgttgtggcctgctgttgttcggctcgtaaagaaaacaacgggaaaagatgggtgtcggggttatccggattatattcatattgttctatctagttctacttggacaaggaaacacctatgggtataaatagaacactagaaggagagggaacattccacaagaccaagatcaacatagaccaatacacaagccaacacacgccaaggcaagccaccggatatcgatattagagataagtctagacaaacccaatatgatgtctacggaggccaacaagagggatctagcactatgtctaatctcgccaagtgcagactcgaggaggaag

SEQ ID NO: 1478 - DNA, 6672 bp, Oryza sativa
accccacatgtcattctcaccccctcctttcttcctcctctctcccatttccccatgggagagggcgcggagagctcgtgagagttggggaaaaggtgaaggggagaacggggaagctttttatagagcggggaggcggcgaggaggtcgggatgaggtaacaacgaccagcggagtggggcatcgacgtggggtagtggtggctcgagttggcgacagtttttgcgggagagtgggggaagaggggcgagagatgtagatgagtggaggggactcggtgctatgtgatttggacgaggatgtgggcggcagcgcgcgtgaagggcattgacgtgggcgtcgaccatgtgacggggtgacgggaggtagaagaagaagctgacaggtggggcccacagcgagattgctatttggctatcagtcacgcgcagtgagggggcggcggacgcgccacgtgggaggaggagggaggagcgggttttccgattttttctggttttttttgggttttttttcctttttttccaatttctcttctgttctggtttttttttaagatgtatgaatacaaagtttgtattagtacgtatagaaagtttgtatacgtgatgtattttctagttttttttattatgtatgtatataaatacatacatacatacatacatatatatatatatatatatatatatatatatatatatatatatatatatatatatatatatatagtaaatttgtttggtgctccatggtgcccgggctccatgattcaaattgtgtatatacccaattcaaatgagtataaaactttttaaaatgtttaggtattaacattaactactttactaactagttcaaagcaagtttgaactgaatttaaacatgtttttattagaatttgattctaggtatatagcatccaaatatataattagttaggtatgtaatattggattgtgaaataaagttaaatttgagttgttttgtttctaggtataggtataaatcgaatacttataactagatatatactcacaatttgaaaaatttaggttagtttgtgtatttcataccatggtgccccatatgagtgtcctatatatatatatagacacacacatatacacgtatgtgtgtatatatagtatatacatatgatgtatatagtacatatgagggagactagaggggggcgactaaccgcgcgcgcgcggctgatcgcatatcagcgcccctcgggcccacggtcccacctttcggcgatagggagagaggaaggaggcggtgtggactttgagggagaggggggggcgaacgggccaaggaggcatgggctgtcggagggagaggagaggggctcggcctgtgagagaagagataaggatgagcgagtgagctgagggaggaaaggcagacttgggccggaaacagcccaagaacaaggaaggagaattttagtttgttttctttttatttaattaattaaatgaagtttgttttattaaaattacttcttgagctctgaaaattcatgagaaatttcagagagtactatagggcatggaaaataatattacaaaaatatttgtagccatgatttttaaaagagattttaattccctcattaattatcttaattaattgcaatagaaaatcggcgcgtgacaaacatgtccatcaattcatgatgggatctcaccaagcattctcattatatatcaacatttgactctctttgatttctaatgtgtgaggtatcatctttcttgtcatccatccacaatcctatcagttgatccttacatatgagccatcaaccttattgcttgatgcctggacaaactcacagcaaagattagttccaacaaccgttgtcattaatcaccaaaactcctctcaaaaaagggttagaggactgacagcgtgggtggtgatgcctaaccaatggcgtggtgagggattaatcggctgacagcgtggggagggagggcaagggatagagagagatacaagaattatgaactcatttgcaaaaacttttttactgtatcatttatttattatattgtaaaaaaattaatgatgtgcactatatttaacattgacgctaatgagcacgggacatgtcagcgttcgagggaacttctaaaaatcataaaaatgaaatctaacgagacaataaactctaaaaactattagctctaatttttaaaagttataaggagaatgaatagaaagagtgatagatggagcaagcaattaaaggagaggtgacaaagatgtaaggggtagcaactgacgtaaattttaaaaattataaattagaacattagggaaaataaattttggtctttcaaagtcttaaaacaatgagatagctatttaacaaattctaagtaaaatcatattaaaaatagatgattttgtatgggtgctaggcgcataatttatttattatattataaacaaataatgatacgcactatcattaacatcaacgctaatgagcgtgggacatgactttatgagcatcggcgggggcgttgcacgacttacacagacaacgcacgcgggccaatctctagtctctactaagatgtttttgtcagaattatggtatgtcattcgtgtttgaaacggttttaattttatgtttcgattttaatctatatctctacttaaaaacaagaaattcccgtcttctgtaaaaagggaaaaaaaagtccgactcaaaaaaggtaaaaaaaaaagtccgaattaacaagcgataaaaaaaagcttccgtcgtcgtcagtaaaaaaaaaagaaaaaaatcatctcttgtccgactcatgtagaaaaaggaaaaaaaatctcccagtaaaaaaaagtccgttgtttttttggcaccagtattttttctgttgttctttgcacgcaaaagagttttttatgcgcacatgctaaggctttaggttttttttttgtcccgttttattaatctgatctgtccactgcgcgcctcctgggcgcatttagtttttttcgtcaatcttttttgtcgccagttttttcttccgtgcgctttttctttttctcatccggtttataatcccatctgttcgccgcatgccttccaaggtgaaccctagcgccgtgccgccgccatatcgatcatgtgatttctcctccaatttgattgcaaaaaccgattccccactcctctctcatcattttctccatgattttcccttcgattcgtctttaattgccggatttaatatctgctttacagttgctaatgatgacggcaatcttccccggtcatttttatctcgagttttacgctctgattttggggaaaacggaaagagtacatcgaggggatatcgatcaaaaaccctcgaccaattttggctaaccgagaaagattcggctggatttgatggggatatttgctccggcaaacgtacgggcacgggcacgagattatcttcgggaggttgaagatgatagtcatatttggaaagttgaagatggtagggtcgaagagaagcaaaccaaatggaggtatagatggccatatggcccgaggcccacagcccgacccaagcacggcacagcccgactgggtcgtgcccgtgctggcccggcccgacagccgggccatgcctgggctacatcctcgacacgatgggtcggcccggcatggcccgatcaaataaaaaaatatagggacgcaaaatagacttatataaccatataaggcaacccaaagaaaagaggaatacaaaatagacttattttccagccatttgaacacagccacagagttgagggatgaaaaatagactttttatgtggagaagcacgatggaccatcgtgccttcgggccggcccggcacggcccgagtagtattgggccgtgtgtttacgaccaaatttagtaagatatgaaccaggtttgatgttgggatcgaggcggattcagcaaagagatgaattcgaagaacagagtatgcatcggctggaatctgcatcggctgatatggatcggacagaggacagccgatagaggtgatgcagccgattccaatgacgatggtttcagagctgtttctagaatcgatcaatatgcttcatgaggattgccacgatagagataaagctatcagataggcaattgtatctattaattaggatgtctcgtgtaattttcttagagataagtttgggcaaaagtctgtcgcaaagacttatgatatcttagagtttgttagagataggggtcgtgtccggcaaggacatattttgtatttcgggtataaatagaatccgaacccatgtaatcaattaacaacagttcaatataatatcggcgcatcgccaccctttttttttgttctatttcgacgagttcttgctttcgggttgagctgcatcgattcgatctttaactagaggtaagcttgtcatggcagcttgcgttatcgggattagtgcttccatctttacgacactctaatcttgtttaagtaattcgtcgagttatcatatacacattgtaatctttgttagttgcactatataacttgttatcggctggttcttatcgttaggaagtgaccgatagtgttatgttttgctattaatctagattatatcatgtatttatcatctcttatagtttttatcatcttgcctagatcttatacttatctttatgcttgatgctcatcggttgagttcgatctattaagtaatatctataattgtaacatctggcttgctttatgatcattgagagagagatagcatcggggtttcagctgatcttacctgatttagctactttacgtcctatatgcttgattgatatgctaaatccgccctttatattaagatcttattgcattaaaatatattaggcttcttgtttgatatattctatctgtaatatagagtggtatcggagtattagccgatacatgctagatctatctgatcggctatgctataaacgtttataatctttgtgttaatgtatacttcgatctaagtgatttatactgtctcggcatgacgaccgatctatcccaatcaattggtttaaatatacatcaacagaaggattatatatcgttaatatctacaacagttaatatctacaacagatcgagtagatttagtcttatcttatttacttatgactgctgatcgatcccaatatgacatcggctcaaagataaatgatatgtcatcggcagctagccgattggctatcttttatggatttaaccgtgatttttcttgtctttttttcttgttgattgtaggatcaaatcaactggcacgctcacgaacctaaaagcaaggttttggacctgcacggaagttaagcagatcttccaggccagtgtatgtttttcgcatcaacaccgtgcatgggccgtgtatgccactcgtggactggcacggcatggcccgccgactgtggactggcacggcatggcccaccgtgtcggtcgggccgtgccggcctgactagccttggcccaggcacggccgggcttgggtcatgacgtgccaggcggcccagtcagctatctataaatggagggaggagcggactagcctagggctgaaaaagaaggaatgctttcggccgaaaacccaggaaatattttcattaactttttttaattataatctatagcgatcccaatgttaagatttttattaactttttcaattatagtgtatagtaatcccaatatttcaatttattacttagctcttaatatatcactacaaaaagtctttacccgttgcaacgcacgggcatcttttgtagtattataaaaattgaaaatgtttttgctgttatttttagtacgtcatctgtgtatgagtcgatttttaagttcgtttgcttttggaaatacatatccgtatttaagtcggttttaacatcgttcacttttgataatacagaaggaatcatataagaaatctgtttaaaaaaactcgcatgctaactaagacgatcggactactaactgcacctaataattttctaaaaatatatatatccaagcgaactctcacattgaatttcgtattaactaaaccatataacaataataataagattaaaataaacttcactcgtcgcaacgcacaggcatttttttctagtaataaaaaaatgttagggacacgtaaaaaatgaaaaggaaatcggaatccgattgggaggcgagtaggcgaccggccggcctgatcgagttcggaatcggaatctgaatcggcgcggttgtacgtctcgtgtggacatatatatataccacctgtccacccgtcaccagaagacaagcgtacgtgcgtcgaactatggcaatccgcaagcaattagtgcaagtgcaaccgaaaaagatcgagatgtggcagtggcagcctccgcctctccatccaggggtcgtcaccatggcgaagcacaagctacagttggaggacctgtcgcagacgtgccggcgagaccactactgcgtcaggtgcgtccacgccttctgctcccactgctgcgatgaccaccacttcgtcccgctcggctcccacatcgtcatccccatcgccggtgtcgacgccgccaccggcaagcccgtcatccccgcgcactaccctcgccg

SEQ ID NO: 1479 - DNA, 5242 bp, Oryza sativa
cgccgctcggtgctctgctcgccggcctgcgacgcggcccaccaactggaggtcgcccagcgcagggagcgcagggacgccgtgctcgccgcgcgccgcctcgccaagctgaacatccatgccgtttgatcaattcttgtactgtattagcgctcattgatttgatctcgtaattctcatatctgtatgttgacccgtgtcttttttttttcgactccccgtgtctataaactattattagtaaattactttcgtgccggcaatatcttttaattcttctcttgtgcattggggttgattaaccgcctaatgatgcaattttcatttcacaaagctaaagctattcatctacaggaacgtttagcagggctatagtttcagctttatctcttttgaagctaaaactcaactaaactgtttcagttttatcaaacaagaaagcggagtatagttatgcaaagttaagtgtgcgattttacagtttagtgtttccaatatttattatcggctttcgatgggtaccgatatgtttccgtcagtatagttggtttcaggttttccgatattttcaatatcgttttcgtttctagatttactattttcgattccgttttgaaaaaaaaattatggtcatgaaaatggttgagacgttttccgaccgttttcatcgctacgttacaccatgggcctgtcgttgtctaaagaagtatcacgattcaaagaattcacacaaattttactgtaaaaaagtggccatgatattttatttggagatttttagtaccgtggaattcatgtctgtagtcgacatacagacatgtactagactccaccagatttcgtttacatcagaaacttgctaaagaactcacagatgtgttcagaaacctcatcaggcttctcctggttgatgaagtggccaactccctccaggacaaccacatcctccagattcggcacattggctttgaatccacccttgtgaatgtaatccttcacacctggtgtgttgtatgtgagatccaggtcaccgacgatgaattttatcggaacatttatcagagccccagtccatggtgcagtcagctcccaatccctgcaagaacaatacatttggctgacgatgaacggcatgaacgaagcagtgaacgggaaaccatgagagtgagacatacaggtcaatgcatctgtagtagttgaatcctcctgtgaaccctgttttgccgaatttgtcagcgtagtaggaaatgtcttcctctgatagccatggagggcaagtaccatctgaatcaattgcatcaaagaatgtcttgtcctggggtagaataatagttgccggtttgcgcattccaaacaccattttaaacagatggtttaaatcgagtcgagcaaattcagcttcagccactccgggtttctgcatatgcatcaaaattcctataagcgtaatcgtttccaacaaaaacatcaatagctgatgcttcagaattcagatcactgcaggcagtggtggccacaaggatttgaattatgaatttatgattcaaatccaaaatttgaattgaccgtccaaatttgaatttcgacaggtaactgcacgcgttctttctgccttgctcacctggaagcggcacacgtagtgatcgtccccgcagagaaccctgacggcctggagcacgctcatccggggatgcctcggctggtactccacgctgaggctgacatgcgccgtcaccaggtccgcccggagcaggcacagctgccacgccacgacggcgccccagtcgtgccccgcgacgaacaccttgagagcaccaaccaaatcaccctcgagcaatcaaacaaacaatggggactgatgctgctaatgctactaactgctaataaggatggtaaaccgtaaacgtaaaccaacctggggccggccgaggtcggcgatgagggcgacgaggtcgccgacgaggtggaggacggtgtaggagtccctgccctgcggcgcgtcggagtcgccgtagccgcggaggtcgggcgccacggcgcggaacccccgcgcggcgagcgcgcgcatctggtggcgccacgagtaccagagctccgggaagccgtgcacgagcagcgccacgggcccgccctccggtcccgactccgccacgtgcagccgcaccccgctcgccacctccacctcgcggtgccgcaccgccgccgccgccatctcgtagagggctcctcctcgatcgatcgatcgatcggcgcgcgccgcggcgagcgtttgaaaatccagcccgtcctctgcctgctctgcctttgtagccgcgcgcgccggccgctcggcatcggtgtgtcagccagtttgggggaggcatctggttgtacggggcgaaaccggccagaggcagagccccgtcgtggtttccgccggcgcgaccggccggtggcttggggttcggcatctccgccgggattctccgtttgccggcgctggcgctcggtttcctcccgtgtaggtggtgctcgacgtggccccagtatacagccaggaatcgcttaggagagaatgggaccacatgtcagtgacagtttctgccgagaatcccatcccagattgtgcttctagtgctttttactcgctcggtaaaaaaaagaccaacttttaattactctctcggtttctaaatatttgatgccgttgatttttttaaatatgtttgaccattcgtcttattcaaaaaatttaagtaattattaattcttttcctgtcatttgattcattgttaaatatacttatatgtatatatatagttttatatatttcacaaaaattttttgaataagacgaacggtcaaacatatgctaaaaagtcaatggtgtcaaatatttagaaacagagggagtataaatctgagcatagctttaaatttatagattttagaaaattcagaagttaatttttttctggaacggagagtatagttctaagtggagaaaatatcagctctttagaataaacaatgcaaccaaaataatttgtgagtaaaatttttatatattatctatataattaacgattaataatcaatactacgatggaaaaaaaacctaaaatcaactccaaaattacattctgaaaatttaaattttgactatagttaataagctaagaggtaaatgagaaggtcagcgtatggaaccctggtgatgtcttacgtttattattctgtgctatatttcacatgaaataatacattactagttttaaatggacataacacaattcaatttgagttgaaattaatcccagcaaattcaggattccttcaaattttctggaatatttagcttccccaacgaaaaaaaaaaacttataacatcacatagctttataggagcctaggagagccattcttcaatcttcatcgcctttagtccacaatccaaactggttatgacacactatcggccatgtgaacagaaactgcttgattttgaaattcacaatatatttggaagatatcagtactggcataatggttctagtttttacagtacaattagcaagcaggctccaagagattttgcacatatcagaacttgctaaagaacccgcaaatatggtcggagacctcatcaggcttctcctggttgatgaaatgggcaacaccctccatgataaccacatcttcgagatttggcacacatgcctttagaccacccttgtggatgtaatcttttacacctggaatgttgtacgtaaggtcctgatctccaacgatgaattttgtcggaacttttattggaactccagtccatggtgcagtcagctcccagttcctgcatgaacagaaaactactgagggtgacatcataaatgactaaaatagctcaggtaaaagccttctttcattttaaattcttgaagacaccggcaccaatggaaatgtagttcagccatatatatcaaatttactgttgtttgaaaagaacatgtttcagtggagttagagccagcatttcgaatgactttccctgtacaatgctaaacaatatcatgttgctttcctcacttaacagcaatgaaggatgaataaaacaatgaactgtataaccaagagaattacaagtctatgcatctgtagtagttcaatcctccagtaaatccagtcttctcaaatttctcggcatagtaggaaatgtcttcttctgacagccatgcagggcaagtaccatctgaatcaattgagtcaaataaagtcttgcctgggggtataatcagaggtgctgccttgcgcattccatagaatttcttcaagagacactttatatcacctctaccaaattcagcttcggccactccaggtttctgcacacataattcggtaatttgtaagcataattatttccaacaaacaaaatataaaacgatgttaggatgacagattgttatcaaggataaacagctgattaaaactccagataccctttccctctgaataaacagtatggactgctgtattcaatatccaaaagggtaaagagaatgtcaagataaggctattaatatctgagacaggagtcatcaatgttcttcaagatcgactatactctcatgcttctgaataaactatttatagctccacataaaaaaagaatagttatagctctccaagcaggagttactgttatgttaagctcggcataatattggaatttagagctaccaagcatattacccaataggatcatgagaagaacatagttcaaaggatggccagtcttcagagaacaacatggttacttcgaagcaataattctttggacccttaagaacccagtaacttggcaatgcaatagggatacattccgatttccctacctaggatgttgaggtcattcaacattcgttgtaattaactaatctattcgttgtaatctatttcaattgagcaaagaattcaaatctaacccttctgaagtctcaatagtcaagaacacctacaactacaagtaatggggtttttttttggaaatactcaaaaggattgctcacctttgtattaagaggaataaaatttacaggaatgaccaaacaaagatgagagggagggggcggggagaaaaggaagggaaaaaaaaagaaggaaatggaaaacaaggacttgagcctactctcatgcagtcatgctcacaacgtgacgacctagcaaccaagaatgctactacctccgtttcaagttataagactt

SEQ ID NO: 1480 - DNA, 23149 bp, Oryza sativa
gaaagtcttataacttgaaacggaggaagtatctaggaagcgcgggcgacgagggatgagcaagctgccagagggcgtcctcttgcgccatagctgcaacaacgtcagccaggactgtgtgcaattgttgaaaacgccgctgttcttctccttccaaatggaccaagcgccaagggtcacgactgtgtcgaacccgcgacagcactccctctgaaccttgagcagactggagcagagccgctcgtggaaggccgctgctccagaagggaagcattgggggaaggccgctgcagacagcgatgtagtggtcatccccggaaggccgctgcgcacaagcgtcaccgacaaacactcgcctaattgtcctaacaaagattgtaaaatcgttccagcagacagcagctgttcaccacttttaagttgcgtggaacaacaaccatcaatgttgctaggacagaagaacatagcttcataattgctctgatttttctactacgagtactaacttgcaacccaacccatcaatcttaattgctaggggacctcaataatttcattgttctgcctgcgtcgtacaaaaattcagaaaagggattaaatggttgctgttcacctggaagaagcagatgtagtggccgtccccgcacacggccctgagggtttgtacggggctcctcgtggggttccgcgggtggtactcgacgctgagggcgacgaacgccgtgacgaggtcggggcggagcaggcacagttgccacgccacggcggcgccccagtcgtgcgccgccacgaacacccggggctggccgacgtcggcgatgagcgcgacgaggtcgcccacgaggtggagcacggtgtaggagtcccggcccggcggggcgtcggagtcgccgtagccgcggaggtcgggcgccacggcgcggaacccccgcgcggcgagggcgcgcatctggtggcgccacgagtaccagagctccgggaagccgtggacgagcagcacggcgggcccgtcctccgggcccgcctccgccacgtgcaggcgcaccccgcttgccacctccaccgtccggtgcctcacctccgccgccgccatgtcgcgcgctcgctaccacggcggtggttgggcacctcacctggccgagtagtagacgactagtaggagagtagagtagtagcggggagctttgcgttccgaggatttgggcggtgtgggtcgcatgactcgcgctctgctgccgcttgcttggttgctttgctcaatgctcgagagaatatcgggtgctaccgtgctaccaacgtcagaaaatacatccaaaaagttgcaaaaaaatgtaaaaaaaaatcagagatgtgtagctctaagacatgtagcatcacacaaaaaaatcagtttaaaatatgatgtaggagaaaaataataataaatttgtgctccaacagtgttcaagcatgtcactttaccaatcaactgtgatttatctttttttccctacctacatagtattttgatttgattttttttatattttttaatatttttcatacctacacatctccgaattttttcatatttcttttgcaactttttggatgtattttttaacattgatagtacagtagcacttgatattcttctctcctcaaggctcgtagacccaaaagtcagaaactcctggacatatatatcgttttgggaaggggtgagggtggtacgaaaattttctgaccacgccgataactttctgtaaactaatatcataataatatttttatcgactattattgtttctaaaaaaatagtttttctcaattctgttacattgaagttaatactagatagttaaattcaaaactatgaaattttccgactgttttcatagaaataataaaataatgatattgtttccgaccatttttatcccagtttggatattcttacgatctttgagatatagttctaatcacgcatttataccttttcataattaggtaactacaagattgcctcattcagttttacgcggagctatataatgcatgtggagttagacttaatatacaactctaattttttatattcataccattatatgtaggggtatatttgattttatataccacacttagcttctatttttctattaggtctggatttgcttaaattttatatacaactcacagcttctatttctatttatttaattatgttttgtatacaattatatcaatcaatatgtatcattgtagtttggacttaccataatttaattcttaagatcttttttttctttttatttgattaatgtgataatttctagccttcagaattaatgcggtgcttactttcaaagctatttttaataatatactactttcgtttctcatattatatgtcacttctatagaaaaatatattagcatttccaatatgaaacaaatatattatcaaaatatattcaatgttatatttaatgaaactaattcgatctataacaacgtttgattagaaaaaattaaagtaagttataatatgaatcggaggaagtaatagatagatagtgttacgaaacttatctcccgaaaaaatcggatttgtagtgaccgtgaggtcggcgccgtgatcatgatggtcatagtaccctcctgcctcctccttttattcttcactatccttagggatgaagtaggcttatacaaaatatataaatatacatgtatgtattcttatagcactctattctatcatgggtataaatacagtagaggggttgagggaaaagttaacctgtaacagagagaagacagcaataaaagtttatagcccctccacttttgtgttccgtgtattcgtgtgtgtgtttgtgttctattgttgacaacgtgaacaatgtagatagatacggtaatatcatggtattggaaaaggtgctttttaccacaagaaatccataccttcggttattgtatatttaatccaaatatttctatcaaagtagcagctttcaagacaacaacatgcaactgtacccgacctcctcattgcaacgtgttacacggtgatattgttccggtgtggtcgctgtcgcgccgagatcccgcagtactacctttgtcccaaaaataagtgcagccatgagaatccgtgtctaacgtttgaccatccgtcttatttaaaaaatttatgagaaaattaaaataaattagtcacatacaaagtactatttatattttatcatctaataacaataaaaatattaatcataaaaaaaattacaaataagatgaacggttaaacgtgacacatgaacagtgcaaaactgcacttattttgggacggagggaatacgagtgtactacagaccaggttcgacatttgggactgaaattaatttgggagatttcggtcatttctaaccccttcaatacgatattatttcggccaaaacttctagtatttttttaattttggtaatatttgttcaaatttaactaaattttattccaaagttcgaatatcggcaccgctcgatacaaacacacggtaaacgaaaagttgaaccctgcgagagactggtcggtttgcactgcggcaccgcccctccagtcagtctcgcgccttcgagttatgctaaggacgcggtgtcacgttcctaaatagcgggaaatgtatatcttcgtaaaatttttaaatgcatatatgcaagatcgaggataacaatgtatattttaaaatttaattgtctattacattgctcttgatcgtttcagtcggctgtgggttccatagtttagctaaatatggataatacaccgtacgacataaaaaataatttgtgagtaatatatgtatatatatatatatatatatatatatatatatatatgtatatgtatatatatatacatatatgtgtgtgttctcttacgacttaaatatcaatactggaaaataaactttgataaaaaaattaaaatcaattttaaatttaaattttggaagcaagtaatgctgtatacaggaaacaatgagacgtctcctgctgcctacagctataacagtcagtttgttccactcacgcaaagtgaggtactgaggtgaggtgatctcgccatctcgctagctacctccgtcgatctctgaaaaatttggagagagaaagacctattagtgttactctggtcaagagaacacagaattttgcattggaaaagaaaagagagaaatataaaagagggtatgtttagttcacactaaaattaaaagtttggttaaaatttgaaccgatcaaagcagtagactgtacgcatgcattgactcaaaaaacatgcgaaggttcacggtgctcatgaatgaccggcaagcgtgttgccacattgaacaattcaagtcaactagtcaagcatgttttggcggaagttatgtcatttctgcaagcacgcatgtaaattttgctagaatttcataggaaacaaaagctctgcataggtgggattgaccagaatttttaagctccaaattaacatgtctgtagagtgtagaaatataatactactatctccgttttttaatacatgacgccgttgatttttttataaacgtttgaccactcgtcttatgtaaattttttgtgcaaatataaaatattgtaagtcatacttaaaaacatttaataaatcagatcataataaaaaaaataatgattatataaatttttttaataaaataaatgatcaaatatatcttaaaaaatcagcgacgctatatattaaaaacaaagggaatatcatttataaagtaagtgtatacatgttcgctcctcttgtagtacgtactccctctctttctccgttatctagatttatccattaatcaataaatatatatattttgtatatatgtctagatttattaatatttatataaatttaggtaatgctagaaagtattacatcgtgtaacggaggaagcagtgattattgacattgcttctccatctttgcaatcttggtaagatgtaacggtctgaacggatctaatgtactaccatgcatagatcacgaatgcgtcgaatgtctcatgcgtgacaaaattttccggccattttaactaccgccgatgaatttttcctaggagacctgatcaagtccacggacaccatgctcgcctcgccggggagtaggtagctcggttgggcattgagggatttgagtcaaacagtaaattgaaaagaaagtttaacttcaaaccgaaagtaattaatcacacgaaaggaaaccggttttgcagtaaccggatgtacaattgattgtacacagagcaacatgaattcctgtttaatttcttacacttttcacaatgcaaagcaaggtgctgcaaagaaggttccgtttcattaaaattctgaatgagtacgccgttcgtgagtaactgccagttttttttttttttgagttgtcaagctttgaccaatggtatcaatttaaatatgcaacaataaaacagtgtcattagatagcgatcaaatatacctttttccaatatcttttgcagaacaacgtcggtttcttatgttgcttggctctgttctttttagattatcgtaacagattatttactctacgcttcaaaaaaattcattttctaaagaaactttcttctactatattatttagattatcgttttaagctgttttataaatctattttctaaacatttgatttatttatgtaactaagtagataatctatcataatatttcgttgaataatccaaaaggaacagagttagtaagtcgaagccgggatggcatgaatataatacaagaaattaagaaaaaggtatggcgtcaagtttcagcagctagcgtataatcgatgaacggaggtagcatgcatcctagtagcacatctgttcgatatcttgatgagaagacgagatggagaagagaactcggctacgttgtccattcatttcacggcctgcccatcattagtccatgcccgtgtcacaccgagacagagaagacagggtttcacagttgcgaaaaagcagaacatccatgatcgatccagattcaaaggcacctggttcctcaaaaaaagattcaaaggcaccttgtcccctctggctaaatttttagtgtcatcaaggagaatttgctggttgtgcttacaataggttcactgagcgacgaaagccggttttcgtgttttttcgatgcggctcgaaattaattttcggttagaatttgaaatgcttttggaatctaaatgccaaacagtaattttaatctaaatttaatcagaatttattgaaaactgtgataccgacatggctcgaaatttaatggtcaattggtatggtaaaccctactaccttacgtataaagctctggatcataacttctctaaataaaaattctttttatctaaatatataatgttattgtctttattctgttaaacctatttaggtgtatttttgtctagagatagcagactttctatcctaacatcaaaatacacagcgatcaatgttacacactaaatatacacaacaaagtaaaacaatatcatatattaaaatacaaaggcaatactttataaaataacatctcacataagcggatctaacacgagttaagtagagaacctcatccggcaaaaaccatgaacgaacagaacaatgcttaaaggagtcaattcaattaagagaaaaaaaactcaatttatcatgttcacaataggccatggaaaatgacgtgcaatatcaaaagattttatagtcggccgccgtgccatccacaattcctcaggttgaactgataatcatccaaaggttccccatccttctcactaatctgctttcctcctgccttgggtttcacgtcgccgttgccgccggtctctcccatccgacaaatagattgttaattactcttaccacttgctcaaatcaaaagcccaacctgtcaagctcttacttaaatcaaaattaacccacgatgctgtcccaaactacctaagagtttcagatgtactccaactgataaatattatcgaaaattctaaaaataaataaacacgttactttcattagtattatacgttcatgtaaaattttattttcaaacaaaattgctgtagtagagaaagaagagtatcagtggtattactattagagcctgtttaattcccaattaaaaatttttacgctgtcacatcgaatgtttgtatatatatagagtattaaatgtagacaaaaaatatataaaattacatagttcgccatgaaattgcgagacgaatcttttaagcctaattgcgccatgatttaacaatatgatgctacagtaaatatttgctaatgacagattaattaggcttaataaattcatctcgcatattcctggcgggatctgtaatttgttttgttattaggctacatttaatacttttaaatatgtgtccgcatatccgatgtgacatgtaggggcaaatttttttctaactaaatagacccttagttgatttacaaattccacgtgcaccgaagtgggcgtagctcaaaagttgtgtggtagaatcaatccactcaggttcaaatacatactcgatatgagtattcacatttacagttatttattctttcagtgatagatagcgtatccatggacaacgagacgactcatagggggttggatgtatgtgttttttttatatttatgtatgtttattcatttagtggtagacatatgtagtcgatagtgagacgactcatatgggtcgaatgcacatatgtgttcatagagatgagtgatacgacttatagagctgtttaatttttcagtggtagacaacatatatatatacaggtaataaggcaattcatagagatcggatgtgtatgtatttataggggtaagtgagaagactcatggatatcgatctgcgggtgtattcataggggtgagcgaccgcacgtttgagggtgtgtacagtgtactgcgttgtaaaagaaaaatccacgtgcacagttaacagctcaattaattaatcgcccacaccgaagcgcgcaccacgaaaggcagcgccagcgccagcgaggctgacctgacccggacggacggaccctgccgtgtggggcccggatcccagcgcggaacaccataatttagcagcagcgccagcgtcccgagccttggctccacccggtatcccaacccgagggaattgcggaatccaacaccaccaaatcccccaaattaactccacgccaaggaaacaaaacgcccccccaattccagacgccaacgcgaggtcgacgaaggccacgtctccgactccggctcgatttccaccccccccaaatcctcctccggcgagcggccggccgcgagacaccccggactctcccgcgcggcgattcttcggtaccccgatcggaggaggaggcggcggggagggaggaggaggatgagcttccaggacctggaggcggggaacgcccgcgggctgccgcggaggggcggtggcggcagggcgggcgccgcggccgccggggcgggggcgtcgcaggccgtggcgtcgggggtgttccagatcaacacggcggtgtcgacgttccagcggctggtcaacacgctcggcacgcccaaggacacccccgacctccgcgagaggatgtgaggctccccccgcgccatactctctacctaccccacgtctgtttggttttggtttgatttggagcgggggtcgggggatcgattttggttcgatttggagcgggggattgggggattttgcgatccggggctccgattttggatgcgcgtgatgaattttgggggggaattgtgcggctccgctgcatgatttgcgatctcgattaggttatatgtttatgcggtcgattcgcgtgatgaacctatgtctctcatattatgtgttgcttagggatcgcttctccccttctcttcgtgatatctctcttattacgtgttgcttaggattgcttctcccttctcttcgtgataattatgtattagtgataattagggattcaatttgcgagccctgcctgtagtttatctactagcaactcatgtttgggtgatagccgctgaacttaggtagaattgatgaatcatgccattcctggtatatgaatagatccgatggcctcgaataagatgttttctccattcctttctactgaaattgattcaatttatgccatgtatggcctggcatgctgtcttatagtgtagtaacttgtattatgccttaaccctttttctgtactttagactagttatttttttggtttgatgggtcgatttactttctgttggtgttgcttgcagacacaagacacgtcaacacataacacaactggtgaaggacacatcggagaagcttaaacaagctagcgaggctgatcatcgtgtcgaagtcagcgtaagtattctcttgcatctttgtccaagttgcttttttctcaaaacagaattggaactgtttctatcttgtatgtttgaaaccagaattatttcagtactcttcaccttttgcatcaaaatgaaatggaattgcaacatgtgatgctactttttgaaccagaaaaccttcaattttgacattttccttcaaagtacagaagagtgtaataatgcatattggtttggaaactgaacctacccagtccttatattctgactggaaacatcacttctaatttgggcattttttatctgtatcagtcttagttttgcctgactactgtgaacagtgatttgcctcagcacataaaacaaattgttttcttaaatactcaatatgctccagtcatgatattttcaagtgtgttgccatgccactggagaaataatctacaagcagattttagaatcatgtagagatcaaatgtagcatttgcatttcttatatgagctgctttatgtagtattgattgcctatgaatctatgatcattactattttaaggaacatttctatgttccatttttgctgatgtattacacaatgtgtgttgatgacctcgtttggaactacaggccagcaaaaagattgctgatgcgaagctagcaaaggatttccaagcagttctgaaagaatttcagaaagctcaacggttagcggtagaaagagaagctgcttatgcacccttcatttctcaagcgggcttgccacaaaggtagtttgctagtcagctggtgtacttctttctgtaaatacttgcttatttttcttcctggcatcttatgtttttgaacaaaagtgcacttactacaataatataattcatggcatattgtttatcattttcttggtagtgtactaatgctacagcatcctgttacattttacttactctgcagaataattttgttgcatactctctcttgaacaaataaattattctacgtcaagttttaaaaaaatttcatgaaaaaaatattttcagtttgactggacttaacactggattatgttttctgaggtaaatggaataataataacactggattagtgcttttaatctgccaagtgcttgatgaccctaatagttaatgccctggtttattccaacctaatacaataccttctggtgcgcatttacaggatgagcattcatatttgatcctatccaaatagttcgtattgctgttttgatctactgtagcgtataagtttctctgcctgttttacccttaaatatctagcgttttgttcatggtccactttctcagcccccaggccctagctttcaatatcataaattcattttctgactaaacttgcgatgaagtttgtcttattcatagaactcagaataataaaaccactttcaagtgtagcctgtcttcttgggtcttccaagtaaaacagcaaaacattattttcttaaaattatctccattcaatggtactttagatcattgcaaaattttgtacctcacattcattatatgttaattttctgtaataataataacaacatatttttgaggctggtctatgataatatattgtcaaagtttttccagtatgttgtcaacatatgagtaatctaggatggcttgttctttgcagctataactcgagcgaggtgaacaatggtgctgataagttggctgagcaacgcacggcgcttctagaatcaagaaggtgaattgatagtactatttggttatgctttggactatttgttttcgaacatttctataaagtattcacttgttttgaaatgaatgaacaaattcactcctttgcaaatgtgtgaacatgataacctcaatttttttctttactgtaggcaagaattagtcttcttggataatgagatcgtgttcaatgaggccgtcattgaggagagggatcagggaatacaagaaattcagcaccaaattactgaagtaaatgaaatcttcaaagatcttgctgttctagtccacgatcaaggacaaatgattggtatgtggtaccgttggggatgatagatgggattatgtgctatttgatacgttgaagcacgaggctgctcatatatctggtatgttatatctgattgtgtatctcctcctatactgcagatgacattgacacccatatcgagaatgctgttatagcgactacacaagcaaaaggccaactctctaaggctgctaaaactcagaagtcgaactcttcgctggtacttttagactcctttagcactcattaatatatttcactggcactcacttcaacatgtgaaacattgttcgattctcattttatgttgcagatatgcttgttgctggttatattcggggtggtcctgctcatagtgataatcgtcctcgcagcctaggcagcagcctggaagaacatgggactcctagatctggttgagcttagagcgaagtattccttcctgatttaattttgctgtgaagtcgggaatgtatcctgatctcctgcctggaggagggggttgcgttctggtcttgtgccatggtggtgtatgtgatgatgaatggtgtgtctggaatgcatggtttatatataagtaattaagtataatcgcttggtgtcactctagtgcctcctgccttgctcgctcgcccctgtttatatcttgtgatgtatcgttgagtgagtgttgtaagaacgaggagtttggtctttgcattataatagttgcttaagttggtcagtaaccgtcgcaatttgttgaaacatttcgtttttctctcccttctctcctgtcctcgttctactgttagtatcttgttttcgcgcataaaactgctcctgtcctcgttctactgttagtatcttgttttagtgcataaaactgagttgtggatgttcactgttcagtatatgtaattacttcctccgtcccaaaagcatctaacctagttagggatgagacatattcgttagggatgagacatattctagtatgatgaatatatgttggggatgagacatattctagtatgacgaatatagatatatgtttatctatatttatcgtattagaatatgcttcatgtttcatcctctaagatttctgttttttttttggacgaagcgaatatgtatttgtagccacgtccaggggatccagagccgtatgtgtaagttacagatttgcgcttcgccactttggctgtggttagttcagcgtaaagtttggattttggttgaaattagagatgatgtgactgaaaaattgtgtgtgtatgacaggttgatgcgatgaaaaatgactgaagtttggatccaaactttgatctaaacacagcctttaccatgctatgaccaagagctgtgacgcgcttggaccctgtgcaagtcaaggtcagctcaactctggttttgtctcagttttcttgtcttgatatgaaaatggaacagaattagagtgagcatcttcagaaatccgatcatctttttcacattcgtacatcttgataatgtacgtgtaactctgaacttctctttcagatgagtttttgtttaagctgtgtttcttttttttttgttgaagttccaacacatctttctcgttttccaaactattaaacggtgtatttttttaaacaaaattatacgaaagttgctttaaaaaatcatattaatcattttttaaaaagctaatacttaattaattatgtgctaatgatcattccgttttacgtgcacgatatattagttccgtcagcaaggaacgaaagcaacctacgagtgtactccctttataaaaaaaaaaaagctaacctaaagagatctctctcctactagtacaatgaaaatgaatctggacaactatgaggggttagtttttttttttttggcataggggagtatttgaaggggggagaaaaaaagaaatttgagaaatatgtaaaacgatttaaaccattagcgtataattaattaagtattaattattttatattttttaaaaaaataaatattatgattttttaaagggagaatagctaatatggtccttaaagtttcgctcctgggtcattttagtccttaatatttcatattgtccaaacaagtcctttaaatttatcatgtggactgatatagtccttggtcccaccaaaatcaccacatggacattgtcggtgatatgggaccgggagtatcatgaccagaggcttgaggcagacgcaatcgcccacatggcctggcaccttcggggacgtcgggcccgagggtgaggtgtccgccctcctcctgatttcccccgagggggggtcgggttgcgcttgccccggccccgagggccgaggcaccccgaccccttaaggaagtctgcgccacatatatgggataagtgagcacagctgtgctcacctaacagcatttattgcagtctggtcaagcgtgtcacgctgcatgcaacgcagtacagcgcgttcctttatccggtctgtgaccagtcacagaccggtcagatcacgggttaggtggcgactggcggtctgacgcacaccttgccccatcccgtcaagacgaaagcctctaggcactcgtctcaagccggagctagcgtgttatctcttagagatggcacgttagccctggtcagatttataccaggcttcatcctaaccattacaggcaaggtgttacacgaagaagggcaaacatgcacgttgttaagctgacgcgtggtggacaagaatgaccggtctggcactggtcgcgtcatcgacagacagccacggtcccgcgtcatctctgtcttcgggggaggtgggggtaggtgtgggctgtcccatcagaagggctcccggatggaaaccgtaccgatctccgcccattaaagagaaaaagaacagtccagtttggaaagagaaaggtgcatgtggtatccccttgagatataaaaggaggaccttgcccatttagtggggggactttttcccttttggaaggcagaggggaaaggaagtgaatactttgtagctccctcatacacagatccactaaaaacacaggagtagggtattacgcttcccagcggcccgaacctgtatacatcgtccgtgtctcgcgtttcttccgggcacgcgatcttcccacatacagagagagcttgagatctcaccctaagcccccggccgaactggcaaaggggggcctgcgcggtctcccggtgaggagccacgagctccgtcagacatgccatgtcacattcctatgcaaaatctatatgatttgtccaatttacccttacgcacaggaaaataaaaaacaaaaggaaaaagttaaaaaaaatacatggtatatgtaagagcaaaaatatacctctaaagggtgaaaaaaagagtatttttttcctatggctatgtctaattcacttttatatttatttttctatgatatacataaggttaaattagacaattcatcatagattttgcatgaatgatgacatggcatatccatatgatgattttggtggacctaaggagtattctaggccttatgacaaagtttaaggatttctttagactatttaaaaggttaggactaaactgattctataaagaaattttagggactaaagtagctgttctccttttttaaactaattctcttaaaagaattttataaaaaaacacatcgtttagcataagcgtcagtgcgggaaaacagaaaacagatatattttttcctctctcagtctggtgcaacaaacgcagccgtacgagtgtgttcgggaggaggtagagtggaaaacggaacttgcattcggtatgatttaaaatactttaaaaatggattaatatgataagcagaacccagcatgtagtagactccacgtggacttggcgttgacgaggagagactgaatagttcagtcttcgcccgatcggaccagagctccaggtcctttttacctgaacgcgcgatatccacggagctcaaggtcgtcggacagaagacttgagtggactagcaactccgtgctgtgcttcccatctccttcagagaaattacctcccaaaccgattggcagcgatcaagaaagtacgtgatttaactatgaaatttctcctctatatatggcggtgcgtgtgtttgtgtgcatatgcactcagcatgtttgaaaacaagaacacaagataggagtagaaaagaagatcttagtagacaagaagtattggcttcgtctaaattgctgcaaaaattttactgttctttctccgatctaattaagctttgcagctggacattgagttaggggccggcgtggtgaggtaagatggacgccggagcagttgaggacggccgcgccggccacctggcggaggtcggcggggagctgggcgacaaccaccggcgggagaacggcagtgtcgccgccggcggcggcgggcggcggccgcagtcacgcgccggggttcggggcgaacaagaacgacacgctgctggtggtggcgacgctgatcacggcgctgacgtaccagctggggacgaacatcccgggagggtactggcaggacgacggcgccggcgacccgatcatgcgggacaagcaccggcggcggtactggctgttcatggcggcgagctgggccgggttcgggagctcgatgctgctcacgctggcgctgctcaccggcgtgccgccgcggtcgcgcgccgtgcagtggccgttcctggtgtcctactccagcctcgtgctcacgttcgtcacgtcgcagtcggggacgtcgctcgccatggacgtgctgatctgggccgccgtcatggccgtgctcgccgtcggcatcaagtaccgacgcctcgacaggctccgcttcttgttctgcccacctgctccgtgaccaaacgttgatctacaaattaatattggcatgattagttagctcttttctgttctcgttgggctagccgagcaccctgcgtggtggcagcggtagcgcgtccgagtccgagtccgagtcgcgcgctacgacggcacacgcgggtcgcggagcgctcatggcgcgcatatggaatccgggtcgtgtgcactctgagcgggatgcgtgggatggcgcgtgtcgtcaaccgcggagtgtcgtggaacgctgcatgaccatctcacggccaccgccatcgcagtgacgaggccggcatagaggggaaggtgggttggggaaagtcccacacactctcatagcggattggcggtcgacggtaggagctgacttggctctaatactacttgttggctcttgtctatgaatcacacacgcgaacgtgtggttgaaacatcaggtgtttgtcccaaggttcgtgtgtgttatttgtatcgagagccaacaaatcatatcagagccatatcggctcctaccacgaattgtctcgtgtgtagatcaaagaccctattatggaccccgcaaaaaaaaaagatcccattatgggccccaagggtgctccacctccctacatcagccttggtcgtgcaacgcttggtcaaggaggttagagggtcaacttcgtacccaatgctcacgaaaacggcctataccgatggagtgctgatgacttgctcacgaggtttttgttgtaaaatttagaaaataaattagaagccaaaagctgagaaatttagctttgttatattctcatatcgaagctgattgccaatcgactgctttttagaattttaaagctcctcaaatatgttatatatattggccaccaaatagggtatgattttacaagaccaagttagatatgaccatgacttgtcatgagctgatcaaaattctctctacgagtacctcaagagtacaggaacttagagatacgaataccctgtaaggtcaagacaccaaggccctgtttagttcacatcaaactttctccaaactcccaacttttcatcacctcacatcacatccaaaactttcctactcacataaactcctaacttttttccaaactaccaactttccccaaacttctcccaaatttcaggaactaaacacaactcaagaaatcaccgaagtaccgaactatcatgcataagaagccatcaacaacctcaagccgaagaccatatcattgaccacatcttgccactgcttacctcgtcgagttagtcgactaggtctagataggggtgtgatcggtcaatttcaaattggataatggctaaactatatcatacacgatataagttgagacggattggaaaatgaatcgaatgtgtgtcaagtgagaatacaaatatgatgtgtggagaatatgtgaactagaatcagttagtaatctattttggtccgaatcgaatacctaagtagtttcatttcaagttttcaactatacaataataacaatgtaagcacttacatgagataatttagaatatttgatactaaattgatatattttgctaactattaatggtattgcgacaaaaaaaggtaactaattatattctcaaattcaaccggatgtagacttagacggacaaaaatgttatttggatgtcaaaatcaaaaccattatcgctcccatttatttagaccgttcaaacatgaattcgagtggatgagattttattattcagatcagatgtgaaaattattatcattccatttatttccattatgtaattatcaggttcattaatcacataaattgagataataaatatctaacttgcactcatatatcttactctatagttcaacaaggtgtttcactcatcactcattctttcattactcatggaacggtccagatcatctctgtgtaaaatccaacgctcaggatcgtctccacctctccaccgcgccatcctctccgccccctttctctcgctctcacgcgtccccgcccctccccaaccgcgcgccgctccccaaccctaatctctccctctcacgcggcaccaccgccgtcgttgccgccctcgactgccgcagctccgccgtcgtcgcatccgtcgtctcgccgccaccgatccccgcgccaccaccgtcgccgccgccctcgactgccgccactccgccgtcacccatcgtcgcatccgtcgtcgccgccgccctcgactgccgccgctccgccgtcgtcgcatccgtcgtcgccgccaccctcgactgccgccgctccgccttcgtcgcatccgtcgtctcgccgccaccgatccccgccgccggctcgccctcaaccaatccccatcaccgtcgtcgcatccgtcgtcgtccaggatttacgtcaccgttccgtcaccgcacccacacgatgatccccggcgacggaacgggtcatggtggccttggaggatactcgggcccgacgagctctcggcgtctcaggtaatgtcgccgaagacaagaactccggtcaagctcctcggccgtgaggacgcaagcgtgtgagtgtatcccttttccctcaaatttaattatgtactctgttacttagttctataattcatctgctcagttagtgtcccatcacaatcgcttggtcaggattgaatgttctgtggattggattgggagttgtttgctcaaggagcaattagggaatattttagttggttgcggctgcaaataccatcagaacaacaatggagtatttaacaagagccaacagccttttgtttcagatgaattccctctgaagtcacccgtcaattgactaatgttagacaatctaccatctagaggagatcattcctgaacccaatatggtgataagccgcctctgttgatgtgttacactcattgttacttgttctgaggtgtacaccttgcttgctatattggaagaatgaatttaattcacatggatataatattttgcaatttttgtatatgaaattatatgcatgttcttgtgatgtgagaaggttaaattcctttgtgggatgcccatttaatttctggttgctaattttactgaagaatgagagtaggttatgatgtcttgggttttgataagtagggtgtaaatttttatagtacaataaacatgcgtgctggtcattctgttatgtgggattgaaacaagtgatgctggcaattcaggtgcagaccagcttttggttctgtaaattattttctcaatttaaatagatcatgtattgtgatgatgcgaatataatattatgatgttatcatgtgttcaacagagcttaaaaaatactcacaaactggattctcgtagttatacagtttaaataagttataagcacgatttgggtttgatgtcttccatttgatttttagcgctcctccctcttgctccgatctggccttagtgatgccgccctgttttcgcggttgatcccggcaccagccccttcctctggccgcgtgcgagttcgagattccaagtcccggtggtcggatttctcaaccccggcactggcctcgcacaggctgcgatccgctcgccaacaaggtaagtcattattgggatgtttatatctgaaaatttagataatttcttttgaacttcattgcttggtcaacaacataacccaggaaaccaattaaattgatagacatgttgtgtgctctcttaagagatcaacatccaaattgacatccaagttaaaagaagaatttaattatctaaatcatgatgccaatattgagagcttcttttactttccgttgtatacattttctgtgatgtgtaccgaaggttatatacataatgagattttacttcaatggtggaattgtgctctattgaaccacatggaaagttctgatttgtgcagtgataatttttccctttaaaaagtcaaatttggtttacatttttattcatgacacctgaatatgtagaatgccatgcattagtaatgtgcaagcactttcaatgtattgtctaaactctaaaggaacaacttaccagtttattagtgaatttatgaaaaaaaaatcagatgtttaatgtctgaataaattcagattctcttctctgcttcatgccttcatcaggatgaggtagttagtgttgtactgtagttgacgaatcgatttgttcgcatcgtgataaggcgcagaaggtaaggcggaaattgccttggtttatcctctccccctaaatttcctctgctgcgattggttgattggttaatgaaaaacccaatacttgcaagcagattctgattagattcttaattattgggattttctagagttagtttaaggaaaagtgagttaattatcgacgatgaaatatacacttccatgattagaattatatatcgtatagacaaatatgtgtatgtattaaaaatatctgacaaattggactgtatgattataatgcctttcaaccattgctttgtgcaatgctcattatatctcccggaaattaatcgatttctgcttttgtaccatgtgcaatgtttacttttaaactgctcaggttcattctatcttattttctggtgcttctgaagcgatgtatatttcttcatttttaaactgctcaggttcatgaatgccaccatcactgaatgcacatctggtcctcccttattttcgttcgtatgtagtatgtacgtaagaactaacaagtttattcattcaaagaaaaactaacaagtttatgttaagcttcctttttaataatattttacattactgatatttagtgcagtgaaaaatgctgcaaatctctgatatttagtgcagtgcaaaaatgatacatagcttgattggatgctctttctcattatggccaactgcttgatggaattttttccatgtgaaaacaaatgtttactctgtttcaggcttgtgtagagaagaaaaggtggaattgtggaaggtaatcgcggggagttttggttcattttttgaagatttctctaattggtacgtactaattaaccaattggagttttggtctcgttactcactgtaaaaacatgatggtaaaaaaacagtttaatcctattggtactcttttatcccattgaacattttgtcgttgtgtcattgactactatcaaaaaggaaaaacagtggatgactctttcaggaaatataggatagccccattgatggcacattttgaaccgttcatgatccctgatttattctcttgaccatattctgcactgctatgcttgctaagtaatacaaatatatttatatccctgtagcatgtcagttactctataagacaattttttttacataactaattaacatttttactaaactcttttattttgacaatcactctaagacgtatgcaattgcgtcttacgaaagcaagtgaccctgagagcactgatctttgtaaagatgcacacagcttactgcaggagaggataacaaaatagaagtctataaaaatctatagaagggatcaaatatgcttgactgaatgatagagatggaaaaatgaagaagtgatgactgttgtttcacaatgtattcatttcatctatcctataattgtagtggtgtgtcaatgtgtgatacttctagattttcccagctccattttgccagctccgtgtgtgttaatgattcagaagtcgtggaattgcttggaacatgtaatttattctcaaccattttttgtggaagtgtggatgtgcattgtctaatatattggtattgaagtgattaaatatgattattgatcgttttgaattaatattttagataatataatatcactgtactttgccttgatatctgacctagatcaaaataaagctcaattgggtggattctaggaaacatatttttactacttcctccatttcacattatgtgtctagattcattaacatctatatgaatgtgggcaatgctagaaagttctataatatgaaacggaggaaataacgtgtaattcgttaacaaaaatgtattataacaccgtagagttagcacgggcagattactagtctacattagtgtcatatatgtactttttatactttgtatatatatcctagtgggccgtaggggtatttccttgaatgggggcatgaacctatataaaatcttctcggaaaatatagggattgatacctttctagtttgtacaattaatcacatctaggtatatgtaaaacatttattccgctactaatcattgacaaaaatctttaaaaaatcagaaaatctagagaacggagtcccgtagacacgggatactactagtaaatatccagcaccactactcacaccacctatttaatcttatcctctccttaatctcttccccttcccctccacacactctttctctctctctaccacccacatgagcacggaggcaatgacggcagctggtcatgcagggtggcgcgtcgggcgtcgaggaagttgccgtcttgatcgccgccgttgctgttggtggaggtgtaaactgagtagaggaggagatcacgaagttgtttgtggggtaggtgtccgagcacatgacggaggtggagctgctcaccacgttccaagatgcagccatcgtcaacgaggtcactaccatcaaggacaatgcccttttgtggtgtagatatgtagaccaagatctgggttcatgaccctcaagctcctgccttggcttgctttggggtttgatttaggtttttctacatgttctatgggtgtttctacag

SEQ ID NO: 1481 - DNA, 6018 bp, Oryza sativa
cattttctaggcggttggtaaatcctttatgagtttatttactcggattttacaccacatatgccatatatttccaggtatggtgaaaccatgtgtcttctagggacttaagcacatgtgttaaagcagtgtgcgcatggcgtatgcccaatactttggaaatttctttattcacaatatacaagcttctttatagctattttgctatatcactcatcatattttacaaagcagttggtatatcactcggatcatgttatttggaggcttcacaccgcatatgctatatattgatatcaagtcacttggttgattacgattatcaaaaccactcggttgggtggattatttattccttgactatatgcctggtttgctcaattaaccacattgtcgggggctacacctattaggtgcatctagtcggtgcacctgactttattttccagccctccacagtcttcagatttggtaaaaggtctcgggagaccatgacaaagatgattgaagcactctgctttggagtgatctggttcgagagaagactatcttttcgactgcaaggtctcaggggctatctgggatattatgggtaccccatacccatatggcatggttatccgactagtcataggggataacttatatctatggaatatgtaataaatcatgactcgggtattacgtttccttatatattacggaacagcctaaagtcctggtttgataatattgtaaagtagatttaggaaaccgataccgtattggttaaggtttctatcttgtaatcctgccccccaccctatataaggtgggcaggaggccctctagggggcatgagacaacctgatcgtcagatcaatacacactcggcggattcaaatccccaaacaggagtagggtattacctctcattgagagggcctgaacctgtctaaatcctttgtctccacatccatccacttttaggtctcgtgcgctaccccgttttattattgccgaattcatgtttcgacatcaggtgactgaaaatattaaaaacaccggtcgaatatactcaccatcgaaccatgcacaagattcatgctcttgtcgccctccatagttctggcgtctctccgactacacaccgcagtgaagcagagatcacctcaaccatgagggaggagggtgttggactggtgatcgtagcaagcttgatgatagaagccgctagagaatggggagatgcgggatagggagaatcgtgctagagtggaaaatgagggcaggacaagagatagggaggcgggaaggaggagacgaaacatatggcaacggtgtgcattagcatggtgggaagagaggagggaagcagatcgggcatagggaagtgaggaggttagaaaggggtagcgatgaattaggcaaagaggtacaaagatgggagagaggccggcggtggcggtgacggatcaagcaaagggagtggccaactgataaaggagggattaggttaggtttatagtatgggtgcacccttagtttataagagtttcccaaaattttaaagaatttctaaccattcaaatttcaaaaagtaatttttttaaacaaaatcaaatggctagatagacaatccactcataattgatgcaatcggggccacagaccacgtgtttccatcagccgagagtaatactataggtgcggatctcctagagttggtaacttcacaatgtggatttgagccaatatcaaccattgtcttttatctacggtctagatataatcaaacatcactatctttgctatatctgttttcatcccatcaatagctccatggaaaaagttatcctctactagtgggggtcaacaatgacctagatgaccaatcatcatagccgtcggcgtagcacacagagtcacagacaacttgccaagaaaaaaaaacactggccaagcttgaagcatgaaggaacgtatcgggtagcgcatcactgcttttcttatttgaagcctccatcatcatttgaattcatattcattatttagaaattaggcacaaccgattgatcgattagctagtgaccactgggtagcagcaaatactctcactttgcctcttacttctgccttctactgaattgttggcatgtggaaacactagttcgcaaacactcgcgagatgtccatctcacaaacgcgtcccatccacataacgacaagccccaacttaagattagcgttagaactttggtggtggagtgagtggaactagggaggggaaagtgggggatcagacttagagggattggctaggggcagcggactgacaatgggtggtgaacaagggtggagggcgaggcggcgacgacgccacgaggtcggtagcaggcggtgggccgacgttggtggcgggggcatagctgtcacaccctaaaaatcctaaatatataaattgttgtttaaatggaattattagaatttatttttaaaagtctagaagagaagatctaattttaattaataaattccaatataaaatggggtcagataaaatttcattaaatactttgcttaattctataattcctagatttttctgggatttatttgagctaaggaagtatttttaataaatggaattgcatttcatgaataatttaaattaaaaaaggtttttaaaagtctcttttggctttgggccgaaagtcggcccaaaaccttctctctctctccccggcccaagtcggcctagtccgcagccgcagccgcccgcgcgagctcgctgccgctgacaggtgggtcccgcctgtcggagtcgtcgtcttcctccggccgaaaccctagcgccgcgccgccgccgccgcttcccaaattcggccgcccctttccttctccggtgaaatcaatagaggggaaatgatcttcgggatctcctctaccttttctcttttggaatcatcgtctaaatcgctttggaaattcgtggattcgaggtcgaatcggatcggtctctttcctccgaaccccaatgtttccttcgcgtcgccggtcgccgtgggccttcgccgccgcctccttgcccctataaaaggatccccaagctcgccgctacccgccgccaccctcgcctttgtctctcgtcgtcggaagagccctagcgccgtggatctcgtgccgcagtcgtcgccgccgctccagccgtgcgccgccgccgttccggtcgtcgtcgtcgctcggggaggtcgccatcgtggtcgccaagtcgccgccgtcctcgtccgccccttcgccgtcgctgtagatcgccggagcaccgccgtcgtcgtcaagccgaaggtctccgccgcttcgacctcgtcgccgacgtcgtccgttgcccctccgccgttgctttgatcaccggtgagttcgccgcgatgcccgcatcgtcctagtgccctccgttcgtgccgaagcgccgtcgttcgccggcgagcttgcgcgtccgagccgccgagccgccgccggagatgacgtcaccgctgacgtcatcagggtccgtctgccgtgagccgccgtagacccgatcgatctcggccgtccgttttggatggatcgatctcggccgttcgttcccgtgagccgctgccgtgcgcccggtccaccgcaaaccctagccgctgacgcaataaaccccttttccttttcaaaaataattcattattgcgtcataattcaattaaaatccatataagtgttttaatccgatttaatctttaaaaattcataactaattcatcttagctcggatttagttggttcaagtctctaaatttttctaaaattgagatctacatgttaaaaatatccacatgtactgttcatgcttgtttatgtgctgtttggtgattttgctcttttctgtttagattccgacgtttccggagtgtccgttttcgcaggagaagaatttgaagagttctaaggccagcaagacaagtcacacagatcccaaacaaccctttgagcatgttgatcccatttaaagctattgtttctattcaaatattgcatttattttcgaatgtcattgggtggaattaacctattgtttgttatagcccttttgttcttgattactttattccttgataccttgggtgattataacttgactagttgggctatatatattggttcagctagatattagatgtgattgcttagccatgcttagaaacattagcacactattgggataacttatgattcactagtatttaatgatggcttaatgatagatcacgattgtcaatcgtgattggttaattaattatttgccaactaaaacttgataatggtgggttgtgagcacatggttttgagagtcgtgctcatggcaattaaggaccggttcacgagtttcggttgtgaaacattaaccgtgccaaccacaagccagcgtgggcaacgactttaccttttgtatagcatggttcattgcggagcaccagactgagaagtggtggagataagcccacaggggtcgctggggagtccatgccttgtttataagggggtgattatgaaccaggaaaggtgcgctgtagtggattgtgttgtgcaaggggtattgtcacagctcctttccgaggtaccgtggtggtattgaggcacatagtgacatgatgtggggctgtgtcttgtgggtacagtggtacacctctgatcagagtaaaactattcgaatagccgtgcccgcggttatgggcgggcctaacaatgtctttcgtgattagtctcacacttctcaccataataaaagatgctataactggtaataatttgattagctcctggtttggaatggtatattcctggtttggagatagaactgtgcagccgggatggttgttcagaatggttgggcctatacaacagggtatgttgtatagcgttggattaatattgtttaattattacttaactgttttattaaattctgaaatgtttattaaatgctgtttatgcaaatgaaaccctactatgccatcctttgttatcctgtgcacttgcatatttgctgcgtggcttgctgagtatgtcatatactcaccttgcaatcattcatcagaggaagagttctacaatgatgctgatggtgtggaggattaggtgtagccctggtcaagctgcctgtggagtggagccgtctgcgtcgtttatcttttttccgctgcttagatctttattgattgagaggaactatctacctctgtaatgacattttattcgcttattaattagagtaataattgtactctattatcaatttgttattgtgtgcctcggctgattcctggatgagggttcacacacatgtaagcgtttggaatttcggatagaaattccgggcgtgacaatagcgaggcgatgaggagagcaaggaggctggccaagtggggccgctctggtaagttgcctttcaggactgatgaggtcgaagggcgacacggtagggggttgttgacccccgattttggaaatcggaaatcttctgtgtttatccgtaccaatccctggatcagtagttggtacacacatacatagttggatcacaacatatcacgaatgaatttaggctaaaagagttaaatacttacattagggccaggtaggccaacaactatcagagaacaacagcggaagacaaaataatataagagcccggttaacatgccacaggcagtcgactgggaaacgagacctagaacaagaccgcactccgatcatcttgttggatacacaagcgtaccgacaagggcttctcttcaacactctcctaaaagatatatgaatagcaagggtgagtaccaaccatactcagcaagccaccacaacaacaatgcatatgatagagggtatttcaaggaatggcttcaggttcttttgcataaagctaattttacaattcttttcacaagcctgaaacctagcatagactgatcaaattttagtaccagtgttcacttcaaacaacgacggttctgt

SEQ ID NO: 1482 - DNA, 2011 bp, Oryza sativa
ggcagcagattgacagtgggtgctttttatttggcgggtactccatctaaggccatgtgtagtttctaaaacaaaaatcttcatcgtgtcacattaaatatttggacacatatataaagcatcaaatatataaaaaaccaattctacagtgcatcaagaaattgcaagacgaatcttctaagtctaatcgctccataatttgataatgtagcgctacagtaaacatttgctaatgagggagtaattaggcttaataaattcgtctcgcgggtcagaaaacggacgaaagagaagactaataaaaatcatcttaaatttttataatagataaagattttatacgagttaagtagaaggtacggtgcaataaaatataagtcaatgcacctagatttacacatttttcatccaaaaaaaattgtccaaattcatatggcaaaatttgctagggacatcgtaagaatgtgtatttgctctacggcatcacaaaaatctggtaattagctgctggacatcggcaggattattttattatttttggagaaataggagagagaaacaatcattaaagaccagtttgcccttggctcaaattaatccaatgtgggccccactgtgagcatgtcctcctcatgtcgctgtcataggtgaaccctacgtcggcgccgtcgagcgtgcaccttgctggcctccatgagaagtaggcgccaaaacggccgcaaccgcgcaccctgggcggcacgacagctgcggtggcgtcgatggcgcactcctcgatggcgtcaccggcgttgaacatgtcgatgagcccgacgggcgcgaacggaccacgaagagggaggtgacgctggcgatgcggaagcggcacatcttcccgggcaccacggtgaacaccgacggcgcgcagtccgggtgcgccatgttgcgcgacgccgccaccgtcgctggcaaggacgagcagttcatgaaccggcttgcgcccgttaatgagcagcgactgcggctcgccaacccagaccatgggcacggaggcgagccccgccgcctgctcatacgtgctccggtgccaccagtcgttgagcagcacggtgtgctgggcagcctcaacggcgatcatgcctttgagacccgccgagcgctacatccgtagtgggcgtggtacatgtacgtcccgggacggtcgacgatgaaggtgtaggtgaaggtgtcgccagggaggatggggcactgggtgacgccctgtcacgcccagaaattcccgaatagaattccaagcagaatgtgcattaaaatccccgtccaggaccggccggggtacacaaacgacaatgttgacattcagatccacgtcttacaaacatcataaaagtcttacataaatgcagcgaaaaaaatgaaagacaacaggagctaagccttgactagaactgcagcgggaacaccactccacaggcatcctcgacggcacggacgaagcctactcctcagagaaacctccatctgacacacactcgtactctggggttgggaaaaaaagagcaagactgagtactacccactgtacttagcaagttataccggaataggggtatgatgcagggaattatcaaaggagagctagagtggttcatttgcataaagcgagcatttataaacagaagttggaagatttaaaccgttgtaataattaatcaatattaatcatccactgtccaacgctatgccacgttgcgacaggcccaaccatccacctatactatccaaattctaaagattacactagggtgagactaatcacggtgaatctggttgaccgcccataaccgcgggcacggctattcgaatagttttactctgatcagaggtgtacaactgtacccacaagacacagccccacgacacgtttccgtgcgccgacatgccaccacgacataccggaaagaggccgtgacaggacccttcgcataaccccctctaaccaagcacaccacacctcaggtttcacccccac

SEQ ID NO: 1483 - DNA, 9207 bp, Oryza sativa
ccaccatgtgatttattttaattaaccaacaccaaagcggtggcactaatccaacaataccattagaaccaacagtctaaacattaatagaattttccccattgtgcactagttgaactaagcatggctaagcaatccctagtccaatctctagtcatgttataaccccaagctgacaaagggacatggtacaacaatagcatggctatgacaataggtaaacaccccatagtaacattataaaacaatgcaatatttgaagaaaaacaatagagcatttgcaatataggatcaacatgttcaagtgacaagcatgacttgccttgctctgctgctggaggaacctcggcgactatttcgaagtacaccggagcgtcggaggaaccggaatctagcgacatacaaggcaaacattgcaaacaggctataagactactgaaacagggaacaaaaccatttttaatagattctacacatttttcttgatttactgagacttgaatgggcttaaacggagctcggatgaattagttatgaattttagaagattcactgtgtttattactataacaaaaagtccttaaatcatttattgcgcaataaatcccagagctgacgtaatcaagggggggcgcggcgccggcaagcgggccccaccggtcagcggctcgggagagagggaaaaggggcgccggcaagcgggccccactcggcagcggcgcacgagtggtcggtctaccgtggaccgggaccacgcgggtggtccaccgccggtccacgggatcgacggcccggatcagcccggggccgatcggacggtgcggcggcggcctggctcggctcggcttggcacaaagccggccggccggccatggcaagggtggcggcacgcgcacatccaccggcgacaggaagcggcggcgcgggcggcggtagcggacggcgccccggcggtgacggcgaccgaaggcgacgacgagcgtgggtggcggcggcacacggggaatcggggaaggagaggaaaggggagggagtcctcaccggaggggacgacgacgaccggcgacgaggagcggcggagggaggtcgacaagcggcggacggggaccgggacgacctaaagaacgaaaaggaaaagattagagagggagagaggggccatagaaggcgggaacgccggccgaaggcggcggccatggcgactctcaccgtcgcacaatgggaatggcgctccggcgacgaacctcgacgaaggaggggtggacggggtggatcttggccacgcgaacccgacagcggcaacggcgcggtgcggcggcgagcctagcggcggctagcggcggccggagtgatgggaaaggcggcggcgggtggatgcacggtgcgggagtgatggagagctcgggagagttcggcgaaatggggaaaaagagagagaggatgacggcggagcttaaatagggagagagggggccggacgtggccgggagaggcgggaatcgccggccaacgtggggggagtgggagaggagagagaggcgggattcgaaaatcgaatcccggccgtctcggaagcgcgggcgagcggtagagaggggaaagtgggcgcgggaggcgtgggtgcgagggcaacgtggacggcgtggcctgggaggcacggacgcgaggcgcggcggcggttgcgggcgcggcggcgagcggctggaggttgggggaggacccgacaggtgggccccacctgtcggtgaccccgggagaggagggggcgcgggctgagctagggcgtggcctccggccggcccagcaaggcgcggggagagaggaggggaaatgggccggcggcccactaagggaaaaggagaaagaaaaggaaaaagaaagaaaggaatttccagggatttaaatattgcctgtgctcaattttaattgattaaaattatttctagggctctgaaaattccactaaaaatcctgttagtgaatttcgacatgtagaactcaagaaaaattccacatgtcagattcgattattatttgtattactttcttagggttttctcttgatttgcaccggcattttcttagggtcatttataaattaaattttaggcttgggaggagaacttcagggtgtgacacgctctccgtgccgtccgcccatggcgtgccgatctgccggatgtcttgccagtggatggcgacgttctccgtcggcaacgagttcttgacgttgacgacgatggtgtccccctggacggcgtggatggtggggcccaacgtgtggccgttgatggtgacggccagcttgcggacgtagtccaggacgtgaactggtagctgatgtcccagtcgtcgccgcggccgacgcgacactacacagcgctgcgatggcgaggaagaggctgcaaaggaggcggcggctacaccgcatcatgtcccctcttgctcgcagtcgcagctccattgtttgctttgcttttggttgctagctgctctgcctgtgcgtcgttttgagcagggccgaccctagggggggtcaggctgtgcggccgctcgagtccctcaaaatctaggggcctttatacgtacacatatagtatatatattatgtattgtataattttagttcttgggacatgggcctatattaagttagacagctaaatagcccaacacagaaaatgaattttagtccatcgccaagtttgtttcagcgaagccgaagcgatcttcatcttactcccgtcgcttcgcctcgatcacatcatgcatgctactcacgtcgctcgctgctcctgcgctctcggcgacttcttagcgtctcgcaaacgaaaacggcaagtcggcaaatcgcggctcaccagtagccatgctcgtttgtgtcgatcgtccaccgatcgccttctttgctcgctactgctcattgctcgctgcccctgccacctgctgcctggactacactcctccaattcatcagatttcaaggtcctacactcctccaagtccaattcatcttatctgatgaatttctctatctttttttctcttaataagactatataaataaataaatatatatatatatatatatatatatatatatatatatatatatatatatatatatatatatatattagtttatgtatatataggggactccatataagtttttgccctaggcccccaaaaccccaggaccagctttggttttgagctacacaggtggatttggagccccgcgacaacgggcgaagcggcggcgacgacgggcaaggttgaaggcggcggtgccgccgctgctctcggcggagatggagcggatgaggcgcctgacctcgtcctcccggaaggagcggaaggagagaacgtagtggtggttgggtgtagagagagaaaaagagaaagaatgagagagggagaaaaagataatgaagaaaaaaaaggaaaagaaaaaaatcaaagggtagaaacataattacacagttatttctctcttcaattcttcccgatataataaaataatcacacgggtatccattagctaattactatttttttggtgcctacagcaaaaacgcgttcttgcggtgtcttctaactaattacacgtttttttagatgtcctgtagcaaattttgccaatttatatagattctcccctttctttgttggaataagttcacttaggtccctctatttgtcgtccagtctgattttcgtccctgaaccgcaaaaccgggtacgacatgtcacgcccagaaatttagcccaaaatttccagactattttgtgtattaaatccctgtccaggaccagccagggtacacaaaacgacaagtaataaacagtcccaaacgtaaataaagcgtaaaatacttacagaagaggcacttagtcctcacaccgaaacaaaagcagcagcagcggaaaaaggcgatcctagcggggcttcagctccactccacaggcaaaactcaactggggtctgagccttggtcctctaactccatcttcagctcagaagcactacacttctgaaaagggggaataatagcaaggctgagtacaaccaccgtactcagcaagccacaccaacgatgcagacgtgcaaagggaacacaaggacggtttgtggctatttgcataaaggcggttgtaaaacattttatttagcaaacagtaaaactgttgagtaatttaagtaacattaaaatctccactgatcaacgctacaccacgttgaacaggcccaaccaacccacctgtactacagtgcattgggtcgatttattaggtgtgagactaatcacggtgaatctggtcgatcgcccataaccgcgggcacggctattcgaatagttttactctggccagaggtgcacaactgtacccacaagacacaacccaccgacatgtcaccgcgtcatcatgtgcccatgatgcacacgtcaccatgtcgagtgattgtgacgagacccttcgcataaccctcccctaaccatccacaccacgctaaggtttcacccccacccctcaaaaggcagtgggcggtcccctcttgcgccgcggtgaatccggcagctggacaaccggacaccccggccgacccaactccatcacgcccaccctcgccaccggtgcctaggaaagggtcgagctatacttcagatcaagcagttacccattcccgcttgtggcaagcgctgtaagtcttccagggtttcccgtgaaccggtccttaattgccatgggtgcgactcacaaaaccatgcacccacagcccaccattcagtcgcattttagttggataattacgaccataaaacatggccagatgtctcgagcacgcggctcaacaagatactagaatgtctaatactgcaattatcccatcgactgagctagtggtaattaagcatggctaagcatatagttctagctaggtcacataagtaacacaagctagtcgatttatcacccaaggttgacaaaggacagatatcaagtaaacatggcacaagcgagcagataggtaatacccggatcccatgtaattagcaaaacatgcatatttatttgtaaacggtaaaacatttataaattgggatcaacatgctcaaggggaatgtgtgacttgccttgcttcttcactttgatcttccgaactcttttcctcgcgaccgcggacttccgaaacgacgggaactacacgctggcacgcaaaacgaggaaaaactctaataaaaaccaaggaaacagtacataaaaagtaaacaaacatgtagaactcaattttagatggattttgcaagttgaatggctcaatttggagttcgaatgaattagatatgagttttagaaggttttgagccattttaatgaatttctataattattatcgaattattgcgcaattaataattattttctcaaaggaaaaggactgccgctgacgtcagcaaagggccggcgccgacaggcgggccccacacgtcagcgagtcaaagggggagggcgctggtacacgggcccactcggcagcggctcaagggggggcacggctggcaagcgggccccacggctccggctccacgagccgatgtaccggccaggcccggcatcaagccggccgggcggccatggcaaggcggcggcgcgggcatgcgaccgccagcgacggcgagcgcgcgaagagggcggcggcgcacggggaaaaaaaaaagaagggaaggaaggggagggagacctcaccggaggggcggcaatggccggcggagaaaaacgagggaggcggcgaagaccggcgatgccgaggtgcggacgagcgacggcgacacctagggaaagagaggagaggaattagggcggaggaaaacccccacggcgaccatccacgccggccggagtcggaggggagagagaactcaccgacgacgcgagggaaatggggtttcggtggtattccggcgacgcagagcagcggccgggaagggtcttgcggcggcgaagctagtggtggcggtggcttagtgcggcggcggctctagcgacggcggcacacggccggagtgcggcgacgggcggcggcgtaagtggcggcggtgcgagctcggtagggggcacgggatggagcggtgagagcggaaaacgagagaggagggcatggggagcattttataggcggagggggaggcggacgtggccgggaggcgctccgatttcgccggcgacgtgggggaggagagagagaaggtgggggggagattcaaaatcgaatcccgcccctctcgtgcgctggcgcggccgggagacgcggggagagggcggcgacgtggcgtgggcgcggcgaaagcggaggaagtgggtgcggcggcggtttcggcgcggcggcgcaccgggatcggcgggaggtgggggaaggacccgacaggtggggcctcgggggaaaggagagaggaggagacggttggggggagacgatgacaggtggggcctcgggtccacctgtcggcgaggggaggagggaggaggctgggggttatgtggacttggaggagggggagccgagctgggccggcccacgcggagaaaggagggaaggagggaagggagaatgggccgagcccaaagacaaagaggggattttaatttcttttctttttattttaattgattcgatgaactttgtgccattaaaattacttcttgagctccgaaaattcacggaaaattccggagagtacattagggcacaaagaatattacaaaatattcccggccaatgatttttaagggaaaaattttaattctcccattaattcacttgattaaattgctttaacttttatttaatttctaggaaatgcattattaattgatttttaatcccgaacgaaaatcggggcgttacaaatctaccccccttacaggaatctcgtcccgagattctgggatggctagaaagaaagccggtgctgatgggcggtctgactgatctgcaccttgaactgccacattctgcttcgaactgattgattgactggttgatcaaacctgtacgattgaactggctggattcgacctttctgttcctttgctttgccaaaactggaccgactggttttgcttgaactgacccagtctaggactgcggatgctcctgaaacttacttagcttgggctgaactgttgaggttagcaattttggtaacctgagaattcaccacgctagctataagaggatgaaaatggaatctggcatttataaatcatttaccctatgtccgcttcgactggtcccaattcaaataacaagtaattccagaaaaacctgcttgacctgtctttcgtctgaactgcaaccatcctcgatgctacttctctaagctgaactgttgacctggcctcaagggtgtacattagaattgaacctgttgacttgagattgggagactctgctagtggctcgcaacggactcctttaattactaaccaaattgctgcactgggttgaacattcaagtgaaatgccgacgaggtaaaccaaaactcatctctgagacctaccccccttacagtgggtagtcttactttcgcctgactgagaacctttgaactgttgtcctcgaaaaaatgaccaacatttctcggatttacagatgccctgactttgaagactgaaacttcatcggtccatcaaattgaagcaatggcgatgcactttcatcccgacaagatttggaacttaagccttagttgatgataggaaattccacataaaagtgactctcatttagctcatgaacacactgactcttgactgcaacacactactgctggagttctttccgctactcttgaccttgcatcgagctttgcatctcccgcatcaatacatccatcatctaatcttggacaccaaatgttgatcacgagcagggttcttctggcactgggataccttgtagctttcaactgaaccattgattggtgactttaattgatcttatctctgacactgaccatccgctgccaggacggaagagaggtggaagagaggggttgctaaagataaggtactaaaccacttgcctactgatatgttgtgagtagacttttattcttcaagttgcttaagcaaacaacctagtatggtcgcatccccaccaatgatgcaaaccatacccctacacacaagcaaacaacacacgatctagaaagctaacggaactactcttctgggaaagattgggtttaggtcaacttcgggaaaactcttcttgatcttcacggaacgacgactctgaaccgaccttctcgctctttgctgcacgaagcttgatgcttgacttgacttccgaacagacacgaagctgacagtttatcctccacggtttaacaactataagaattggagggacagggaggagaattttgaaaaactgtttcgcaaagaaaagccgaagggcgaggggagacatttttcaaatagggttttcagaaagcttgtccttagggtttgaccatttggctcaacctacagtcgagttggctctgataccactttgtcacgcccagaaatttagcccaaaatttccagactattttgtgtattaaatccctgtccaggaccagccagggtacacaaaacgacaagtaataaacagtcccaaacgtaaataaagcgtaaaatacttacagaagaggcacttagtcctcacaccgaaacaaaagcagcagcagcggaaaaaggcgatcctagcggggcttcagctccactccacaggcaaaactcaactggggtctgagccttggtcctctaactccatcttcagctcagaagcactacacttctgaaaagggggaataatagcaaggctgagtacaaccaccgtactcagcaagccacaccaacgatgcagacgtgcaaagggaacacaaggacggtttgtggctatttgcataaaggcggttgtaaaacattttatttagcaaacagtaaaactggtgagtaatttaagtaacattaaaatcttcactgatcaacgctacaccacgttgaacaggcccaaccaacccacctgtactacagtgcattgggtcgatttattaggtgtgagactaatcacgggaatctgggcgatcgcccataaccgcgggcacggctattcgaatagttttactctggccagaggtgcacaactg

SEQ ID NO: 1484 - DNA, 4049 bp, Oryza sativa
caaagaggggattttaatttcttttctttttattttaattgattcgatgaactttgtgccattaaaattacttcttgagctccgaaaattcacggaaaattccggagagtacattagggcacaaagaatattacaaaatattcccggccaatgatttttaagggaaaaattttaattctcccattaattcacttgattaaattgctttaacttttatttaatttctaggaaatgcattattaattgatttttaatcccgaacgaaaatcggggcgttacacgacacgtccctcaacttacaaaaaccgggcaaacgaggtccctcagcggttttgatagcggttttggctgacatggcgcatacgtggctaatttgattcggtcttatctgacatgtcgttgacgtggcgcttacgtgtcaattagatccgaaaaaataataaaacctacgggacccacatgtcagttgcacatacaaaataataaaaagggagtacctatacatctttcgaaagatttttataatcatatcacacagatttttaatctttgtattaaaatccgatagatataataaaaagcaaaaagcaattaagaaacaccataatgaacattaaattaccatatcctctagaaaaagaccaaatccaatacaaaatttaaaatttacatgtgaagattcaaaaattacagtgtaacttacaaaagttacagtgtaagtttcataaattacactgtaacttacaagaaaatgcactgtaaatttaagtgagaaaatcgagtgagagataagaaaaaatctttcgagtgagatatagcaaaagggagtaactatacatctttcgaaagatttttataatcgtatcacacagatttttaatctttagattaaaatccgatagatataataaaaagcaaaaagcaattaagaaacaccataatggacactaaattaccatatcctcaataaaaagaccaaatccaatacaaaatttaaaatttacatgcgaagattcaaaaattacagtgtaacttacaaaagttacagtgtaagtttcataaattacactgtaacttacaagaaaatgcactgtaaatttgagtaagaaaatcgagtgagagataagaaaaaatctttcgagtgagatatagcaaaatcgatagcaaaatcgtaataaaaaatggtgtgacccacgtgggcccacacgtcatcctcactactctctatcccctctctctctctctccctcttctctttctccagccggcggagcgtggtgggcggcggccggagcggcggcagagcagagggatggaggaagagaggggcgaagcggggcgggcggcggccggaacggcggcggaacgtgggcggagcggcggccgtaccggtgcaccacgcgcatcaccccctcatagttccacatcagccctgacagtgatgccgcgccgaggtgtagcggcaggtgcctgcacaccaccgcagtttcccgccacagcaccgaccccgcagcacgccgtcgagccaccgcagctgcgcctcacagacggcaccgttgaacatcacgaaccgcctggccacgccggcaaggccgctcgggttgttcttgtccgtgttcgggttcctcttgtccaagaatctccccgctgccgcggccatcgggtggtcgcgcgaccatcccacggcgttgaagtcgtacgcgtcgaggaagcggtcaaactcggcgacgacggcctggacggccagcagcgacctgtccttggggcagaagccgtcgacgatgtcaccgaagttgacacaaaagcggacggcgccaccgccgccgtcattggatgcttgtggttgtgggcattccaggagcggacggctctctggaggacggtgaggctgtggcggtagtagcgggggacgccgaggaaggagcggccgtcggggatgtcagtgtgctgggcgtcggcgttcggcggctgaaccagcatcggtcgtcgttgccgaatgattgccaatcggccgacgaccaccacaagtttgtcttcctctccggcgagcggtgaccactggccagtgaccaagagaggggaggaggaagaggagtatccgccgcgtccaccgctcgtgtcgaggtggacgatgtcgccgaagcgtctccaagtcggcgcgctctgccccttttccccgccggccactgctcatcgtcccgccgccaggttggccgccgccgcatggatcccgccgctgggtcgccgcattgggagaaggaggagacggcaagagacagcgagattggggaggagacgtgggtcccactataaatagtttatttttagtcgaacagtcacttacacgtgggtcctagtttttttttttttgccacgtcaaacgaaaccagggactatactgccgagggaccttatttgcacgggttttataagttggggatgcgttgtatctggttttgtgctgcagggacgaaaatcggactaagagacaaataaagggacctaaagtgaacttatgccttctttgttacagtttgtcagcgctgctgctgagacggcccaggcccacggcccacattcctcctctctctttctctctcgcttctccaacgccacacagcgagaaaaaaacgcaacaacgctggcgaccttcctgacgacgccgacgagctcgacctccccgacggtgaggcgatccaggtcagctccgcgcctcctcctcctcctcctcctccacatcccctcgccccgcccctccgccgccgccgccgccggtcctctgcctcccaggccatccctctaagaccatggaatccatcccccacttcctctcccccggaaaccctaaacccaaacccccattgccgcgttcagacattcgcggattaaggttttcgggcctagtgggacgtggtgtttggagctgccactcactttctcagatagtgtttggagcttggttctgattaacattgatgcatacaggcgttttcaggatgggcagtgaggacacaaaagatatgctgaagaatgtggactggaaaacagttggtggttcggtgagcaccgacccaagccaaccagttgttaaaaagcgtctcccgaagaaaatcagacaagttcctgaatgctattttctgcctcggcgatctttgccttctgcattggcaatctatggcgctgcgtgtgctgctggagttggcgcagggatgctgcttgaggtttggataaacaaaaagatcaaaggtgcattcttgttttatttggtagcaggaggggccattcaacttaggaaaagtctatacgtactaactttttcttactaaatttttactaacactgacatgtcatgctatgagtccatctagattttttataacttccatctgcttaaatcaaacggttgatatgattgttagtacaaatttagtaagaaaaaattagtacgtgtagcagtgctcttcaacttacgttcttgcaaagtaactgttttcttgaaaacttatgatgttgtattatacaattgaaagcattactcttcttttgtcttggataatgttgggttgaacaattgaaagcatgtaacacctttttgtttgttgcctgtatatttttgtacatatacttactcttcttacttgctgatgcagaggacagtgccattgtctgggaaatgggcaaatgatttgattgctacctctgaagagttctccttgctcgtgttcagctgctaaagctgcatctcagaaataatcttagctatattggttctgattatcttttgattcccagacaaagtaaaactatcctttctaatgtatgacactgccttacatctacatttctggtttcattttgaatgctagcataacagtatggtgtaacaggaaatatcagaaataacggtgttacggaatgagccatttctgtttggcattatcagttgtacgaattaattgattgtgtggacagtggtagttacatgctctgatggaaatatcaaaaatcatttggcctacaaagttatgaagtgtgctctctgctcaaac

SEQ ID NO: 1485 - DNA, 597 bp, Oryza sativa
taagcatcatgctggacatccaacccctgcctatcgtccaaccttttggtcaccaacaattggtatgtgtttttgttgcatcatgactaatgcttgcatcatcatgttgtagtagttatatgttgtacgttttgttttacagtgcaaaatgtatagaaacaattactttgaggaggagggtatcgacctgcaaactggcaagaaggaagctgcacttgttggaaatctttgtgcatttcaattctggcagcgtatgtttaaggtatatcatatctgtaataatcatgttccttgtgcatatttacaggccttatgcagttaataattgattcaacatttatgtttcaggcgcatgtcaattgccatgtattaacatcatattccttcttttagtagttaaaacagttctctattagttccttttccagtaaatatctattaattggtgcgggactcttttccagaaaacattattatataagactcagggcaattatttttgtttatctgcttttggaaatgtttattacattagtaaagtgatgtcttcatatgttgcaggacaagtatcgtctggattgtctgataaatgtggtg

SEQ ID NO: 1486 - DNA, 2514 bp, Oryza sativa
agaggaggagcgatgtcttcgcgcaatcgcgcgtggatggagagtagtcttcgcgacagtaaatcgggcggtagtgaaatcgtgtgtgcggatggacggtaggattgatccggatgatttcacacgtaggattggagacgtaggattggagggtgcaactcctcctttttatattagtatagatgattccttatgcgtgtccttcgatttcgaaattttcaccagccataagctgtaaggcatttacatttaatttaattaaacagctaattacttggtttttatatatacctaataaaaaaatacgcaaagctttatgtttattttgtctgttcggttttttatggcgccggtatttttttctatcatttttttacacgcgaaagagtttcttttgtgcgcacgctctaaagctttttattggaatttaattttattttaatgataatttttagtcattatgtgtgggttttgggggttttctgattttagatcccatccgggttgttgtaccccgcgccttccacgggccgaaccctagtgccgcaccgccgtcatgttaatcgtgcatttcctcctccaattgattataaaaatcgattccccattcgtccctcatcattttctaaatgatttcccctttcgattcagttttaattcactggatttaatcttcattttaacagtcgcgatgatgatcgatgggcgatcttcctcgatcgcttttatctcaagttttacactctgattttgggaagaacggaaagaggatatcgaagggatcaaaagccctcaaccaatttttggagatcgagaaatgttcgaccggatttgatggggaagatctgctttggcatcatacgggcatgggaccatgttcgagaggttgaagacggttgtcggctgtgcaagttggacctgcaactccacttgtgagatgggcggaagggaggcaggccgagcaaagggaggtaaaggtttggcttagggctgaaaaggaaacattgaatgggttttcggtccaaaaccaaggatgaattcttattaacttttttaattgtaatgtatagcaatcccagttttaggatttttattaaatgtttcaattctaatgtatattgatcccaatatttcaatttattgctcggcttctaatagttgttgtatcgctgaaaaaatgactttcccgttacaacgcatgggcatttttctagtttgagccaatcataaccgtcatttctttcaaatggacttgatattgccacgtcactcatcttcctcgtatcactagttgaccgctcgagcaagagcatcccaatgtccgatgcaacctgatacactttgtggtatcatcattctcgatctcatcgtgtagatcattggcaaagcacatctcatagatgcgacacatggccatagcccccgtaccagtgggttggtctaatgggcaagcccagcagcccagcccaactctctctctctctctctatctctctctctctgtctcgcaccttcctttttctctcgaccgcgagcgacaacggcggctgcaatgacaacaaccctccggcgaggtcactccacatccttcggcaagccccctcctccggtgagctccctccaatgaaaaagaaggcacacagtggagcggtgctcctctggtgatgacgatggcgaaggcctctctctaccgagctccctcttcctccctccggcgagcttcctctaatgagattgtcaagcaacaaggtcagctccttttccaccgccacccctgtaacatcctgaaaattcaaagacaataaaaatcactaaaattttgaactttttaaaacttttgcatcatgctggttgttatgattgctattgcttgccaaaccgtaaatgatcacaaagaaagtaaagtaaggatctaaaatttaagtaatagataaatttacgagaatataatattgttaaccctacaaataattacgcacaagaaaacaaagccagacaaatggaaagttaattactaatttaaattatggattaaatactaaatacgtgaaccatgtgttgcgtgtcatgacgtctaaatacacatgaaatgatgaccatttataatggaactctatctatgacatagtttcactaggagtaattaatgggatattactaaactctaatggtctatataaagctaaaccaattcacatgaaataatggtcgtataattaaattaagctttataaaattttgtgaggttttaattaaataattagattaatattgtgccgagtctcaatttactatttatagaataaatagattgaacctatccgtgtaaaatatattgctatacaactaaacttaaccaatctgctaatgtattaatcatgacaagtcgttatattaaatttaatagtaccccaaagtcttcaaaaatatataagttcaccttagggccaataactcaaattaatctaaaaagaattcatttgtgcgataaataaataaatatgggtaatatta

SEQ ID NO: 1487 - DNA, 5424 bp, Oryza sativa
ctcgcgcctcgagccgccgcgcgcagtcacgtcgccgctgtcgcgcgcgccactgccgcgccccatagcgctagtcgtgccgcgcgcggtcgccgtctccggtcgcatcgcctcgaaccccacccctccgcgcgtcacgccccatagccatcacgtcgcccatcgccgccgtgccgccatcaccgcgcgccaagccccgcgccgcgccgcgccgtcccatcgccgcgtcgccgtcccgtcgacgctccgccgtcgctgtcgcgtcgcccgtcgccatcaccgcccgccgagccccgagccgtctcgagccgcgcgcccgtcgccgtcacgcctcgcgccgcgtgcccgccgcctcgcgccccacgcgccgcgcgccgtcgcatcgccatggagccggccgcccctcccccgcggcctataaatcccctccggtcgcccttccatcccacatcacccccctccttcccctcctttctttccccctttctctccaccgcgccgccgcctacgtgccgccgcgccgtcgcctcgaagccgccgcgccgcgccgagtgccgcgccgtgcgtcgccgccttgcgccgccgtcgccgccgccgccgtcagtaagccgccgcctcctccccttgctcggtcgccgtcgccagagagccgagggagagaggagggagaagaagccgggagggagagaaagagagaaaagaagaaagagagaggaaggagaggagagattagtgggccccacgtaattggtgaatagtaaccctcttcttaatctttattagtagtgtctattacatgtgggtccgggtggttaaaaatctaattatagaagttttatggtctcgagtctatgacatgtgggccccacttgtcattagctcttcctatttccctttagaaaataattcggtaggaaaaagaaataaacccggggtcccacttgtcagttggtacaaggctgtggatatgtcttggattaaaaataaatcgtttatgaacagtagcttttcgcaatttctcggattaattcaaatttgaatctttacactagcataacttattcattttaactcggatttaagtgaaacttgaacctaaattcatctaaattcataagctttccaatgatatataattcactatttaacaaaatatatttataattataaattaattaatatcaaatgattagataatagttaacctaaatagtgtgccaatgaataaaaatggatattgtacagtagcataattatctttaacatgtcttgtcactgtagcaactaaataaattagttataatcaatccttcaaattaatgggtgtataggaaaatattagtgccatttactagtctatgtccaaatataactaaatccatgacttataaattgtttacataaagtttagcctcatattttgtaactaaaatataaacacacatagatgaatctttaacttgtttaggagagtaatcacagagctagttgtatttggaccacttaaaagtttgtcgatacaatgtcatgtgaagtagaatatatgtatatagtcggttgatatccattagttaaccaaacagagccatcttaaaatcaacatgtattgtatagcttacagtaaaaagcaactactcaaatatatgatccaataataagatattgttgcttacacatatactatacatcccattatagtggtacggtatagtattaatttgcgtgttgcatatattaaattaagagggagtgtatgacaaacatgtatattagataaatactagttataaatcttgacctcatataattataattatagttcaactgtaaattaggattattcattgtaaaattatgtgataggataatctgtaaccataatatgattaacctaaacaactctaacatacaaagcatggataattattaaccttttataatttattgtgacaagtaaaatatgttcataattaaagtaaagcttccataaataaaataaataatacaaatgattcactgtaattatttgattgatcctaaatccatctaacaacagaacctctagtaaataaccgtcctatgtagatagatgcatgcttagccataatccttccatagccatttgatagactaaaccaccgattagccaaatatatatgtatcctataaatgctatgttggttaactcctaaataggccacgttgacaatagaaagattaagaaaccttagcccctagcgtgattggaatccattagtagacatgaatagtatattttgttgtgcatatttggttgttatttgaatattggtttttcttgcgtattatagaccttgtgcatcggttagtcgtgaggcaacgtctgcaacttccaggaggtgaaggttgatcaagattatatcaataataaggattatcctgagcaaggcaagtcatcactattctttgaacatgttgatcccaattgcgaaattgttttgtttacaaataaaattgcatgcaatgataaacatcctacttgtgattatgccatgccttgattattgtttaccccttattccttcgtaaccatgcttacgtatgagtccctagtcaactatgacaattgcttagaaatgctattctagaatcatgcatactcatatttatcaaaatgctttatgcttgggcaattacctttgggaaggtaattgagatgcggcatgtggagacatgagcgccacattgccatgatattgatgacatgatttgtgaaaggagaaataaaactaaaacaactattttcgactggggctatagttggccatatggcccgaggcccgatggcccggcccacggcacgggaatttggcccggcccaagcacggcacggcccggtagcagtcgggcccgtgccggcccggcacgactattgggccgtgcctgggcctatggctgggcacggtgggccggcccggcacggcacggaccgaggtcggcacgatgggccggcccggcacggcacggcccaacggtcggcacgaccacggcccgtaccaacggtaggcacgagcacggcccagcccaacagacagccaggccgcaccgcgtgcgcccgcatatataaggcagcgaacgccgcgtcgccgcccctcccctccccagtcccctctcgcctctcgctctccgcctctccgcctaaccctaaccctagccgccaccgctcaaccgcctccgccgatccgcctccgacgctccaccgcccaccagatctcctcctccaccgtccgtcgctcactcgctcagggcctcaggcgcgcaccggtgagactcaccgagtcgcctcccttccactcttccagatccagccttcctcttcgtctccgatcgatgcctcgcctgactcgcatgaggggcgcatgaggatgggggccaccggccacgcatggtcgcctgagtcatcgtccttccactcttctagatccagccttcctcttcgtctctttcccttttgttcttcttcgccagatcccttggtcttctcgtagatccgtgagcctatcgtcttcaacggcaactccggtgctccggctgcgcaggtacaagcatggaaccattgtttttctttttttttctccatttccgaccctaaccttgagtgttgttggctgcttgcaggtcgcaagcccgttgcttagcggcagccgctgttgagggaccagagtgcctgcgatggacgacgatcctacctctgtcaactacgagttgaggactatggggatgcgcggtgatgacgatgatgatgtggaggaggatcgtgtggaggtgttcggcaatacctccgacatcccgatccatgtgaatgtcgatgacgacgacccgccggtcgacgacagtggcaatgggacgccgactggctctagtgcgacttgtaccaacaagaagaccaaaacctccaaggtatgggatgactttgaggaactttatgaaacgaccaatggtaatagggttcgagtctctgctaaatgcaattactgtcataaaactttgagtgctcgttcttctgctggcactggacatttgcttaggcatattaagtcatgcaaacctagaaagcttgggtctaatgctttgcctcagtccatgcttagatttagtgcagatggttctgttattccatgggaatatagtcctgaagatgctaggtttgaattgtgtagattgattgctagagaggatcttccaatcagttttggtcaatctcctgcttttgtgaactatattaaggctgctcataaccctagatttgttcctgtctctagacaaactactaccagagatttttataagttgtttaaggatcgtcgttctgttattattgatcgtctcaattctgctagctctattgctttgacatctgatatatggtctggtcatgctaaggaagattatttgagtgttgtagctcactttgttaattctgattggcaattagaaaagagggtcttgggtcttaggcttattgatgagtcacatactggtgctaatattgctgagcgtgtgattgctgttgctgaagaatatggtattactgataaggttttctctattacattagacaatgcttctgctaattctaaagctatgatcacccttactcctgctctgtttggttatattggtgatttatttttgcatcaacgctgtgcatgtcatatcatcaatttgattgttaaggctggacttgacaagttcaagcccatgctaaatgacattagagctgccatttcattcttgaatgcatctaatcagcgcattgctacatataaaaatgtttgcattgctgcgggttatcgtcctcgtatgtttggtttggacatggatgttagatggaattcaacttatctaatgcttaagcatctcataccacatagggaaccattcacagtatttattagtacacaacatccttttgttaatgaccatccattactcacagacttacattgggcatgtgctgaatctgttttgtgtttccttgaacaattttatgattcaactgttgttttgtctggtgtttattatccaacatctccattaatcatgcatcacattttagagattgctggacatctaaacacatatggcaatgttcaaaacattgcaaatgttgttggtcccatgaaaactaagtttatgaactattggtctaaaattccaattctttattcatttgcatttatcttggaccctagggccaagattagggggtttagtaaagtgcttcagattatggctcaactcattggtgatgattattctgcttatttaacaactgttagagcttcattgtttgatacttttgctaagtatgaaagaaagtttggttctgttagattgcatagttccactattccaggcccttccactggtaagaaaaggact

SEQ ID NO: 1488 - DNA, 5683 bp, Oryza sativa
aaaatcaacgtcaaagtttaaaagtttgacaattattaccgtcaaatgtcaaatgctttgtatctgattgagtagttaattatttcacaccagtggcggagtcaccgaccggctagcccaggagccgcctaggctcgtctgcaaaaactccattaaattttaatattgataagtaaattgatgataaaatttctatagtaaatactacttctattaaaggttggccagactcaaaaatctttctagcattcgcaactgtttcacacttcctttctcctttgaaacagatattgtttttgtgcaaaacaactaatatagttcaagccagttccttctactaatatgttaacgagcaattcttttacacgttcgaaaaaatatgtagtttaagccagcgctgtagctccacattgaaaatgattaaattcacgcaccaagtatatatgtacgtgtgttacataaatgaatatatgatgttgagttttaattgccagcgggcggccggcgtgctgctctgcttccatgcaacattgactatacttgattgattaattattggtagctctctttagctgctcttttcttattctctgctttcatttttattgcccttaagactactacaatgccttgagtacgataatctagacttgttgagccgtgttagtaggagtagtagtgtcaattgacccatcaattcgtagctcacgctttgctgtgcattgcgtgacagttactaagcaaaacctatcgatgaagataagctagctaatgttgttctcgataactgcgtggtgcgtgccattaaaagttcagtaggacgttaagtacctgtgccagccaagccctagggtttagcggctaagcttggatcatattcgatctgttctaaaatataaccatttctaaaattaaatatggatattaagataatgtgtgagaataatcaagagaagtttgtgattggtaaaaaaaagattaagtaggtgaaaaaaattaaatagagattgaaaagataggtgtagaaatagttttattctggaacatggattaaatgcatggtagaaataattttattttgggatgagagaacatgaccaaggttatcaattatgttctggtatcagctggaatggctggtacgtaccattcgaccccttaaaaacgttacgtaactagcggcggtactgttcattccggtcaaatgccaacaaatattgaatggaatagtacgaactgacatatcacttgttccggtacaatttacctacgagtgaacgttcagtcgaatttaacataattggttattaaactatatttagctacaaattatttatcaaaatggaggtctatagtgcgagacagtagaaaggatgagtgagagataaagacagagaatgttagggaagggggattattgggcccgtgggatttagataaggagaattggccggacgattcactatttattcactaactagtttagacataaattcgacgtgaatcgataaagatggactatcgaggatgattttttaaagtgatggtaattgttgtatgcaataatctgcacgtcgtttcttgtaaaaaggcgaccacaaatccaggatgcaagcaaccggtgaaatacagagcaagcttatgcattagaaagaaggagatcacacacaaagcccacgacacatgcatcatcagcaacacgaattttttttaataactcagcaacacggttggatcaatatataataagttaataactggtaattaagcgtgtgggtagccaaggctgcatcgtatctagagtttttaagtgtgtgttggcaaacagcagatatgtgcaagacaagcaaagtgccacagaacagtgggtgcgtacgtgtaccacatgcatactttaatttgatatactgttgtcaagctaattatgtaaactaaactgagcaaaattaattatattatttcctatgtgagatcattaattattttgataattgatactccctccgtttcatattataaggctttctagcattgtctatattcatagagatgttgaatattaacaatactagaaagtcttttaatatgaaaacggagaaaatagtaaccaaattaaggtcatatcaattccatcacttatcttatagtggagtactaatgtactatcgtagaattcaagtaaaccgtaggattggaggtcgtttaattagtaggtctgacagtaccggtcgataatgtaccatcacgcccaattaattaggtatagtgaacattatattgctggagtaaagccttatgaccaagttatcaacagtaccggagctagttttgtccttgaagggaaaaaaaaaagggaaaactgtagtgcaatattgaagagcatgtgcctatcatgttacacgagatgaaacctttggcatttctgtaggattatgtgacaatggtagaaattagttacaagatggattgctttgtagctaaacgatgttcttgatttgtgtatgcaccattgatcaatagttcaaaaataccataacaattgagatgatgcagtttggagagaagtgagatatataatccgaacaaagcattaaccatccatctgaacttggaaggtaagaaataattgagatgatatttctttgtgaggaaacaggccggagagaaataagagagctaattaggccatatataaattattcatcgaagggtttaaaataagcaaggtagcgtggcttcctgaaaaaatagagaaatgacattaactatatttatttggtggacagtacccgatctatattgctattttcattttaaaactatttcttgccaccatgcatacaaggcgccatatgcattgcatggaaatcaccttataaccaaccctatatattaaatttagcctttgatttcttctctacaaaataaatttccttaacacagtaggagttagtaggagacgaaaatatatagttagcacagagaaacccccatcatctgatgtcacactcccaatgagtgaagaataatactgctgctacctcgctcaatcattagtattcgcatacgaccgcaaaagatcatcgacggcaagagagagagagagagagagagagagcgacctcgatcttgatcttgatctcgatccagcccaaccaacggtcgctgttacgccacgtcacctcaccgacgccgacgcgccatcgcctcgcctctcacctactgcctcgtcctcctcccctctcccgccattgatataaacccccacctcctcctcctcacacctcacaccaatctccacctttcttcctcgtcgacgagatcatcggcatggcggcggcggcagtagcgttgctcgcgttcctcctcgccgcggcgtcagcggcgtcgtcggcgtcggcggcggcggcgacgctggtggagggcggcgtggtggggcgcgcggcggtggtgatgaggcggggagggaggacgtgccgtggcacggtgggggagtgcatggagttcctcggcgtcgacggcgagggggaggacgagctggcggcggcggcgacgggcaagcggcgggtgctgcagggcgggtcggggtacatcgggtacgacgcgctgcggcgcgacagcgtgccgtgctcgcagcgcggcgcgtcctactacaactgccagcccggcgccgaggccaacccttactcccgcggctgctccgccatcacccagtgcaggggatgatcgatcgatcgatcgaccgagctagctaattaatgaaattaaatccaatgccatgtagttcgcagcaagaacacacgcacagtgtccccttgatcatagctgagcttatatgctatagctgtcaagatctcagtgttgtccttgcatgcctctcatgcttgattgattagatgtgtaatggtcctaatggatggatggtgttgtttgctatgctgcttgggtgaaattaaagtgatcaagattatgtttttttgtatctatatgcatgcaaattaactggcgcttgcaattttgcttcagttttttgtttatctgcttatctgcatgattaatgatttttgtttgaatattccaattaggataagcagatatgtttgatagattttttagcttgggtatagtttctgtgggcggaggcagatgatcattaattttaagggaaattttttttctttgattaattaggttgtggaaaagaatttagtactagctatgatctaggccaaattcatgcatacaagctactccagcttgtaagaaaagaaacatcggcgtctatcgagttgagctgtcatttccgagttgattttattttatttcattttatttgggtcagatcaggcactatatggtggacagtttttaatcagtgttactttgaaaaaaagaacatttttgggcccaaaaataaaagattgcatatttggtgaaaatgacccatgtttgagaggatcaattcaaggtgggttaatggaagtggtctttagctacctataacaacacatgttatgtgcaattagtaaaatagtcatttggtaatgccaccaaactgtggttgggctgtcatttttcatctttgtgtgtagtcaatgtacctaggaactttatgcaccaaggaaaggggacatgattagttcccctttttaagagaggatagggaaagtctttgaagctaggaccacacactgtacaaaatggtcccttgaaaaatatgaatatgttttcttttagagtcctaactggagtactgttgttttgattttgtaattaagtcatatcaaatgttacacggtttgcagtttactacttaacttggtgtcattactttcttttcatgtgttctcacttctcatagtttagtgagtggattacacagtaaaagttacaaccgccatgcaccatatttcattatttgcacaatcaatggctagctatatgaattttggctagttcaattacttgattgtcccaacgagtgcaatgctaagattgtgctgtgcctctgtttgagttggttcacacgtatgcgccatcaagattgtgctaccttttgagttggctcacacctgatactgcattctgaatcaaagggaatttttgaatgggctttggtggtcagaatgcagtgtcaacaacccatgacatgtagtataaagtagtgtgatatcacctagacatttatttgctgatgttgaagggggaggagacgagacacaaatttttgactcctgtctttatgtgatgatcaacaaaatcttataacaaacgtcaaatatttatgatcaagagaaccaacttttataattttgataaaccgaaatgatatattttgaactatctctttgtttcaaaatataagaaccaccaacatttgtagtttgcactaaaatataaacactcctagcactataaagtataaagtactacttattttaattgtttcccattaaaatttctttccatctcttccttaaccactttcttgcccctaaccatatcttatttaagccgcattcgtttattcaactctaaaatgcaactttatcttttttaacatgtttttcaaactgttaaatgttttcttttacaaaaacttattatatagaagttatttaaaaaaatcaaataagtttaagtttaaattttacggtaattaatactcaattaattatatgat

SEQ ID NO: 1489 - DNA, 504 bp, Oryza sativa
gatattgataaaagaaactgttcctttggtcaaaattgatgggaatgcttagactattgatgttaacagaaagtattgttatgctatataccctttgtataaatttctaatttggttccagcatttgctgcatcgcaggttgttgcagttaaacagcttgatctaaatgggcttcagggaaacagagaattccttgtggaggttctcatgctcagtctcttgcatcatcctaatttagtcaagttgtttggttactgtgtggatggagatcagcgcctgcttatttatgaatatatgccattgggatcactagaagaccgccttcacggttagtattttattggaaattgtataatatcctctgttagctcctagaaaaacctgaaagttccctaagaatctgtagttgtgttagaaaacattttatatttttcattgttacatcatcgtgatttaaagcacatctaaccacttgaacatggtgaaaagaactgtcttctaggt

SEQ ID NO: 1490 - DNA, 1383 bp, Oryza sativa
acatatgcgtagaatgagatgtaatttagcgctaaaattagtttaaaaattaataattattaagcacatggtacggcatgactctttactgtagtacatggcccaaccaaccccaagtctcttattcgcttgtgatcaaatcaactatactcacatgtggaaagcacgcttgttttctagcacaacgaactaaggaataattatttccctacgtctcaacggcaaatctaccacgatcgattctcttccaagaaaaattaactagtctaatccactagtttagccataaactttggtcctgttattttctcataaagattaagattttacctcggtttccattactactaaacggtatatttcgtgcgaaaactttctataaaaaaagttattttaaaatatcaaatatatctatttataataattaaaacttaattaataataagttcataactttttctcgttttaactttatctttatcgtcatgagtttcgaacccaaccaaaatatcaccggcctggggaagttgtatactcgtataggccaccttcggcaaccgattttcatttcccttagaggatatttttttccaaactatgccatctgtgtcgatttattaatcaaaaagaaaaaaaatcaccggccaagattactacagctaaaatgccaataggtagcttgcactttctgtatgtcaatcaaaagcatcattctgctgcattgccctgaaagcatcacacacaaacacatatatactcctactgttcttgatactggcaaaaagtcaactaatctcatcatgccaccacaaatccaccatccatacatgcactcgctcactaggccccgttcagatctcacctcaaatttttcaccatatcacatcgaacgtataaacacctacataaaatatttaatataggctaaaaaataactaattacacagattacaagtaatttacgagacgaatcttttaagcctaattgctccataatttgataatgtgatgctaccgtaaacatgtgctaataacagattaattaggcttgataaattcgtcttgctatttactaacggaatatgtaactagttttttttttattaatggccgaacaccccatacagcatcctatataatacctgatgtgacacgctaaaattttacaccgttgcatctaaacccctcactaacccccggccagcatcacctactctactctacctcaacgcaccaaccaaccgccgaaaagaaagaaagaaaagaatccgtcaagaaaaggagcgtgacgtgagaagcaaggaagcaaacggggtatgtaccgttacgatagtttgtgtgtgtgtgtgtgtgagagagagagagagaggggggggggagagg

SEQ ID NO: 1491 - DNA, 9049 bp, Oryza sativa
gatgattgacacgtatagtaccccaagtactcctacgggggcccgtgggcggccgcatcctatgcccgaattttcatcgagccaggcgtgcgggtttgtcctcgttaactaattcattaattaattactccctcagtccccttaaaagggatacttgtactgattgatcattcgtcttatttaaaaaaaattagaattatttttttttatttgtgacttactttattatctaatgtactttaagcttaacttttcgggttttatacttacacaaatttttaaaataagataagtgatcaaacagtgcaaacaaaatgtcaaaatcccttatattaagggatagagggagtagcttattatcttatttggtttcatgggctgatccaaacaggtgggctaattcattagcccatacaagaggtactaatgggctaattttctatagggacttaaaaaaagcagttatctctctcctatctctctaatctctcgccacattttagtcctgaattagcctatggttccaaacatgtcactctaagctaatgtttagcctaccgattcaagactaaacattagctctcaaaattagtcctgggctaatcttccaaatagggccaatttggatgttgtatagaggagcgcatgtgcatgccgttggttagtcgatacgttgttgaggtggtggtagtactttctcctccgtgaagacttagagcctgtttatgagagtttcgggtagtttgcagcttctctcggaattaaaaatttctcaaacagtataactttttttttatactatgagaagttctatttgtaaaatttagaaaaataaactagaaacctgaagctgtttcttcatattctcaaaagctgagtaccaaccagctgcttctcaaaatcttaagctaataaatccttaacagtgtttgagagaaggagaaagaaaaatgttgatataatacgtaaaacgagatgggtcattagcatatcattatttaagtattagttatttaaaacttaaaaatggattaatattattttttaaaacaactttcctataatttattttggaaaagtacaaattacctcccgaactattgcggtcgaccgaattaccccctaaaacccgaaaatcagacaacgttcaccccctcgacccaatctagaacagttttgtcctacgtggcgtacccgtggcagtccagttagaattctatttgtataaaagcaggactcacctgtcatactcctcttccactcttcctctctctctcgtgggtcggcggcaggtgggggacacggagcggcggcggcaggggacacggagcggcggcggcgggggacgaggaggcggcggcggcggctgcggccacgatgagcagctgtcgccttggcgcggggacggacggaggcaggggcgggcggtgggcgggcgtggacggcggacacggaggcaacatgcacagtgcgcggagaccctcctgcgccagagggagttcgccgctccctcctctgtgtcccgcgtcaactgccgccggctcctcgtaccccgcctgccgccgacccgtgagagagagaaggaagagtgagagagagaggaagagtggaagaggagtatgacaggtgggtcccacattttttaaaaaataaaatactgactgaactgccacacgtacaccatgtaggacaaaactgttctggattggatcgaggggggtaatttgcccggtattaaaagttcagggtgaacgatgtctggttttcgggtttaggagggtaattcggtcgaccgtgatagttcgggggtaatttgtactttttctttttttagaaaaaaaggcacaccgtttaacaattcggaaacgtatgcacggagaacagcagaaatctaatatgtttagccccgtttgaacctaaataagatacgtattttactgattttttgttagaatattttttaaactactaaatgctaatcttgcttgcactactagaaaaaaacattttttaggcggccaaaagcaatttttccagacggaggagaggaccggctgcagaccaacgacacgattttcgcagccagggcaatggcccgcctgcgaaaatccaatgaaaaaacaaaaaaaatggcctcgtcgccgccgccctcccctggcctccctccggccggatctgggaggggaggagaggggagccgctgacgtcgccgtccacgcgcgcgcctcgtcgcagccgccctcccccggcctccctctggccggatctgggaggagaggggaggggagctgccaacgtcgtcgtccacgccgccgccgccctcccccggcctccctccggccggatctgggaggggaggggaggggagccgtcgccgctgcaacaggagccgccgacgtcgccgccgcaacgggagccgccgacgtcgccgccgcaacgggagccgccgacgtcgccgtccacgccgccaccgtgtctgcgccaccggtggagggatggaggggaggggaggggagggggagagagctgagaagccggtggagggagagagagagagagttgagaagattagtgttgagggaaatgagtggtggggagggggttggagtagataagtatcaaagtttttttttggtaggtaccatttttgcaggcggaccacataaggttcgcctgcgaaaataggtggtccgtttgcgaaaatgattttcgcaggtgccgcttaagtggtccgtctgcgaaaatctattttcgcaggtggatagcgaacttcaccccgatttatatttttataggcgattatttggttccaagggtcatgttcgcctgtgaaaaaaaagacccccatatcaggaaaaatgttttttctaagtgtgttggcttcgatttgatctaaagaggcatgcattggagtgttatttaggccggtgagtgatatttgtttcttttgttacggtcattgatctccggggtttcttcggacttcttttttgttcgatttagaaaaatcgaatgaatgctataacaaattatatattgggatagaactatagattgtgggaggactgtttcgagggggagagggctacatagatggaacggtcgcgtggccaacagtgaacagttaatgagacaacgggttagtggtagcaccatctaagggcaagtacaaaggtagagaccggtatggtctctacgttaattagaggctattacgttacaataattaagacaatactgtctctaacattaatgcactaaaatactttcttactagtgatctttcctttattagactcaatgcaacgaaaaatttcctaataaatactaagagtcgactctatgctgttgtcatgcgtagcaaccatctttctttttccttctccctctctcttccacgtcaccaaatatgcttgcatgataataaagagagaccgctaataaagaccattgtacatgccctaagcctgcatggaagagtatagagagtaagtttgtcttctttcgaacatttccctagctaacttctatcttccgtttttacacgtacgtttcctaaattatatttgatccatttccaaagttttttaagctaatatttaattaattatacgctaatttattgttccgttttacgtgctgaagtgagggttccaaatccgtagtagcgaatgcagcttaattaaatgggggtgtgcgattggagtgagcccttttgaattggaggaaaaatataggaattttggaggattttaatcatataggaaaattttctatgaagccctttgaaacaaaggattaagtcatatctaattctttgaaattcttatggaatggacaatcctatagaggttttagaggaaatttagcaagagcttcaacctcttggtaactttcctttgagtctatctctctcatccaattcctgtgtttttcctgcggttcaatcaaacagtcatttctgtgtttttcctgcgttttgcaattctttgttttacacttacattcctatcaaaatcctatgtttttttcaatcccgcgattcaaaggggccctaagtaagaagtggaagaattacctctccctccattttatattataagattctctttaatttatctatcataagtttaatttatccacgtttgtccaagtttttatgaaaatgtagcagcatttcaacataaaatgaatatattaaaaaatatatttagtgaaatcaattcggtgttctacgtattgcaatttttttatataaagttagttaaattcaaacaagcttgactttaaactgaaaattttttcaatgtctaagtatctggacaacataatttttttctcataatatacaggcaaaccttctagaagcgtggtagtcttcacaagttcacattggggaaaaaacgaaatatggatatatatatggtatcttttgaaatattaaactaacaaccgttattatctcgcagagtacggctaaatatggagtaccgggcgtgatggaaaacggaaaaaacatactgtattttgtcttaaagacacgacaggagtataggaccatagtttcactgaatgcttatcggttttgtaatattgatgtcaatttttgatgtgacatttatctattcatcttattaaaaatataaaatattatttacttattgttaacttattttatcatcaaagaaactataaccttaacctatatttttcatatttatactgaagttttaataagacgagtaagacgaatatttaaacaattatatgaaaaattaacggtgtcgtatataagaaaaactgcggtagtatcatttataaatgtaaatccatttctttttcccttgattgcacgctagatccggttcagacagaattgattgggcaggtggcgagaggccgtactacgccacattgtcctccccctggaaaaaaaaggcaaaaggacaagaggaccaacagaaaagggtgagagagagagagcagggcactgcacggtgcacagccacagcctgcactgcagtagtgcagtttgcagcaaaggcagcaaagggcatgtttagatccatttgaaatggcaaatggtaaatggtaaaagttttattattgtaaaagtattagttggtgtttagatgtattttaaatttttgccattctagcactaaagtgagagagagaaagagatagggagtggtcccaaagcatttttttggcacaatttgctactatggactagcaaatgccaaatgtcaaattgccaagttttaatactagtgtttagatccaaaatgacaaaatgtacttcaaaatggcaaaatttttgctattttggaggatctaaacagggctaaaggctagggtagtaccaggtactggagcactgtagtgtacttcctgtagtagcccaaaggcaaaatttgctacaggacacgcaaaaaacgtgtaattagctgggagacaccgcgaaaacgtgacacggctgatggacactacaaaatttgtgtaattggctataggacactggtcgcattattttattatttccgagtcaaaacaagtgatatatttttctgaatgtctagattgccctttctctttccttccttttctcctacgccgggaacctgcgtgatgggacgaggtcggcgaggtcaccgggaacccgcgcgatgggacgaggtcggcgcaggcgcgagcttgatggcggcagcggggcggcagacggagaggcccgcctcggcgatgcgcagcgcaacggcgaggccggcggggccgctgacgacgacggcgaggtcgacgggcctagagcaggcacccggggggaggggtcgccgaccgctgccgcgcgggtggggggaggcgtcggcgagctcggcgcgagtgggcgggcatgagctcggcggcagcggggcggcagggcgagaaggcgctcggtgttctcggcgaaggcgctgagtgtccgcggcgaagacgacgactacggcgagggcgagagcagcggcgcatcgccgccaactccctctccggtagcagctcacggcgcccacctccatctcgccggacaagaggaagaccggccagctagcagctagcagcagccaagcatgcgccggcgagctcgctccaccagcaagaagatggctagctagctccttcaattcagacttgagagcttgagcaggcagcaatggcgagctccttcagacttcaggcttgagagcttgagcaggcagccaggaggcagctgcagccggtcaggggctcgatctggtctctgatttgcaagtcggagcatgcacaggcgtcctcttgtgccgacctcgccaacctcaccccactgcgcgcgatcccggcgaaggagaaaaccaaggaaagagaaggggcaatctgggcatttagaaaaatatctcacctcttttgatccgaaaataataaaataatacgacaagtgtcctatagctaattacacaatttttgtagtgtccgttagccgtatcacgttttcgcggtgtcttccagctaattacacgttttttgcgtgtcctgtagcaaattttgcctagcccaaatgccacagttttgggcctaattggaatataatcaagctgagctgccatgggccacggccactgcacgctgaacagctcagcgctttaacgtgccaggccatctgtttacagggttgttttcttaattaagtgccacatttttttctaaacaaaggcaagagatacacatgacccaagaaaaagttctcactttaaacaccataatattacaaacactaaaaacacctcaaaatcattccccaaagctacattaaacacctaaaagaaaaccaaaaaatgccacattttacccaaacatagtcaattggtttttagtcacagactacgctcatcacatttgaccctgtttagatgggactaaaacttttaagtccctatcacatcggatgtttagacactaattataaatattaaacgtagactattaataaaaactcatacataatcttagactaattcgcgagataaatctattgagcctaattaatccatgattagcctatgtgatgctacagtaaacattctctaattatggattaattaggcttaaaaaatttgtcttgcaaattagctttcatttatgtaattagttttgtaagtagtctatatttaatactttaaattagtgtctaaatatagagactaaaattaagtccctgtatccaaacaccaccttatattttttcttcttacctagccacagactccactcgccatatttaatttttccccttaccttgcctaaggtgtgaacaatagatcttggccacaccttagcaaagggttgactaggtggtgttgcattttttttaaaacaacagatgctcatataaatgtgcacgcaatcactctatccctttgagcacctttgaagattgtataagtatatcttgagattcacgaagtcacctatccctataaaaacccgggtggatagattgcaccacgaagaaactaaccaattaagttatactcacttcacgccaatatgtgttatatctttctcttgagcaaatactgttacctttttttgtttgataattcatgtgtttccatggccaaatttagggctccttggaacgcatgaatcttataagattttgacaggaaatattttagctcctcctaagtttttccaaaaaatcatatgcttcaagggaagcctcattgatcctcagtagagtcttaaaaatcaacacaacgctatatatcggggtatttaactttttgccactttgaaatgtggcaattaaagatttaccactcgcaatctatgacatgtgtgcctagtggcaaatccttaattatcacttgtaagagcggcaaatagttaattattccctatatatataaagtttgtttggtttagtagcccaccaaaataactctagagtattataaatgaatttgttcgaattgatattaattggaagccaaaatttatataatagcaaagaaagttctagaattgtttcaaactgagcatgtgcattacccatcatttggcatcaaaccaaaccatcgtatttactgctcaaactaccaaaacaattggtatgacacgttttagcattgatccaaaatgacccattgttgcctagcagtttcatccataacctccataactaactggctgccaatcaaatttgatcaaaatttatcaaacaattgaatttacttcatccatcccataaccacacaagggattaaaccttttctttttccaaaattaaggaagtagcaaagtcgtgatacaaaagtgatagttataggaatataactacaaaagttagtagatagggaataaatagtagaaaagttagaaattgaggaataaaatatcttatattttaggataaaatagaagagtaaaatattttatctcgtagaacagagagagtatgagcttaattaattttatcaagtggtttccaggtggtcgatttataaggccgataatgttcctcgctgactatactcttcatatagccccaagctagttgcatgaatcatataatactataaagttgatatttattgactcttaaaagtttaacatgcaagtgtaccacataaacccactagcaattattatctacaatattttaaatatcatgtaaacataatatatcatttacaattttattgtatttctagaactcaatatgcaagtaatatcaaatcattatatctacatcattttcacattatttaaacatatacatatctcgcaacaaagtatactaattcgaatactttgactactaatacatactgatggcatccgtggattacaccgttggtttgtcaaggaaaatacttctaatcttctatacaacattttcactcttttactattaatcttgaagtccataaatgttgcttcgagagaaaaaaataaccctgatgtccaaattaaaacaaatcagctcaccttatatctccagactcgatcacaaaactctgatggacgacgcgac

SEQ ID NO: 1492 - DNA, 617 bp, Oryza sativa
ttgtttttcttgtaaagataatcaaaaatcttatcgcacttggccacatcaaaactatatttaacctcactttgccaatctttgcgaggagtcggcattaggttggagcaaacaaaaggcttgtttttgttagtccatgaccattcagcaacatatatatcatgatcaccctcctcctcactatcgctagcctcagggtaatcaatcacattaacattaggctttttgtcatatgttctaacaagttttttattatccttgacccggctttcttgagccaaagccatttgcataagttgactaacatcaagaaattgttggccatctagtctttctctaagaggagcaattaaaccattaaaagcaagaccagccaaatctctatcagttatattcaagctataacatcggtttctaacatccctaaatctcttaatataatcaatgacaggctcattatacttttgcttaaccgatgttaaaaaaaaaaacctaagctcagtttctccagtatagaaataatcatgaaatttttcttctaattgagcccaagtatgaatagaatttgccggtaaagaagtaaaccatgtaaaagcattaccggacaagataaagaa

SEQ ID NO: 1493 - DNA, 6688 bp, Oryza sativa
tgcggagaggatgaaacgagggagccacctgctaaaatgggccgactcggcccagcccatgattcggtcgaacccgccgtcgcgccgtttgatccagggttttgatggacggctgagatttgctccctatgatggttggagggtattaccgaccattccaaccgtcggaaccgccattctcaactataaaaggccttcatgtcgtcactttctacacacacctcaagcaaaaagcttcatacatctctcaggtttagtatagtttctagagtacagtggaatagaaatagaatagaatcttcagtcctcggagtcttcagaagaattcgggtatggctctagtagcttttccttcttttgtaagacttgtactttatttagaatattcttcttaatactactctggtattgtattactttccgagtatatgaataccaactttactatatatccgagttatatttattatgatgctagcttatctgggaaatgcaatggtgtgggtataatgagcgtgtatacgatgactctatgtcatgacgatgatattagagtagtatttggtaatttaagcgtggtgtttagattaccggatatcattatttggcgttatatgctgcggaagcgatgtgggccgctaatggtgacagctcagtatgggtatttctccgcgcgtgtatatagtccaaagttaatttcctgtggagggtactcctccgtatttagcccccgttggatggtcatgacggattgtcgcaaggaactcgacaatcagggggtggcttctcgaagcaccagagggcattggaaagagggtaattatataactaggatgtatgtatattatatatgtatactagaagtataggaatatgatctttctactttctttccacttagcttagataattatgaatgagagtataaatgcttctgcttagtgtcgctctactcttttgattatattaacccctgcctagactttggttattgcaagtaacatataaattattagtatggctctctctcttataatcttcccacgggattaaaaaaaatacgataaacttgaaatactctcgggtaaaatgctacaatggtatatccgtgcgcttgcgaatgaactctgtaaccataatataccagaaatatttctgcgctattgctgtgaattatatttctagtaatatcattaagaaataccaacacaagcatagctagttctcctttatgttagttatatcaacggtcgaaattggtttataacgaccatcaacaaagcccccaagcttgaacctttgctcgtcccgagtgaaggactcacaaaaaataaacttggttgttgatcaggagttgctactatgttatatatctagaatgtacaggtgcaaagtttgagtactctctcgtattaagcaagtaggcacggtggcttatccatacacccaattataacacatgcttctctttgccttgggcggttggaagacacaacagatcatagagtaacattatctcttcctttgtctaattcttattccggaggttttcaaatggttttgcaaataaaaatcaagtttctcaaatgattctctcgatcactcaatgtgtataaatattattcctcaccaaaattatgcatttgtgactcctacactaaagccgaatatgtgtagtttggaaggatcaagaatgagcatacttacaatcacatttatcactaagtcaaaaatctagactaaaacagataacaaatcatccttaagatcaatcacatttatcttcgtgtgcggttggatagctcgcacgtgaagatggtgatcttcacaggcacatggggttagatgggtcggccaaccatacgtgaaaaccctcgtcggccgtctagaaaaaccctttctcattgaagtcttagggtctttttggttgattccttgaggaaaaattgcatggcctgagacaaccctgggattaacttgcaagttgtttggttgccacctgagacccatccaccctcgcctggcctgatactgataccatccggctcgagattagcatgcgtcgcctgagcttcaggcgcggggcggccatcataatctccatcgttgacaggctgcaagaagctaaccactgccatgctgacgccataacaagctgttgcgtaaagctgtgaagctgcctccgccaccatcgtgcgaagccaccgccgccgcagcgtgttgccgccttgtccgacccagcaagcgcgaagccgttccgaggattccgactcgatcgtcggatcccgtcgtttttgggatctatttccaatcctgatggacggatttgggatctatttccttctgttctttgcttttctgtccttgatggcttgatgcatgcgaacaatttgtctccagaaagctggacagatgaattttagttgtgcggcgaagcaattgtgctaatatttgtatctggacattaacatatgagttcgcagtaattatgtgaggactaattgcagttttttctcccaggccatagtagccaacgaatcaagtaaagtcgtaggatacctgtatagaccaaaaggcacacggggcctgacggcccagcccatggcatggggtttcggcccggcccaaacacaacacggtctgactggtgttgggcccatgctagcctgacatgtccttcgggccgtgtctgggcctctgcctcggcacgatggaccggcccggcacggcctggtccaacaattagggaggcaaaatagatgagggagacaaaatagacttgttacaaccatataaggcacaaccaaaagagatgaagaatgcaagatagacttattccatccatcttctcaaagagatgagggagaaaaaatatactttatctaagaaggagcaaacgagcttttgtgtcttctggccagcttggcccagcccggcgtataggttgggccatgctagtccgactgatctcgggcctaagcccaatcgtgctgggccaagtggcccatttggccatctatagctgcctgactagataaaattcatctactgcatatgtgcttagcatgcatgcaaatttctatttctcagatatggtgctcaggggcaccaaccaaatacacttgaactctttctgaattataatacaataagtaattaatcgcttcattccatattgatcatcgtatatagtttttatcaagacccaaaaaattttaactaccatatattttatttaatgtgagtatgtggtggaaaagaaccaagaaacatgtaaaatttaactccccgcatacacaataatcgagcctttgactaccttaaatgtgtacatgcatgcatgcgtaatcaatttgatgcacatatacaataaaccctacaattataatcatgcacattaaaggagggtgtgatcaattttttttttggctatatgatgatgaatattccctccgtttttaaatatttgacgccgttgacttttttaaatatgtttgactttttttcgtcttattcaaaaaaaattaaataattattaattcttttcctatcatttgattcattgttaaatatactcatatagttttacatatttcataaaagtttttgaataaaacgaaaggtcaaacatgtacttaaaaaatcaacgttgtcaaatactcctatttagaaacggagggagtatataatagatagagtataaaattatctctacatgtcacttaattattggatgtcttatatgtccatctataaattgattgatcctttaacttttgttacttaccattgatattttctattatttcgatatgcatcactaattagttaaaagccataatcgtagtcgaaagttgacggtgactgggtgacagcattaatcaaaatgctaagatctgccccaggtttcgcaacagcttttgcacacaggatttcatagcttttttgcatcaccccatcctctcgttcattcaataatctactgacacgatacaactagtgtaagattaaacacacatttgtaactatatactagtgcatacagccatagttactagtgctagtaccagttggttcgtgcaaaccggccagcggcgccggcgcccgcgccacccgcgggcgcgtttcggcgccgtacgcgacagcgacacgccctgcaggtaaccggcttataccaggccggcgcgcgccgccaaagctgttaagcggtaaaaattaagaaatatcttcttctaagctactcaagctagctaaactaaagcaaaggcaggcaaagactaattaatcacgacgagttagtaattaaccagcaatcttacatggactagaggcaaattaatttaaataagagtaaagacagcgtcacataccctttggtagtttggttacctcggaggactgtgacagctagggatgatcgatcgatcgacacatatgatactgacagcgaacgccggcgacgacaccgtctattgctagctatagctggtggtaataatatcaccatcttggttaactagtccaattattattactccctctgtctcataataagtgtagttttatactattcacattcaacgtttgaccgttcgttttatttaaaatatttttatgattagtatttttattgctattagatgataaaatataaatagtactttatatgtgactaaatattttcaatttttttataaatttttcaaataagacggacggtcaaacgttgggcgcagatatccacggctacacttattttgggacggaggtagtattaatctataatagtaactcaaaaccgacttgttaattaagaggagagtttcaatattgtgcgccacccaacacggtcgtggaaacggaagagtgttgagagaatcatgaaagcttgtattattctccataatatgatagttgaaaatgagagaggggggttaaaattcctattgatctgaatgtggaccctggagcatcggttgctcttcctcctgaagtaactactgggcacaatccatgctttgatcaggtgctgtgtaggaaaactgcaatacatgctcgtgcaccacattcccaactaaaaaaagatctagttgaacatatttggcaaaagtttagcaatacccgtcgtacttagttgtggtaggacattaagcatcttgttttcacattttcaattacaattgcaagcatcttaattcacttatcattttatttatttatttcagggacaatggaaaactttggtggtagctttttggtgctttctgctatggttttgggaggtatgtacatgtctacttgcactgtacagtccaaagaacaacataatcaaataagtcctttaatagtccttttgtttctacttaaaatagtagtactacttccttccagttgttttgccatccagattatatgctacaattgttctataatcatcagcctcctattttccatggaaataatgttgctttaatgacaggtagtgaagatgctcaatttggcaggctagcagcttgttttggctgcttgagaaagataatctagttataaagtaatttttagtaattcgctggtgtcatgtaagaacaattgtgttgttaccatctattggcagtatggatcgttgtaatggcctaatttcttttatcgaatgttgatgtatggatcattgcaacagactaagttattttgtcggtctatgaattagttatttgtcaatctgtgaatattctttcgatcaagtaacaatctgaatcactattgtactgtttagttcgaatgaattagttcgaatgaattaggaatattacaccattgttgttgataaatccgtctgctttgtgataaatcacatggtttatttttttattgattgaacatagtcttccgtctatggttgacatataagtggctactcaagtgatgtttacagttgatcctacataacttgaaagatacaattagagaattaaatgcagcttgctttgctagagacggcttagagcatgtactatcttattgtaaatgtcgtctgttaaaccatctatagatgatgtggaggatactaatagtaagatgtttactctattattacccttgccctaattagtagtagaacttaattaaccgtctttgtcagcgatcgattcgcacgtcgcgtcgcgggggcatgtggcccgcatgcggtgtgcggatagatgtgagtcgacgcccacgtcacccccgccccgcctgatgacccgcacgcagcgcaggctagctagagcttatccgtagtgcctgcctgcatcagtggcgacggcgagagagacagagatccaactgcgtgacttgtctcgtctcgtctcaccgccgctggagcgccaaaccgcggctctttgctctacgcatatgcgcccttttgtacggatatagatttcatcctggttgtttacatatcgtttaaatagttattaaaaaatcttaaaaaattgacaacatagattgatatgaaatatattactccacaaacatgcaagaccaaatttaacttctataagttgcaacaaaaataaaaaattaaactgtaaatagctatagtacatttgcatctatatttgttaattttattacaaattgtacaagtaaaattttagcttgcatgtttgtagagtgatatatttcatggtaacctatctttttatttttt

SEQ ID NO: 1494 - DNA, 13422 bp, Oryza sativa
ccccccccccccccggccgcgctgtggaatgaaagcatactgctcgactacctggtgaaatagctcttcaaatctacaagcaaaattacagacatgtgaatcaatgacaaattgtgcattatacttttacaaattgcaatgttttcacttatcatttgtcaaatactcaagaaatgttacacttttatgatgccaaagccttttctttcccctatctatccatttgtgctgaatcgtttcacttcaaaaaaatttgtgttgaatcgggctagttactttgctgccttgcccttgctaactcgttggtgttgctgcctgctcggcttagagctgggctgttgcgcgcaggcgcgcaaccgtgtaggccaggtggcactgcggcactaggagcatgcgagcaccgccgcgccggtctgcagtctgcagaggctcgccgcctagcctggacgccgcgcccacaccgtccacggctacactcaattcgacgcgattggggttttggaatggggaactttcgaccaatggccggcgttgtgggcggcgctgccggggtcgccgggggcggggagcagcggtggtggtgggcacgagtgcggcttcaagaacctgttcatcggggactccggcgtcggcaagagccgccgaccccgctccatcggccggagagagattagggagagagaggatagagagtatccacatgggcccaccattttttacttatttgtgtgtgaaactaacatgtgggtcccacgtattttatttttttccgatctaattgctacataagcaccacgtcaacgatacgttggacaaagacctggtcaaaaggagctatgtaggcgccatctcagccaaaaacgggtacaataccaccgagggactttatttaaacggtttcgttaggttgggggacccatcgtaccggttttgtgaataggggatgaaaatcggatttggcgacaaatagagggacccaaagtgaacttattcctcctttttattttcggaaggaataggtccattttgactcccttaactatagcttaaatctgattcatatccctaaaccgtaataccggatatcttgaccttaactgttaaaaccggtgcaatttgactcccttgatgattctagagagcagtttcgctgatgtgatgcttagacttgtctaacctgctaagtcattatgtagggcccacacatcagtgtcacagtctatcttttccattactttccctctcctttcagcacccaagatggcttcgtccacggtagaggtggccaaacgggcggcccggcccggcacggcacgggcacgggtccggcacggcccgtttcggcacggcctgttaggcacggctcatgaaacgggccgtgccgtcccgacccacgtgccgagccgccggcccaagcacggcccgtggatggccgggccgtgcccgtgccggcacggcatgcgtgtggcccgccgtgtcagttgtcacgcccggaaattcactagtaatttccgaactaatttgtgcataaaatcctcgtccaggaatcagccgaggtacacaaactgacaatttaatatacaaatccatcttaataataacgttacatacttacaaagaaaagaaaacaacagcggaattaacggtctagcgatggcttcagctccactcccacaggcagctcaactggggtataagccaaacgtcttctccttctggatcctttatcttcaactgaggtttgatgattattgcaagaatgagcatatgacatactcaacaagccacacagcaaatatgcaagtgcacaaggattccaaaggatggcataatataggctcatttgcaaaagcagcatttagcaaaacatttaagagaagtaaaacagtgaagtgattaatcatcaattttaatcaacactgaacagcacacccatgctgcacaggcccaaccatcctgaacaaccatacccggctgtacagatctaactccaaaccaggagctaagcaaattattaccagttatagcatccataattattgtgagaggtgtgagactaatcacgaaaaacattgctcaactcgcccataaccgcgggcacggctattcgaatagttttactctgatcagaggtgtaccactgtacccacaagacacgattccacacatgttgccatgccccgaaataccaccacggcattgcaaagggggaaatcgtgacaataccctttgcacaacacaactcaaaacagtgcaccgttcctggatcataatcacccccttataaacaaggcatggactccccagcgacccccacggacttctcgccgcttctcagtctggtgccccgtaatgaatcatgctatacaaaaggtaaagccgttgcccatgctggcttgtggttggcacggtaaatgtttcacaacagtagctcgcgaaccggtccttaattgtcatgagcacaaccatcaaaaccatatgctcacaacccaccttaaccagattttaagtatcaattaattaacatcacacgattaaccatcgtgagctaccattaaatataaccataattaataagaataatataatataatttatatttaatcccctttaattagctaatgtttctaagcatggctaagcaaacatacatataacatttagctgaaccaaaccaatatataaggttcatgctaatcaaattataacccataggaaaataagatcatcttcggccattaattaacggggaaaggttcaccacccgatgacattcaaaaataatgcatagttgaaataaaataatagctttaaacgggttcaacatgctcaaaggattgtgtttaggatctgtgtgacttgccttgcaataatcgatcttcaattaatcttcttgatcacttccgacgcactcacgaaccttcgcaacgacggaaacgacaagctaacacgcaaaacgaagaaaaaaaactaataaaaaccaaataaacaatacatataaagtaaacaaacatgtagatcatgattttagatgaattatgagacttgaacagccttattctgacttcaaatgaatttattatgaattttacaagattaaatctaattaaagcccatttaaaaagaattaaataaatttaattcaatttatggacaattttaatatgtagatctttattttagaaaaatttagcaactggaaccacctgaaacggatctacagttatttagttatgattttccgaagatttaatctattagaaaaaaaggaaaaaaggaaggatgatgatgtcatgctgacatcatccaaggcagccacaggtcggccgacgacctcgccggcgctatggaccttggccgggcgattggagggcacctacgcgtagaggacgacgaggcgaacccaacggtactcaccaaaacgacaaacgacgcacgacgacggccggcgacgaagaggacggcggcggcggctcggcttgacggcgacggcggagctccggtggccggcggcgaaggggaaggtgcggccgaggttctcctcaccacggcgcacctaacggcagcggcggcaagcggcggcgacggctagggcgacggcgcggcgcgactggagatcgccggcgacggctagcggctagggcaacgtggcggcagcgctacgggcgacgagggagctcgggacttggggcaaacggaagaggacgactaggggatgctatttatagcattggattgaagagatcgaactccaaacgagaggaatcgatccgagaaaatcaaaactcggtttttgagataaactcgaaaacgaatttgattcggataaaatacacaacgatttgctccaaatattgagggaaaagatagaggagaacgagaggataaaatcccctcaaaaacctggaggaatcggggtcggattgaggcgaatttgagaggggaaagaaggcggctaggactcggctcgggcacggcttcggccggaggttgaagaaaggcctgacatgtgggccccacatgtcagtgtcccacgagagagagagcggcggcgacagctgggccgacttgggccggcttgcccgcgggagagagagagtattaggccgaaatcggcccaataacctaaaggaggggtttttgaactttttcaattaaaataatttatgaaatgttgtttcatttattaaaaatactttccttgctcaaacaattcccagaaaaatctagaaaatagaggaacaagcaaagtatttaataaaattttatctaacccaattttatattgagatttagcaaattaaaattagatcttctcttttaagcttttaaaattgtttctaataattccttttaaacaacaatttataatttaaggatttttaaacaagaaaaactcttaacaattataattagatcatttaatgattaatttaatattcaaataattgctgaacttctctttgtatgattaaaattaataattgagctccgaaaaatccgagaaaattccagagagtataattaaccatggagaatttaataaaaattaaatccatccatgctttatatttaggaaattttatttcctacatttaacttcacttgtaaattattgaacatttaatataaattctattaataatttattaaataatttataaatcctgaaacggaattcaggctgtgacatcagtacgggcccgtgaatgaaaaatgggccgtggacggggcacggttggcccaggaaccgaaatggcgcggagggatgcgatgcggacttgcggaggtggctggcgggctgggccatcagctaggaggggtgctcaacggacttgcggaggcggctagcgggctgggccgtcagttgggagggatgagatacggacttgcggaaggatgagatgcggacttactacagtagccgtgccgtgccgtgccggcccgcgggctcggccggcggcccaagcacggcacggctactcgtgccgtgccggcacggcccgttactgtagcaggccgtgccgggccgtgccggctacaggttccgccgtgcctcgggccgcccgttttggcccggcccgtttggccacctctagtccacggtgacatctctatctctactactgcaattctgcatttctactagtaatatataaagtactagtttcatcaacaatcctgcaatctgatccactttatcgtgtgggacccaaagtgaacttattcctcctttttattttcggaaggaacaggtccattttgactcccttaactaaacaccgaaaaaaatagcacgtcgccaccgctccgccctccccacgccaccgctcgccctccccaagccgtgtctccgccgcccgcccgcctcaccagccacgtcgccgcgccgcccgcctcacccgccgcactcccctctcccctctcccctctcgtcgtcccactcaactcaccgcagtcccctctcccctctccctcgcgtcgcctgcctcccctcaccgctgcctcaggatctcctccgcgccgcctcctcgctcctgtaacgccgctgcgcgtgacctctcgccgaagatcgcgtactcctgccgctgccggcgctgcgaacatcctccgtaagctccatcacccctgtcatcctcgctggtcgccatgcccaattcaatcgcgtatccaatacaatccctaatttcacatcgcaccatgtcccatcgtcgttcccatcgccattccgctcctccgatgcagccgtcgacctccgcgccccggtcgccctcacttgcaacacccgcccctgctgttgttgccgctgtcactgtagacgtctttgctccctggtggcgtcgtcgagccctgacgccacccgcaacagacgacgccactggcaacacagctgccgtggccggcaacgtagctgctgctggaaccgctcgcttccttgagacgctcatcgagagagccgactgccggtgcggcacttcgacattatgctctaccacaacgctacagagtaccgatcaggttcagcacattattaggtttcctcgcgtttaacttcacacgtgcttctgttccttctggtgtttgttcccacaaaatgcatgtggcatggatgatgctggatggaatgctcaattgattattcgatacagtatcatttgttgcaatttttagatcttctaattaactagcgcaacatcaacagattctggttcctctttctttattttctgcttcccatttatatttatgtttgttaaaagaaattcagcactaaagtattaaatgttcacccaagttatgtcagggtgattacccaaattaacttaccatttgtctgtgatatcaggcttgttaacgacattgtctttgtgcaggaatgcccgtttattgaaaagctatggtatgttagctacattttaaacgaacaggatatgattatctgagctttgtccagctccagtatctgaagatgggatgttcagtttgtaatcatagaactcacgcgcaacaatcttgcagtggaatccaatgattcacaggttagaatgagagagggatggaattggaattgtcaaagatttctcatacacctatgtcgaagccctttcctctttccttctttctatttaacaagggaatgatcttgtcacagaatactgcaacggtttgatcagcgataagcaggtgataaatgttggtgattgacttatgcccaggttacccaccttgattttgtgcctaccttgaaacatgaagcctcgctatgattgttcaccattccagcttaccagctatattgaaatatcaatctattctgtaagttgcctttaccaattaattattactctttgttgataatgttcagtgccactgagcttgttcttgctttcaaatatggtgctgctctcatgaatattgataaggtcttccatctcttcatggtagttttgtatgtttgtgcaggtcttccagattacacatagttcattatgcttgggacataataatacagtagttgatataaatgtgcagaaaaaactgaaagaaatttcggactgcttaatattttgatgtgagtggatcactggtgcatattggagtgactgaacaatgattctcattggtaatgtttttctcctaccttctacttcattcggtttctcatattcctttcttacgaattatatacctccgtatttaaacgacgttttatatattttttctgtaaatattaaatgataattgctcattttcattttttttcgtggtagtacactatgagaattttccgaaatactatgtcctgctacatggttgctgaatacattcaagggcattgcactgtcttttgatgaagctccaaatcaaattcacatcttaatgcaatcaattatcaggtaatcatgtagttccttggcaagatcacattggtaggtaagttaaggtttgcaactgtggttgatgtcagcaggtcttgctatttttcttttaatttagtttcagtcctctaatgtttttatcttgcacctgtcacttgctaaaattttattcagtttatatccctttagaattttcaaacttaatgtgcctttcagttttttaggcagaaatactaagttgtatttatataacaaaatttgatggaaaccatcattatggtgatttcgcatagtgcactatgaacatgtcagcatgtgatttcaggaaagtcagttgatgtgttttcctcagagaaatattcctgttctcaagtctttcataccaacatgtagtggtcattctctcatttgagagaatccattatataccactgactttgtcacacgtctacgatttgccactgactttatcatgttctacaatatgccatcgacttttggatctataatcaaacagtacattttcatcgttacctgaagatcatctgttacagctattatcccccaacaataaagaacatgcggttgtttgcgatgctatgttaggtgcaattttttagtgtctttaattaaaaaagaatgagtttacgtgtgtactgtgttcatcacataaatggtttctcaaattaatatctgcacttggcctctttgcataccaaactttatatttctctataagtactccagtagtctacaaacttttgttatcttggattaacttattttgtttcgatatgcaagtcatataattaatcttcttgtagcagtgaaatggtccaaccccttcctcttttgatatgggttttcagctgctacttttcttctttttgcaggaattttatttgcaaattaagcactcaattcacttccctcaaattgattcacaaacttacacccgcgcttttaaatctgtgcagttcattcatctatgcaaacataaattatttaatgttataatttactactgttattctctgtcccatgttaaaccaaaaaccatgtctaccattgaagcaattactgtaacaagttcattttgccagctgaatctacccagccacttttgctgtagctccaaccaaaataaggtggctttatggtctctgtgtgccatacaacttttatatattaatttaaatttagttttacatggtctgaacttggccttgcattgcttaagaacttggttgacaacagtctgaaattggcgttgcattatatgccaacctgtgtagtgtaatgtattgtttctattcagaacataaacatgcatattttccctgtgaaccattgattatgtactgagttaattcctgacagccttttgaaacgtggagtgttttttttaggttttgttgttgtttgattgccaaatgtttataatttcagtacaaatttcctgggagcaaaaaattgccaatcacatctcatgttatgtgctcaaaagaaacaaaacaatagatgtctgaacgtgcctctcattttctttatttggagtcttattttctgccgtgctgatgacaaattctttatatatacctctcattttctgtatttggagtcttatcttgtccttgcaatatgtgtgaaaaatagatgtctgaacatctgccagattagtgtttgaacatttcttatattattttctgagcatttgacatattagtttatgacttgttcttatgatgtacgagtatctgaatttagaatctgaacttgggcaagcatctaaatgttgttcaatgttttagtttgctgtgagctaattaatgttatgaatttcttatagctcaagtattggaagtttacaaattcaccggtcgatgtaaggtttttctgggtttagtgtaaacaatatactcatattaccattcaaggttatctgaacgtgaatatgtaatgtatctgaattcagtgtgcggacatactcttgccatgtttcttaagtcagtgtatgaatatgctcttgcaagcactatttttccctgtatttttattgttaaaatatatattataaaaacgtgctatgcacgtgcactattactagttagagaagacgaccacaatccgtggcgacgacgttgtcgccgccggcgccgatgcggcatggacagagcagcgacattgaaatcttctctcctggagggaggaagtgcggcgacggtggcgcgaagtggtgctgcgatcgcaagtacgagcttgtcagctacgagcctacgacgcgctcccggccttcctcaagcacaacgagttcatcatcgactactaccgcagcgagtggcccatcaagcaggcgctcctcagcgccttagtcgtccacaacgagaccatcttccagacgtaattaagcactcgatcgatcaaaagcacgtatattagctaaagacgatactctaccagtagagaaactatcttttatcggtcgaccaaattccataatagttcttgttgcaataaaaaccaggactaaaaaacatctttagtcccgattcaaaaggttagagctacttttaatctttaatcctagttcaaaaaaggtaggcggtgtcagacccctcctttacctttaatcccggttggactaaagagctatttctagttccggttgttaaacaaccaggaaaaaaaagatccgcatgcgcggagaggatgaggcgtgcgcgcaacatcgaggaggaggaggaggcgcacgggataagttaataagttctatctcctcctccctcacctttatctcctctcctcactcaccccatctcttcctcttcctcctctggatccgcccccctcccctctcctccccacttctcaggaagcggaggcggcctcgcgcagtggcggcggcctcgtgtggaggaccgcgcccggtggcggcttgcgcggaaggccacgcggcggcaggcggtggaggctggcgcggctgcacggattttttttttcttttttctttctttgtgttgaatgattcgatctgtgttgtctgtgttgaatgtatgattcgatctgtgttgagaatgaactatgttgttatgaatgttgttgtgaatgatttgggaggaactatgttgttgtgaatgatttgggatgacctatgttgctgtgaatgatttgggataatggacgtgaggtatacaaaatagcaaaaaaaaaagagaaaaaaaactttactaccaaccgggactaaagatctttagtcccgggtatttgaaccgggacaacgatctttagtccggatttgtactactagttggaaaaccgggactagggtaccaatcgggagtacaaatcatttcttcaccagtaacagtacaggttgtgtgttttgattgacaagtgtgcttttctttttgctgtatcttggcaggcgatcggcttcttcatgttcatcgcgctcaccgtgtgcaccgccacgatggttccatggaatcctccatgtctgctagcttggtgacgtccaagacgatggccaacaactccgccaacccaatggtatttgatgatgatgattgatgagctacggcagcaccggggcggtcgcggcggtgcaggctctaagcaacgtgcccgtcgaatcagagctcgcggcggcggcgtgccaccaggtcgcgcattggccggagcggtagatgcaggggaagttcgacctcaccggccaaagccaccagctaatccacgttattgtcatcgccggagtggtctacttcagctggagggacagggcactgggcagacgagcacacggtgacggttccgacgagaggatggttggggggggggggactgttagtgatatgtcctagaggtaatcatagagatgattgtatcacatactatgtttacatatttatccgacattgttccttgaaatagataactccttattggttaatgaatatgtgattctttcatgagactctttatcttgtttgttactatttctaaaggatccctgatcaaatatcataagtggaacaaatatgtttatatgatcagcacatgtattaattgatgatcatgtctcatggatcatggtatagagatatcaaattaataatgtggacacatgttggtgaacatgttgttggatagacccaacatgagacattgcaagagccatatgtgttgtgtcatcagtgatctcatttagtgttggtgttgaatccttagacctgatattatcatggttctcaacatgtgtagtagtttacttagggaccgctaaacgctactccgtaaatgggtagctataaaagtagttttcgggtatgctataaaacatgtagtgggatatgaataatcaagatgggatttgcccctcctatggagagatatcaataggttcgagtgaatgattgagctattagaggatggtacatatctagccttgagcttaatcgatatcgtgaggcaaatggcttcatacaagtatacactagaggttcagccgatatgatctttatgtatgcccggtgggtcaatacgttctactaggggccgctgttgacgcgtggaccgaaaaggagttttcgggttacagccgagtatatatgaacctacagggtcgcacgcttaatgggccggaataaggggattggatagagatccaatatgagcttaattcggatagggatccaaataggagtcctacgggccttggaggcccgagtgatggatcctatatattcgcgaggggtgtgaccagcgaaggcattgcatcacgtgagaaaccctagccgtcacttccctccccgagcaaaaccctagccgcgcgcgggtgctagcacatctgcgcgtggcgttccgtccctgtacgtgtgtataccggtagaggcgccactggtttgcggtgctgatcggcgtgggagtacaacgaggagaacgcacgaggaggagaaggtcgagccggtgcgatcgactacttcctctacatcgacgcgcgctacttcgcgagagttccttcgacttctcagcgtcttcttccgctgcgcagcgcgtcgagtggtaacgatctatgatctaatacttgcatggttcctggtttacgcgatagaaaattttgatttatgctatcgtagcctacgcgtatcacaacagggacggtcgacggcttccgcgggctagtgcacgccaccctgccctgacgtgccgcccgtgtcgcctccgctgcgtgttgtgtaggcacgacgctgacgggattggaggcgacgcacgtccttcgccggatccgcaagtgcctggctactctcggttccaagctgcgccctccggctactgccacctgtcgcttgcccctgcatcaacacccatcccccagccccctctcggacgccgatggcaacctccgccgcccagtaccatcgtccttctgccgcctcgccgccgctagaggaaatatagaggagaggagcagaggaaacaaccacttacatacgggccccacagattgtttggttctaaggggattgaagaggattggagagaatagagagggaataattccacacacaataggtgtggaataaatcccctccaatccctccctcacggggattaactgaacaaggtatggggagtcaaattacaccggctttaatagctgagggatgaagatatatggtactgtggtaaagggatatgaaggtatagttgagggagtaaaagtggacttatatcccttttcggaatcgctataaatcttttgtttttttgggctgttgatctatcccgagatttgtgcgtagatagattgggaaaaaattaactgagatggcatgggctggggtatctatcgatcccgcgtcctctgcttctccactgaaccctcatcattattgggctaactagttttatagttagtacaccatgtagctatataagttagtgtaattataccgtaactacaatgtaactatattctaatttttatataacttagatataaagttgtatatatttttaatacttatatataagtatatatagg

SEQ ID NO: 1495 - DNA, 1698 bp, Oryza sativa
gaacaaattaataattcagtacggtgctgtatgaatttttatttaataatggatacttcatactgcatgcaagataacagagttctccacatagtacatatatagtcctcatcgatttgtgattccagcattgtcttaatatgcacgtacggtatatggccgaggcgccccatttccagtcgcagttctggaccaaataacaaataacaacaggtatgaactagttaattcactctaacttgatagtatatattaatgatcgcaaacgaagaacacatctgatttaacatgcatatccatcgacaaacagccattttatatatcacatgcgaaataatataattaagcggcccagcttgctgaattaattccaagcggaaaaaaatcgatcgacaaaccgatcgatcgattggtacgtgaaaatgcatgcctagctacatgcatgcatggatgagagtgagagagagagagagagagcgctgatcgagcaaagtagcgtcttggcaagcagtacaccagcacaccaccgatcgatctcttgatcacctgcaaaatgttcagaatagtagctagttagtgtcagagtaacggttcaactgaacaattgaacatgtatgaatgcgtgcatccactggtgcatgcagcagtctagctagtgagcataataatgtagtatgtatactactaccactagacatatacaggatgcagctgcatgctaatctgccgcattatcgagtccaccactacatggacaattggacatgggttaattagctttcaccatatattgatgaagtaattgaactagcacaccggtgctgtcagctgatggtcgatcgagattaagtaagggttaatttggttggcggcagcggtcgatgtcgtggggtcgtgcatgcagttatcacatccatccattgatcctaagtgcgccccaagtcacgtatcagcgccgcctgcggtctccctcctagtacacagatactcctcctctgtaaacaaaaaaaaataaaaaaaaatcgacttcttgcagggcggtcggttacttgacggcgttggctggctggctggctggctgccaccacctactcctagactcgtgttgtagtgtgtgtatatatacgtgccactgccccgtcgagcgagctcggaaagctgaaagctagctgagactgagtgccagtatcaagcagaaggaagctaatttaagagaagatcagagtgaaccatcgtcatcaatggcgccggccgctcatcgggatggcgcggcggaggcggtggggcagagggtgttccacttcggcaagggccggagcgacggcaacaagaccatgaaagacctggtgcgtgcatatatgtactacttcattcatcatgtactggtaatttgtatatgaacatatatatgtaaattgcatggataaaattggatgtgcagctgggagggaagggggcgaacttggcggagatggcgagcatcgggctgtcggtgccgccggggttcacggtgtcgacggaggcgtgccagcagtaccaggcgcagaaagcgatgccggcggggctgtgggacgagatcctggcggcgctcacctgggtggagggcaacatgggcgccgtcctcggcgacccgcgccgcccgctcctcctctccgtccgctccggcgccgccgtctccatgcccggcatgatggacac

SEQ ID NO: 1496 - DNA, 3348 bp, Oryza sativa
aatatttgtagaagttgagaactctgtttttagagggaaacaaatataaaaagagtacgcccagtatttgtgggccaaaactaggtgatagccggcccagcccatcctggcccattaatttattgccttgtccagttctcctcccttctccagttgttcttgttcccttctccttttgctcggaaaatttccttctcattttctcttcatgtccgatttttttcgcggcctctcgattgccacaactccggcgagcgagccggccgcctggcgcgacctccttggctgtgtcaccggaggggcaatgtgtcgctctggaggaggaggggcggtcggggcagcagcaccttgtccatgggggtggcatccccggacatggcgaaccgcgtgcgctgaaccggcgtacggcggcggcgcgacgcatttggggccacgcccgaggtccttctgttctttcttagccagatctttctactgctgtaattctacatttctattttgggggtttgatttaattttcatgttggaaaactatgaaaaactggcataaataaataatctagtttagtttagttttcgataatgaaacattctgtacaatttgtgagttacttcgtatgctcgctaatatgaatattgataaaatttgtttcgcaattttattttgtaccaaattcaatattttgatactaaaaggttatcttattaggttatggacataccgcattcactatttgaggagaaaattgaagccatgaaagcagctttaggtttgaggaatgacaccgagttgactgccagggatttgaaagaacttgttgctcaatataagaatgtttatgtggaggccaaaggtgaagaatttccctcaggtacgtatattcatatatatacacaatcaaagttaaattttatcatccgttttatttggtgatgcttgtatcttgaaagcagatgtatctgattttctttttcttctaaataaatgtagatccaaagaagcagctgcatttatctgtgttggctgttttcaactcatgggacagcgcaagggcaaagaagtacagaagcattaaccagatcactgggttaaagggtactgctgtgaatgttcagtgcatggtctttggcaacatgggtgacacttcaggcactggtgttctctttactaggaaccctagtactggagagagaaaactttatggtgaattccttgtcaatgctcaggtacaaatatacagggtaactggtccgaccccttctctgttttgcttattccttgacccctatttctagcaaacattcagtttccaaaaaaaaaaaattctggcaaacactgaagtaacaagatgggttaatcagctatcacatgatcttttcatatttatgttgttacttttagtctgattcgtcatggttactgtaaaatagggagcacatattttagattttatcctttagaatcaaaggttgcaaaaggcaaaaatgtttcgactgaatcatcttatgtatttgctgggttgatagataaatggattatgagcaattaacacaaattatttctcttgtagggtgaggatgtggttgctggaatcagaactccacaagatcttgataccatgaaggattgcatgccagagccttatgcagaactagttgagaattgcaaaatcttggaaagccactacaaagaaatgatggtacagtacatgagaatacatagttcctcttcttggccatcgtatcctagtatcttttgtatgattagagcagaatcaaaataccatgtttttaaaagttatctataatgatggatagatttgattacaaatagtttttaaaataaaaatttaattacagggagttgcctgttgtcagaactgttttcaaaattacaatgaacttattggcaatgtaactaggaagactacagaattacaacgaacttatcagaactgttttctgtgctttccatgaaacaagattggttttcatgtgactgatattatagacaagcatttttataatgagttcactgtttctcttgtaactgatttttgcttgtgctcaaattaacttattttttcatgtcatgcaggatattgagttcactgttcaagaaaatagactttggatgctgcaatgcagaacagggaagcgcacaggcaaaggtgctgtgaagattgctgtagacatggtcaatgagggactgattgaccggcgttcagcaattaagatggtggaaccacggcacttggaccagcttcttcatccccaggtacaattaactatgcaacacttgtcttatctgttgcattgcaaactttgtacactgctattttcttgagggcactctgttgccaagctttatttcagatcccatcaacaagatcgaataggactttgcaaaaagtggtggtttatattttggatgatagatcataacctattattgaatgaatgtgtaacttgttagtctatcggtatatcatgttttcatgtccctaactagaaacttgacatagcacgtgctgttgtttttttgtttcacaaacatgaagcatgtagcgagtgtatgtttatatgttttcctctaaaccaatatgagcctgaaggttgttgcatagtacttttgttacgcttcggtacgatttgtaacgacaatcaaactgatggctatctaatctgtactctttgctctgcccttgttaaactagtttgagagcccgtcgtcatatggagacaaagttattgctacaggcttgcctgcatcaccaggagctgctgtaggccagattgtcttcacagctgacgatgctgaagcatggcatgcacaaggaaaatctgtcattctggtactcacctttgatattgaatttatctccagtctaactctctatagctcaatttggaagctataagatcaacatattctcctgtcctgatcataatataacattctcctgtgtaaaaattaaggtgaggacgggcatcgggctgtcggtgccgccggggttcacggtgtcgacggaggcgtgccagcagtggacccatgtggaccacacgtcatcctcactaacctcttctctctatcctctctctccctcttctctctctccagccgacggagcggggtgggcggcggccggagcgggcgatggcggggcggagccgaggagcgaagcggcgcgccggccggcgggggagaagtcgcggcgcggcggtggccggaggggcgtggggcgccgaccgttgggagcagaggagccgcccgtggcccgcggccgtctgcgggtgcgtgccggcgtccaccttgatgttggcgttgccgttggcggggctgcagga

SEQ ID NO: 1497 - DNA, 5663 bp, Oryza sativa
tgatgatttggaagaaattgatataggtccaggtgatcgactgaggccgacatttattagtacgaatttagaaccaagttgatagagctgttgaaagaattcagagattgcttcgcttgggagtattatgaaatgcctggactcagctgatcgattgttgaacatcgtctacccatcaaaccaggggttaggccacaccaacaaccaccgagaagatgtaaagccgatacgcttgaacctgtcaaggctgagatcaaacgattgtatgatgctagttttattcgtccttgccgatatgatgaatgggtttctagtatagttcctgttatcaagaaaaacggcaaggtcagggtgtgcattgatttccgaaacttgaataaagctaccccgaaggacgagtacccaatgccggtagccgatcagctggttgatgctgcgtcagggcacaaggttttttagttttatggatggaaatgcaggatacaatcagatctttatggctgaagaagatatccataagatagcttttaggtgtcctggtgcaatcggcttgtttgaatgggttgtgatgactttcggcttaaagagtgctggggctacatatcaaagagacatgaattatatatatcatgatctaatcgactggttggttgaagtctacattggtgatgtggttgttaaatctaaagagatagaggaccacatagccgatttgagaaagatttttgagagaaccaggaaatatggcctaaagatgaacccgacaaagtgtgctttcggtgtatcggctggccagtttttgggatttcttgttcacgagaggggaatcgaggtaactcaaaggagtgttaatgcaatcaagaagattcagcctccggagagcaagacagaattgcaagagattatcggcaagataaattttgttagaaggtttatttctaatttgtctggaagattagagccttttacaccattgttgagattgaaagccgatcaacagtttacttggggggcagagcaacagaaagcgttggactgtcacaccctaaaaatcctaaatatataaatttttgtttaattggaattattagaaatgattttaaaagccttgaaaagaagatctagttttaattaataaattccaatataaaatcgggccagataaaatttcattaaatactttgcttaactctataattcctagatttttctaggatttatttgagctaaggaagtatttttaataaatggaattgcatttaatgaataatttaaattgaaaaaggtttttaaaagtctcttttgcctttgggccgaaagtcggcccaaaaccttctctctctctccccggcccaagccggcctagtccgcagccgagccgtccgctggcgcgcgcgcgtccgcccgctgacaggtggggcccacctgtcaggcctgtcgtctacctccggccagccgccgcccgaaccctagccgagccgtgccgccgtctctttccaaattcggccgcgcctttccttctccggtgaaatcaattgaggggaaatgtttcccgagatctcctctaccttttctcttttggaatcgtcggctaatttcgtttggaaatccgtggattcgagttcgattcggatcgatccctctcctccgaaccctaaactttccttcgcgtcgccggtcgccgtgggccttcgccgccacctccttgcccctttaaaaggacccccaagcccgccgctacccgccgccacccttgctttcgcctctcgccgtcggtagcgccctagcaccgtgtagcctcgcgccgccgtcgtcgccgccgctccagccgtgcgtcgccgtcgctcgggaaggccgccgtagtggtcaccgtcgcgtcgccgtcctcgtccgcccctccatcgtttctgtagaccgccggagcaccgccgtcgtcgtcaagccgatcttctccgccgccttttcctcgacgccgtcgccgtccgttgatcttccgccgccgttttggtcaccggtgagttcgccgcgtcgctccctacgtgctggtgccctccgttcgtgccgtcgcgccgtcgttcgccgacgagcttgcgcgcccgagccgccgacggtggtgacgtcaccgctgacgttatcgtcgtcgtctctcgtggtccggccgtggaccggtcgatctcggccgtccgttttggatggaaagatctcggccgttcgtttctgtgagccgccgccgtgcacccggtccaccgcaaaccctagccgctgacgcaataaacccctttttccttttcaaaaataattcattattgtgtcataattcaattaaaacccatataattgatttaatccgatttaatctttgaaaattcataaataattcatcttagctcggatttagttggttcaagtctctaaatttttctaaaattgagatctacatgttaaaaatatccacatgtactattcatgcttgtttatgtgctgttttggtgtttttgctcttttctgtttagattccgacgtttccggagagtccgttttcgcaggagaagaatttgaggagttccaaggccagcaaggcaagtcacacagatcctaaatacaatcctttgagcatgttggtcctatatttaaattctctatttatttcaactgtgcatttattttcgaatgtcactgggtggtgtgaatctattcctttgttatggcctgtttgcattgattactttaatccttgataccttgggttattataactttactagttgagctttatatattggttcagctagatattagatatgattgcttagccatgcttagaaacattagcacactattgggataacttatgactcactattatttaatgatggcttaatgatagttcacgatggtcaatcgtgattggttaattaattacttgtcaactaaaacttgataatggtgggttagtgagcacatggttttgaagagtcagtgctcatgacaattaaggtccggttcacgagttttggttgtgaaacattaaccgtgccaaccacaagccagcgtgggcaacggctttaccttttgtatagcatggttcattgcggagcaccagactgagaagtggcggagataagcccacgagggtcgctggggagtccatgccttgttcataagggggtgattatgatccaggaaaggtgcgctgtggtggattgtgttgtgcgagaggtactgtcacagctcctttccgaggtaccgtggtggtattgaggcacatggtgacatgttgtggggctgtgtcttgtgggtacagtggtacacctctggccagagtaaaactattcgaatagccgtgcctgcggttaagggcgggtctaacaatgtctttcgtgattagtctcacacttctcatcataataaaagatgctataactggtaataatttgattagctcctggtttggaatggtatattcctggtttggagatagaactgtgcagccgggatggttgttcagaatggttgggcctatgcaacagggtatgttgtatagcgttggattaatattgtttaattattacttaactgttttattaaattctgaaatgtttattaaatgttgtttatgcaaatgaaaccctactatgccatcctttgttatcctatgcacttgcatatttgttgcgtggcttgctgagtatgtcatatactcaccttgcaatcattcatcagaggaggagttctacagtgatgctgatggtgtggaggattaggtgtagccctggtcaagctgcctgtggagtggagtcgtctgcgccgtttatcttatttttttccgctgcttagatttttattgaatgagaggaactatctacctctgtaatgacattttattcgcttattaattagagtaataattgtactctattatcaatttgttattgtgtgcctcggctgattcctggacgagggttcacacacatgtaagcgtttggaattttggatagaaattccgggcgtgacaccattgttgagattagaaatttgtctggaagattagagccttttacaccattgttgagattgaaagccgatcaacagtttacttggggggcagagcaacagaaagcgttggacgatattaaggaatatcgtagctctcctccagttttgattcctccatagaaggggataccttttcagctatatctgtcagccggtaagaagtcaatcggttcgatcttgattcaggagcttgaagggaaagagagagttgtgttttatctaagtcattggctcttggatgcagaaactagatattcccccgtggagaagttatgcttgtgcttatatttttcatgtacaaggttaaggcattatctattgtccaatgaatgcactgtcatatgcaaggccgatgttgttaaatacatgttatcggctccaattttgaaaggaagggttggaaagtggatattttccttaactgagtttgatcttcagtatggatcgccgaaggcgattaaaggacaagctatagccgattttactgtagaacatcgtgatgattcaatcggctcggttgagattatgccatggactttattatttgatggatcagtatacactcatggttgtggcatcggcttggttataatttcccctcggggggcatgttttgagtttgcttatactattaaaccttatgcaaccaacaatcagctgagtatgaggcagttcttaaagggttgcagttattcaaggaagttgaagccgatgctattgaaattatgggggattctttgctagtgatcagtcaattgacacgagaatatgagtgcaagaatgatacattaatggtttataatgagaagtactgagagttgatgaaggagtttcggctagtaactctgaggcatgtatctcgagaacaaaatattgaagctaatgatttggcccaaggggcatcggggtataagccgatgatcaaagatatcagggttaaggttgctgcattaacagccgatgattggaggtatgatgtacatcaatatttacaaaatacatctcagtcggcttctcggaaattgagatataaagcgttgaagtatactttattggatgatgagctctattatcggacgattgatggaatgttgcttaagtgtttgagtgccgatcaggctaaagttgcgatcggcgaagttcatgaagggatttgtggtactcatcaatcggctcataaaatgaagtggttgcttcggcgtgcagggtatttttggccgacaatgctggaagattgtttcaggtattacaaaggatgtcaagattctcagaaatttggagcaattcagcgagcaccagcgtcggctatgaatcctttcattaaaccatggccattcagaggttggggaattgatatgatcgacatgattaatccaccatcgagtaaaggacataagtttatattggtggcgactgattatttcaccaaatgggtagaggcgattcatttgaataaggttgattctggggatgcgatacggtttgttcaagagcatataatctaccgatttggtattcctcaaaccattacaactgatcagggttcaattttcgtgcccgatgagtttgttcaatttgctgatagtatgggaatcaaactgttaaat

SEQ ID NO: 1498 - DNA, 1260 bp, Oryza sativa
aaagaggagaggtatgactttaatatcaccaaggctgacaaaatttttgacttgctactccgagaaaagcagattcaacttcctaccggtcatacaattccatcggctgaagaaattgggcaagaaaaggtattgcaagtggcataattctgtgtctcatactactaatgattgcaaggtcttcaggtagcagatccaagcagctattgaaggaggcaaaatcatgtttgatgattctaagaggccgatgaaagttgatggcaatccttttcctatcaatatggtgcatacaactagccgaatagccgatgggggtcgtgcaagaggttttcaggcaaattcggctaagattatcaacaaatatcagaggaagtatgataaacagcaggtgaagtattatgaagaagatgatgatggctttgatccttgttggggttgcgagttctttagattttgttggaatgaaggtatgaggctgccatctattaaggactgtcctgggtacagtgatactgcggagagctcaagccgatcatatagtaggggcaatcggctaaggcagacaagggttcctgttcatcaaagattgggtccagtaaaccaagatcgtagccgggaggacaacgaaacaagaaaactcaatggtgtccttctagtatctttacaaagaatcagaagagaagggttcaaagattgaggaacagggagcgctttcaggaggtcgagtaggaaatcaatcattggctaaagaagacaaagccgaagcaggagtgacgtgttaagaatcaagttcttgtagacgatgaagccacagccgatgaagcaagaagattggctaaaggaaaaagtgttgtaactgcttcagtcaatatggttttcacgttgcctgccgagtttgggatcaatcaagccgatgacgatgaagttgaagaagaatcagccaaattaattttatcgccagagcaggcagttttcgagaagccagaggatacggagaatcggcatcttaagccattctatataaatggttatgttaatgggaagccgatgtccaaaatgatggtcgatggtgcagtaaacttgatgccttacactatgttcaggaagctgggtaggaacgccgaagatctcatcaagacaaacatggtgctcaaggactttggcggcaatccatcggaaaccgaaggagttttgaatgtggagctgacagtcggcaacaaaaccatccctacaacgttctttatcatcgatgggaagggt

SEQ ID NO: 1499 - DNA, 1291 bp, Oryza sativa
actctgtattaatagaaatatcttttctgagtaactaagatttacattgtgagaatatttcttagttaggtcctatagcatattggatgattattcactattgctcacttataaatagtgattactttggtgagttactattggtatttcttaacgtcacagataaaatccgaagcgcacggaagataccgatgtagcacttcacccaagagtattacaaggtattgatttccatagggaacatgtgtgttcagctcctcttcaggttcatccaaggacacgaagcaaatataggcaaaagggtagagaggatttcctattgagaaacaatgtctacggaaagctcagtttaaccctaacgcgatacttcaggcactagtcagcccgctctcccagatgtccttctaatgcgtacccggacaaggaagacttcagtgtaattgagggctgtcaccacctttacacccaccttaaacctcctgagcaatcaccggaaattaattacccagacaccaatatcagggttatagataccacatacccaatagtaatcgactaagctcgtcagggcccaccacataccatgtcttatacggaaacaaacctcgtatatagaaggagttccggataaggaaggactaatagagttatacatggaaacgacaaggactagtcagatcgtatccatatttatctccctagttctacttggacaagggggcacctatagctataaatacaagcccccctaggaggagaggggacgagccacaaagccacaaagccacaagccaatacaaactaatacaccgccaaaaatcgacatcagagattagcatagacataccccatccagtacctacggaggccggcaagagggatttagtgccatctctgatctcgttgagtacggattcaaggaggaagactaccctgtcgtcgactacgagttgattatttagccgccaagtcgacgacagctagataggttatcccaaatattgtacttgtgtgatcctgatgaataaagagcaacaccggcttcggccaacaggatgtagggctattacctgttagataaggggcccgaacttgtataaaaatctctatctccatctcttttacctcaatctcgcatataccctagtatcaaaaatccccatactatgcaaaataccgtagtcgtgatctcagacgtcgacagtggcacgccagagtaggggaattttggtgactttaaagtttttgaagagatgggttaaaaagatggattctccaacaacaagctact

SEQ ID NO: 1500 - DNA, 605 bp, Oryza sativa
cgttgggaaagtactttgcttttcatatgagcaataatttttctttctggaaacgaagtgaccaagtgaaatttctcgcttgagtaaggtcaaagtaaatcctcgatggtagcttttataacataaatagaaaaaagtagaaaccattaatatattatagttggcatatttgaaaaatacatctgtgtaatacccaatattcatattttctatgcataataccatctttccctaagatatctgggttcggatgcctatgttgtacagtgccttacctttttcttaagaaaacacttcatatgtaattgttatttatgtgatcgcttgtgttgaagggggacattccttctgattgtgcaacatttggtgaatcggatgtgcttgtgcaagctttgcatgagaaggtacatttccattgctttccttttcttttgattctcctgtgcccactcatgaattgtgatatgagttaacttttgtcaattttttttatagatctgatagtgctctttggattgaataaccttacgttatgtggatatctattacgtacagatggaagcacttatgctcttctcacaagaacaagaaagatacctattgga

SEQ ID NO: 1501 - DNA, 2158 bp, Oryza sativa
caaaattacatctattagattcatattataaaatattggctggtgattaaactttttaatcacattaaaaataaataatattcaatagaacaattgttggttaaactctttatcttaaaaagtatatcttatattttgaatcagagagactgaaaaaggacggggcgatggatgatggatccatatgagtttgacaattatgcataaataaatgcgttaaatattagaatactgagaagtctagaaaatactgatgaatgatttttttaaaaaaaaatcataccgcttagaaccttgaatttttttttgttttctgaaaggaccataattaaaaaaaaatccagtgctaaacggttggctcacgaggcccttcacaagataataaataaagggtgtagctatatttatggcgccatatttttcaccaaaaaatagtcggcatgtatttacattgtaacttcctaaattacatatgtaattttaatgtatttataatgtataaatctcgaaattacatatgtaaattccaaaattacatatgtaaatattaaaattacatatataaatagagtgtaattttacatgtagatagcaaaggtcgatcggataaatcacagcaagcagcacaggtgcatgtgtatgtagtacgaactagtgcttgcacgcacgatggcaaattaaacagtcctgcacgaatctaaacgaaactttgagggctaacaaactgactgtaattagaaactttgagggctaacaaactgactgtaattagagggatgcaacattacatggactcatggagaggtagcgcacgataatccgtatttcatcaactttagtagttctattattacaggacagctgtgattactccaatcaattgacgtatatacaccaaacgttaatccctttcaggactaaattattgattgcactacaacactctttgcaaatttagttcctacgagttcggacatttgtttccaaatttagttcctacgagttcggacatttggaaacaatttaatggacatgctttttctgtattctaattctacagtatccacatgaaaaagtatgactgtaaactcactccgtgccgcttccagatactcagcttgccatcaatgggcgtgcagtacatctttctcacctaacaaatacacaaactatatagttctcccttttggcatcaaattatatccttagaatctaaacaaaatgtagcgaagtaaacggtgttcacacctatttgttattcaatataaagctatccttgaggatatcagcagctaatattagtagctccaccatttccatgcccgcagagctgagggggtcttgtttctctgacttcgatgatttaggtgattcagatggatcatagagagcatcactagtaatagcatctgatgaatcccctaaccagcttacggggagagctacaccaagagctgtcttcataaggtttgcttcggttatgagactgttcaacgcttcatacgtactctctaaagagtgagccgatttgacatcctcaaaggcctgaaaaaaaaaagattattacagtctgcaggtaaagtttttgcaccacattattgcttaagctagcagtctagcacggcagcagaaatagtgtctcataagccgaatgaaatgcaagttcagaaataatatctactaactaatgtttatttgttgatcataggaaatcttgcaactgcaaaaatcctcaacattcaagaattaaaaggattgcatttcagaatttcagatcgaatggaaccttgctttcccatcaagcttttttgattctttttgtcccattgaatatgcaaatattgtttggaacaaattacccaaagttcatccaagtatcatgcattgcccacatatctttccaacattttgcatctttctagtaagctgcatctatcagggaaaagagtttaccttcataagcacaatatgcagtcatgcactgacgaagtgaggtgttccatagtggcaacactttccaaaagagcagcattttcagctttaaccctgtaagcagcaccaaacaaagcagacagcacaagtcaacggctgaagagtggcatacaaaaaataaacatttctgtcaatgtttctcttgagtgatttccttactttgagt

SEQ ID NO: 1502 - DNA, 623 bp, Oryza sativa
atttgacatttttaaattgttcgggaggagtttgtttacacacatttgtataaatattgtacttgcaggtggtactggttgccgacaaggtgctttgtgagggtgaatggttgtcactgaatggttcgactggagaggtcattttgggcaagctgcctctatccccaccagcacttagtggtgatttgggagaattcatgtcttgggtggatgaagttaagaaactcaaggtaaaaatgtcccaacgaattattagaaaacaagttacatgagccaagattttcatgcttcctaagcagttcaaatctgactaaacgcatgtagttattcatcaattatattgttcttattttcatgtatgcctgatgttccaggtcaaggctaatgctgatactcctgcggatgcactgactgcaagaaataacggtgcggaagggattgggttgtgcagaacagaacacatggttggtacactgctttatcttattattcaaggcatcttgatggattaattctgacagctgtctctgctacatttgttctttagttcttctcttctgatgaaaggataaaggccatgagacagatgataatggcggaaacaattgaacacaggcagatag

SEQ ID NO: 1503 - DNA, 12079 bp, Oryza sativa
atgtggtggtctagtcaacaaacaaaaaaatacaaaaaaaaaatacaggttcacatgtcagagcctattaacctattcttctacctccatctcttatcccctttctctccttttctctctccatccttcttccatcctccacacctgagctcgatccgcgaggagagcggcggtggcggccttcccgagctccccaaggagagagacattaacacgggcctcagctcaaccgcaacaccagtggcctccccgagctccccgaggtcaacaggtgaggtcgaactcaagctcccttctcgccgcctaagtcaagctctgtcgcccctcgactggcggcgtcggcggcggagcacggggctttcggcattgtcattggcggagatgccgacgggccatgagaaaaagggaggagggccgaccggcgaccgtagcccccagatattgcgcggccgctcgacccgtcaaatccaacgccgtcactcgcctcagcttctccaccgcgcttccgcatgcgcctcgcacgtcggtatggacatcgatgccgatgcaagcaccctcaatgccaacgccgctcgggcctagcctacgccgtcagcttgtcgaccgcaacacctacaatggttatgccagttctgtgccaccaaatgccgtggaggatggccgatctatagtgggagagaacttggcaggagtggagggaggaaggcctaggacgaagagagggagcttgccggttgctttcgcctctcagcgagattatccaaagaggaagggagaagaagaagaatatatggactgactggtgggactccatgctgatgtagtgttcaactgtatcaaaactagtgtaataccgcttaggggggtaaaatatctggtattgatagttaaagggtgtattatacccggttttgtagttatggggtgtattttggacaaacataagagttcgagggtgcaaattggactttcccttcctaaaatatagctacctttctaattcaataatatattgagtaacaaaggtagctatactttgggatggagggcataacaatatatactaagtagacccttatcagcaaagggctaaatgggcctcgattatgatggttgatatgcttaaacaacaattattaatcacaacaagcagaataatataacaagagcttatagtttcctctatccatgccattgtgcaaccaccaattgtcaacatggccactctttgggtccaaggccatataatatatgcatttcacatatccatattatgagactcaaaaatagaatgggtgtcttttaaaaaagttcctttcaaaacaaccaaagcgaatacacatggcaataaaatttcaacatagcaaaacatactccctccaatcccaaatagcaagatatcgaaagcttaactcaataaaatatactcacttcattctcgaatagataagacgctttagaatgtgtggtcaaacatcaaaatctgaagtcaccagtatatcaaaagatatattcttattgaaaaaatattggcaattcatgtgttaaaatcacattagtagatccatatttcatatagttatatttttcaaaaatatatggtataaaagcagctgtagaacttgtgcgtcgaagaatgtcaatgcccaaaagggcaaagaaaagaacaaagagggctttgtaaggccaaatttctcctttccaccaagaaaaaaggcccatagtatccaaataaatgtaaaaaaattgtacaaatatcgagaatcgatccttggttgctgggttcaaatttcaaagctacatctagattagtgggaaattgtgcatagtaggaacgttaggcatacatgtgcattgtgtagtttcccctcactatgctgctccctacgaatacatcaatctacattctacaatactatttttcggtgtttccgacatgaattgttcgtttcctatcaataccgtcatgtttcctctcctatagttcctcttctgatattctgatagttccgataacgttttaatttctgctctacagattctggttccctgacggttttcacccctaatgttgactaatcactgaagtgaaaaacattgctaacactgcaccttcactagtcaccgatgaaaattagatttacaaaaaactgaatcataattactaaatgttgtgtagttttgactctgctagcatcatgactttaactggtgacaaggtatctcatatttattgtcaatagctaatacaggactaaaaatttgtatcaggcatgatccagtacatgctcaaaaccactcaaagaacacactgaaggctgagtaattaccccattgttttcgccaaggtgtttcccgttggagagttggttactgtcctcctgctctgctttcactttctttggtcttccccgcttcttccctgtattacttctgttgggttcattaagagaatccacaacttgattatccgatttttcagcaccatcatcattctgctcgtcgtgctattagcaaaatagcaatcagtcaattgaagcttcaagtcaacccaaaaaaaagacgcaccagacatcggtacaacgtaaaagaaacactgatacagcgatggtaacgacgacgaattcgggatgaaattagaagatttcagatctcgcaactattggagtgcaacaaaaatacgtggagaaattgcacgaatttagctcgccaagccattaattaattagtcaagcaatgctcaatttgtcacaaaaaccgcaactttccttattatcttggtacataaattgcctaataattttatcgcgcaccggtaggatagatagtcccatcctcaaatcaacagaaaatcttatgagtatatacccgatttttttactccaaaccaacccagtctcgcgccgaagagcgtacccgactttacgggctcctgctgctttcccccaaattttttttaaaaagaaaaaagaaaaaaaaagcggaggatgccaaaaggaaaaaaaaacgacagcgggaataacaaacagtagaggagcatacaaagatctaacttattatgcgtgcaaattcacaagatacagttcaatcgcagaaaaaaaacagaatgcagagaacggagagagaaacagattaaaagaaaggaacaaacggagagaggaatgaaagagccaaagaacaaaaaaggggatgattcccccacctcatcgtcgccgccgccatcatcgtcattatcagctccgctctcgcggtaggcaccaggcgccggcctcctctccctcagcgcccttccccccgccgccgccgccgccgccgggacgaccccgcgccgccgccgcggcccttggtctccgggccccgccgccggcgacgcgagggagcggccgcccctccccctgcccctgcccctgccccgtcgtcccctcggcctgcccctcccacgcttcgggtgcttgccgtctaccgcctcctccatctccatgcgagtcgagagcccgtgcacgcaggcagcaaggctagggcggaagctggtgttgagtcgtgcgtgcgaggggagaggggaggggattttttttttttgtttggtttggattttgaataggggacctcaggcggatcgaatggaaaggcgcccaatttaatgaggcgtcggcgctgggtccagtgagcgcggaagtcgaaccggtcgtcggaacaggaggtaggggcaaaatcgggcgggttatggtaatttgtatatctaacatagggcatgtttactttgttacaaaaaaaaattaccagattttggcattggttaccaaaattttggcaacttgccaaaattttggaattttggcatgatttcttatatagttaccaaaatttagcagcaaactaaatgtagccacttttttggcaactttaccaaaatttggtaaggttgaaaatggtatcaaagtgaacaggcccatagttcccaaattgatcatcatataatagaatttaaaatttcttaaattgatcatcatataaccgcatggatatggaattcatcataatacatgtaatgcgtaatgcagtatgggagaatatgtgcatgctaagatgtaattggtatgatgttttaatcgatgcatgcactatgggagaatatgtgcatggtatgttgattgatgtgatttaaattattcttggtcttggtgcataaacttatatgatcaatttaggaagaagggagtatatattttcccatcaaattcaaaaccgatataaataatccctgatataatcaaaaccgataaaaataatccccgataacatatcactgatcccactttttttcttactagaatcgaacgaatatctatttatgccatactaaatctaaggagtaaattagtgttaaaaacagagaaaaaaatttgtgtaatattacctatgagcttgcactaataagatagttgctgactgatggtggattcataatacatttttatatatatttgataatactagcaaaatgtccatgcgttgtaatgtcgtgttggataaagtttaactgaacgattttctaagcagtctagtatgacaaaaaataatcacaaaggttttctttttatttgaacaattattccacgtgtccgtgtatggtatgaactatattcctaacgcgtatcataatgattgtatcataggagcaacaaacggtgaaggccttcgatcactttcatgcaagagtagatggacgaaaatgtgtgattaacaaacaaaaatatgtatttaaaataaggtaagtttaataatcaggacggataaaaatacttttacatatttactcaatatttactcatagtcttataggggtgatgtgtgctttctcaatctatcaactctcatattgcaagcgtgcgatctcgttttcaaaatcataagtggacttgtgtggagactaatcgtgacacgtggatgatatatatagcgcgtagaccctaatatgtcatgtctcgtgaaaatttttatctaaaacaaatattagagtgaaagtttcggtgattacgatgtcaacaattgaaaaaaactaaaaaaaaatatcactcgtctatgaagtatgtacgtgtaccttaacaattattttttagcagaaatcaattcgatggattagcaaaatctagaaaattaactgcaattaacaagtctactataattgtagttttttttaaaaaaaatatgggttgcctagtcagatagggttatatctctcgctatacattacgattgaaaaaggttaatgaaaattctaacattgggatcactgtacaccataattaaaaagttaattaaaattttttattggttttagaccaaaagcccattcattctttcttttttagccctaggctagtctgctacctccttacactcggtctgcctccattcggcccattccacaagtggagcgacagcccaagctcatagccgactccgtcttcaacctccgaagataggatcgtgcccatacgatgccagagcagatcttccccatcaaatccggacgaattttcttgatatctcaaaattgatcgagagcttttgatccacttgttcccttctttatgttttttttctaaaatcagagcgtaaaactcgagataaaaaggaacgggaaaatcaccgatcggttatcaacggagattaaatctggcgaattaaagccaaatcaaaaggaaaatcatgaagaaaatgataacggaggaggaaatgcacgatcgatatggctgcggcactgagctaggattcaacccgagcggcggcgggaggcgcacagtgcaaaaaatagttcggatttgaaaatgaaaacaacaacaaaataaaccggatggaaaaaaaacaatggaccaaaataaacaggaagcttttttattaggtatatatatagatatagattttctgagtgatcaagtaatcgatcataattttccaacaattttaaattgctcaaaataatgccaaagaaaattctacaaatgactaaatgaattaaatcggcggaattaaataaaatcttattttggcccattacttccctaaccggcccaaaaaatcggcctggcccgtttaccgcgagtgcgcgggctgattgcacagcgaacagcccatttaccggcaacggccagacgcgggcgcactgagcgtggcgaagggtgcatggcccagttatcttctgcggcccaaagaccgcgtggcccaacagcggtggcgacctgacgcgggaccaatccgagtcgtccgatctgtttcgtccgatttgatggacggctcggattggttacacgccgatgaaattgccggccggaggggggaggggtctgaaaaccataaacctaatcccctttctcccctactctccccgatccaatctccggcgacacgagagagaggacagcggtgatccaatctttcatctctctcccttctccaccccagttgtcgatgaccagatcgaccaccggctccaagccgtcgttgctgctcacgtggatccaccgccggcgactggatcccgtcggatctccgcctccctctcgtgggccgcgtatccatccatcgacagcgacgggaggggcagatccggtgacctcttcccctcttgcatggattccgtcgtctctcgggagaagatttcagacaattcagaccatccgagaaaaatatgcataaacctctatacttagaaaagtttatacatataaattttcgtgtgtaaattttggtgtataatttttcgtttgtataaacttacttgaaaaaaaaaagatattgtagcagaacgtgcacacacttacccaaactgggttatcaaggcgtaatcacgcggcggacaggagtgcagtgcagtccatcttccatctgcatccaacagacgcaattattccttcttcaggtccactgtcgccggttgcctggctcaatgtttccaagaagaatatgtcttttggtccgctgtattatgttttttttttgaaactaggcatattatattaaattaaagggaaattaaaattatgattacaaccaacaatgctaacaaactctgccaaacataaaagtatatgaacgagcatcgaccatcatcttcattcttctggcaaatcctcaaagtggtgtcatcatataaattggtgatcggtgatccagaccctaaaactcatgttgtccactgaaccatcggaacccaacagagaagactttctttgttgatacctctgtgatcgaattaacagtagacaaagtgaaacgaaagataaaatacaaccaaatccaacttcaaaaacactatagacagcataccctagactttctaatataaatactgaaaacttgaagtgaaagaagccctaaaatttactatgtaattggtttgattgactcactgtataattctcaaattgctcataaatcttgaaagggaagagtataaattgttgcaaagttcaaatgttcacagttcttgcaaagtttaaatgtgcacaagccaaattgaagattccgaatgactaagtaccaaagacgccttacataggaataacccttatattgaggaattaagtacaaatggcaacattttaaagaggaaaagaacactacaatacttaaaccaaaatgtgtacccggagtttcgaaaaacaaaatgcacacccgcatcaagtccaccttatctttgatctctgaaatatcgatgcttttcaccaaatggacttcttccttcactaggaccataagcatgtagtgtatacatgcagggtagggtgtacacttctccgaggtaaccacggaaggaacggaattactaaatggcattcgatagattattaaggctaaaatcttacaaattaccactgagggatttgcttcacaattcatgctctttttctccagtgacaccttcttctccagctccgacacccccgatgaagacagtggagttaaggtttaaggtcctgggttgggtttggggatgggatggtggaggaagggggagagggaggagatcgtcgggcttaagggaatggctatgggaggcggtggacatgggcgagcggtaaggcgtcggcggtgccaaagccatagtgatagaggagggcggtagggtgggccggcattggtggcaagggggaaaccgaagcttgtggttaggaggaggtgattggtggtggcggatccattggcgggagccataggagatggggaagacaacagggcaggggaacctcacatctttagcttgagggatgtagatcctatgcagtgctgctgctgctgctacagtagcagtggctgacatgtggtgccagacacacaatgacatgtggggccggacacacacataagtgtctgttactactaacaatcctcactatagctagagcaggggaaggggagaatggaggaggaggaggaggaggcgggctaggagggacctcgccagtgccgatcgtgctttccggctagctgatgaggctgggcaacattggagcagaaggcgagggaatatattttttttttgggggggagaaggcgagggaatgttcgtggtggcaaggaaggagaaggataagagggaggggctagggttaggggagtccacacaaatcttaaaagcaatccaaaggtccaaatttataagatttggaggggggttttctcaaatagataaaccctaaaatgaaattctgcttttaaaagaaaagcccatagctaccctaagtaatgtaaaaccagtcatgagctcataatttggcagccccagaatgagacccttttttttttgtccaaaactctcacctcttgttttcagcgctcacgcttttcaaactgctaaacggtgcgtttttttacaaaaagtttctatacaaaagttgcttaaaaaaatcacattgatcctttttttaaaaaaatcagctaatacttaattaatcacgcgctaataaaccgctccgttttccatacatgggagatgggttcccaacacccaccatcaaacacagcctaaggataatcataaatttatcacatctcacattgctagaagtgtggcataccacagaccacacaattgttttttttttgatagaaccacacaattgttggtgtagacccaagaactatgtaagtgtggcaagacataaatatggggatgtttggttgcttactaactttgccaaatcacatattaggtaaggtgtggctgccacaaaatgtgtggctagcatgctagccacaatttagccaaagttagccaaacatacagacatgtggggccatatagagaaaaggtgtggctagccataattgagtcatcaactaaacaaatgactaaaaaactgtggcatgactcactttaggcatagcaagttgtggcatgcaaccaaacaaccccatagtaaccaaccaaaggttagactaaaaattgtacaccatatctaaggtttgacgtggcaaaacataacagccctgaacttcacaaaagaatgtatcatagaagctccacaactacaactgtatcgggcagctggcatcctccggtttacataagcagcctcagcgatgaagtgcggttgtacaatataatcagcttgagactcaccgtagcacctagaagttagtactatactccagatgtttcaacccaacaagaaacctaacagggtatcctacaaaatttgcttccacaaaagtaaatacgccatcgttacagctactacagattcgcttccacaagcaaatacaccattgttacagctgctagctaccactcaattcatatacattgaatacctaccgctgcaagcacactgaagataccactaccaggaagaaaaactgatatacagctcaaatctattgattggcaattgaaaccagattactagatggaagatatcacacacagcttaaaacagtccgaacaaacgtttccgctgctggctcatgctattttggggtgttctttgtggaggagtcacagatatcctgtccacgtttgctagtgcccacctgttgaaatcaggcgatgagaccagttgtttcatagctttatgtgtctcttctctagtgaatgctgcatattcctcctctgaaaactttttccgctcagggttagtgtggaaggtagaatagtagctatccgtagcaaggtcttgagacaatgtcttccttgatcctgtaaaagcaaaagattttaggtcattcaccaaacaataataccgaactatgacatcatacaggtaaaagaaatgacaaacccgtacgaagtgaatttctttttggtgtactcctcatgtattcaccatgaagcttgctaaatccatcttggtgagatccattcatgctggagtactcctcaccaaaaccttcatagccagtgggaacaatgttcgaaaatgccctgccaagagatacaatcaggtcattgatgtgttaaccatgttatcaaaagatttggtggtaacaaaatgaaatgcattcttaaggcaaagggacccattcatttggagaaactattatccacaaagacattattcagcgtcatctctacgaaacatagtgttataaatgtaaccaaaaggtttttgacaaagttgcatacattcaccatcacatctacaagataatacatttagaaagatacaaggactaagacatgaattatttcccagcatacccaattcctgtcagtgttccactttctattcacatctaaagtaattactctgatgttgcacaacatactacacacataggagaaaacatctattggacttagctgtgtgtgcactggccaagaataatcagcagatacaaataacaaagtgcactggctaaatctataaaagttaggaacccaaccataaacaatagaatatgaggaaccctgctcttacatagttacaatcaagtcaaattctccttgatgacaattgacaagggttatgatcaatgcgaaagtatgaggtgacttccctgataataagatatacgaatatattgcatcttaccttgataggcaccgtagaactcttgactttccctcaatcctagaaactgctttgatggctgtgcaaaataataatgctgaaaatgcaaagagatagtccaaagaactctacacggaaaaaaagaacaagcaaaagcttgtatgtcagttaacagataagcaaattattaggattgtcagtaaataacaggtcactataacaacttacctgcaggatcataactgcagaaataatcaagatagcccactcaacaaaataagccacaccagcatcaacagatccttcttctgttagcacaagcttacggacaccccagtaaccaaaccaggctccagctaagatcacacttacgagaaggaatacacctagctgcaataacatatattggatgttggtatgtcacagggaaaagagaaaatggaccttgaacgaatgatgcttttgaaagcattagcaatatatttatgggataatttgacagcagcatataaacttgaagggaatactaatgataaatcatggactatctctttatgggactattataaccagactatttatcaacaagaactggcagagacaagcataagtaaatatttgaagagaatatgagatattatcaaatttatacatcacagtaatctatgaaaacgaacttacaaaacacaagcagcaaactgcaaagttgaaaatattatacacttgtacctccataaaaggtaaagctctttcttccatatggcacatgtaattgaaggtggaaacagaagtagcaaatgaaccataagtaacctacaaggagaacttacatacaggattatgcatgtcttcggcaatcccaatttccacaagcacagaacgtaaaagtcccgacaaatagtgcaaaaaatatgtggtcatgccaacctgttttgagaaaacgtcatgaatcagtgttccaaggatatggcattgcaatcaaagcagaaacaagtcaaattgtatgaatactcacaagtgaagagtacacaaaaattgcaagagaactctttctaccagtgggt

SEQ ID NO: 1504 - DNA, 777 bp, Oryza sativa
tcctaagtagcatatgggattattgttcactataaacaactaaaatatagtaattgctttggtgagttataaacactaaagtagatattgattgcttagaagtggtgtttaggtaattgtatacagtaattgctgtgtatcccacactagtttgaggtaggtgtagaggtggtgacagccctcaagatcacttaagtcctctctctctccgggtacgtagtagagcgacatctgggaacagcgggttgccagtgcctgaagtattgcattaggattaaagttaagctttccttagacactgtttctcgctagaaaatcctctctatcctagcctttcatctgcttggtgttcttggatgaactggaggaagatctgaccacacacgttcccttggattcgatacccttggaatactccgtaagggaagtgctacagcggtatatccgtgcgcttgcggaattttatctgtgatcgtaagaaataccaacaatatgctataagttggatatgtgagtcatgctggccacatgagatgcacatgtaataaccaactctagcgctcctataggtgattaagagatgcctactcctggttatcgactagacagttgtagtgacatctcgccacctatcaatttaaatttacttgtggaccgttgaactccatctatcgttgtcgaaaactccatgtctctacggtcttacaccgggatcgaccaagtgagtacgacaaatattgataaagggtgaggcggaaaacaaaacaagcttttgcg

SEQ ID NO: 1505 - DNA, 1261 bp, Oryza sativa
tcagctgataatgctagtataagcaactccgagaagcaggaacagaaaaaatcagtaccagaagatggtcgcatgaagaatagtaaaaatgatcatgcgacaacaacatcgccatcttctccatggtcagaaaatatggatcctattgcatcaacttccaaaactggtaaaggaaaaactcaaggagctgaggccacagaacgagaaggagatggcgctgtctctgttgctaattcaaagaaagaatcgagacccgtctttgaagacaacattgttctgggtttagctcttgagggatccaagaggacattaccaattgatgacggaatgaaccctcatctatcactttctgaaactgagcaagacacagttgaggctgcttcatcaccgaaggataagaaaggtcaagaaaaaggtgaccagaggaatcttgataggtgatctgagtttaaaccgattatttatgctatatttgtcaccaagcctaccttttttttgtgcttgtgcaaatgcaatctgtcaaacctgtctatgtcaaaggtattgatcgtcgctgatactattcaggagacgaacctcctcaaatgtacttctcagccatttgctatattaggcctgtaaaatcacaaggcctctcctctccgttcaacatattattgtacatatcctgcagcctctgtaacaatcctagataaagctgacctgacctgtgttgcctcttgcatgtgcatttgtgatgcgaccacgttatcatggttcctgactggaatcagttttaggtctgttttgaatgatgatggcagtgtcaaatggtccttgcagttgggggtgatctgcagaccgttgcttgatgtccgtatgggccagtgggtgaagggttaaatatataatcttcccctccaaggctgtctgagttgttgggttgcagctagtgggcaattatttgtgaccacagtagttgtcgccatgaagccatctcatctcagccgcccagattggcctgcatcgtgcatcatcgatgtaatcttgtgtcaacttagtgtcacccgaccagagtccagatattggtgcttggttggagttgaacacggccggccggcagacatggccgctggtacgtagtcaagtgtggagaagattcataattgcaggccagaaagaggagaaaaggtgatgattcggaaaggtgacatgtcaatgcacacaccctgcacctactacatgcatctacatatacatatagccaagatcaccgggttct

SEQ ID NO: 1506 - DNA, 2642 bp, Oryza sativa
ggttttggaaattctacaatttctactaaagtagttcgcatgcatctacggtgaagtactgaagtggtagtttttctttgctttggataagtgagcgtccaaacccttcacacgttgttttggccgttttttttacaaattgaccattttcaaaaacttattcgaaactaacccctgccaaaaacttcaactaaaaataggccgtttgctcagcgccaagcgcattggcgctgaggttgggcatgtcagcgccaacgggcgtggcgctgacctcgtgccaccgtggcggccgggctgatcccccagctgacgtggcagctacctcagcgccaaccgcttcgacgctgagatggccaatctcagcgccaaagggcctggcgccgagttttggtacttagaggccggccgaggccgcccccagccagcctttcctctattcttccccaccccgcgtgctagggttcgtcgcactctcttctcccctcaccaaatctcccccaaatccactcaaatcgaaggggattttgtcaggattgagttggagatcgattgagaaggtaaactcctctagaaaccctaatttcccccatgttttattggatatttcgcattgttttggttccaaccgtggtttgataattattggctcggattggatgttaattggataatgtgggtggggatgtagtgcggaagacacatattaatcttgctccatttggttcatgttgatttgtagaattgagaacatatattttggaaagatgtgtggtgatggttagggctttgttggattgatgtgtggtgattgaaatggatgcaaggggttgatgtgtggtgaggtctaggcactatgcaggagaagggaattttttttatgaataatgtgtagtattttagttgaaacaattaggtattgataggtttggaagttttgggattgctatggtatttagagactattttcaaattaattaatgtttatgtatgggttaaatattgtagatggatagattggttcggcttcattatggtggttgtgtggtagatgaaagtaccggtggaagcaaatttgagggaatgattgttagacagttagtgtttcatgcgaagccaacatttgaggagttaatgtctcgcattaagcatgaattggattggagtgatgagtcggttggtatgcaagggagatacgatgtgggcggcggtgtcatgtcgcataagtttatgttagacttgaatggaaagatcgaatggcaaacatatatagatatagtattggggtcacatttcaaagctcttgaggtgtttgcatggaagaaagaaggtaggaaagggaagaaagaacttgtagacttgaacgaaagtccactcatagaatcacccattagttctcacgaactgtcggagaggtgtagtaggaaggaagaattaattgaggaagacgtggaggtgggcgagggagtaaatgatatggcggatgtggaggtcagggaggaagtacatggggaggagaatgtcccggtaagggaggaagtacatgcagaggagaatgtgccgttaagggaggaagttaatgtggaggagaatgtgccggtaagagaggaaggagatattgaggatggtcgggaggtaggagatgatgtggagttgactgaggaagaagcgaatgctaagaatgtaagtatgggcctaagggagttggttaggctggaattctatacccgagaggagtgtgaggaggctatgatacgcagtggattgaactcaggctggttggagtatgatacagatgatgaattggatgagtccgcttccgactccgatgatgatcgtccagtgcgtaagatgtcggagcatgaaaggactgtgtttgagaaattggtgggtagaaactcggaaataacacaattctaggatcttaccagatctgggctagcaattgctgatggggatccacaatatgacggtgccttcgaaccaatgtgtgatgaaccaaggaaggggttggagtttcgatcgatggatgatctgaaaatatggctgcagagttattctatccgtgtccaccggccgtaccatgtgaaggaatctaatgcgtcagtaaagtatactgtggcttgtctcgatcgccattgcaaatggcagattaatgcaaggaagagtggaggagataggtggcgggtgactagggtgggcgaagaccacacatgctgtagtgcggaagtaaccggcaagcatttgcaacttacttcgaggtttattggaaataggttacaggcatttgtgcgagctgaaccaactttgtctccagcagcgattgtcgaggcagttgagcaaatatggtactatcggcctacgtatggcaaagcatggcgtgctaagcaagttgctatgaaggtcatttggggagattgggacgaggcgtatgttcgcttgcctacactgatgcatgccatcaaagaaaagaaccctaccatgcatttccgtgttgaggctcaccccgagaagtcaaggatggtggagggagtacaaaggtgagtatttggatgtgcatattggatatttggccagtccatagaagcattcaagcacttgaggccggtgctagcaattgatggcactttcttaaccggtaaata

SEQ ID NO: 1507 - DNA, 2281 bp, Oryza sativa
agttacggcggctggggtgcaatggggtggacgtcactacgtcgtggttgtgagagataacacatgcagttgtcagttccctcagctccatcacttgccatgctcccacatgataaccgtttgtaagttgcgaggtttggatgtggaggtggccccccgaatgtgttatgatgcttccaatagagctgtgcaggacacgtactcccctaggtttgaaccttacctagatccatcgcagtggccaagttatgatggagagttcttcgtttcggacttgtcattgaagaacaacactcggggaagaagaaggacaagaaggttcaagaacgacatggacaaagcgtacaaaggttcaggcaaccgctggtcacaaaagccaaacaatacaaattcagagccggtcatgcaaaatagatgttcgctgtgccacgaactaggccataagaaaactaggtgcccgaagcgagacaagtctaaggatcgaccgaaaaagtgccgtaggaccgggggaggtggtgagggtagcacacaggttggattggatcacattcatattttttaatgttgtaaatttagtttgtattacatttgttaagttgttattttggcttcaatgtttactttctattgttctcctttccgttctcattgtgatttttccatttaatttcattgcaattactgatgattccattttcatttacaggatggagcactttccggggttggaggatttctacgaggagaagcactgggctccccagattgtgagcggagaggttagcatcaacaatattccatttgttttcacaacccttgtatatgtcatattgtcgctaactatatgtaattatgtttgtctactgatgcagcgcctgaagacccttcgagtcagaggtcacacgacacacatactgttcgacgaccggtacgtcccgtacttatggtgggcgaagctcttggcgttcatgaccatggcgcagcgaccggtgcctctgtacaacaccgctgctctgacggccctcgtggaccggtggcgtccagagacacacaccgctgctctgacggtcactctaaagtacgtcgccatgatcttgggtcttcctatccggggtcaggcggtcacaggtgacacagcgtcagggaactagaggcagagggtcgatgagtaccttggcgtggagcctccagtggcacctgacggtcagaggcagatgaagacttcaggggttcctttaagttggttgcgtgccaacttcggtcagtgtcccaccgaggcagacgaggccacggtgcagcgatactgtagggcgtacatcctgtacatcttcggcaatattctgttccctgactccagtggagacatggcctcttggatgtggcttccgttactcgcggactgggacgaggctggtaccttcagctgggggtctgctgccctagcctggctgtaccggcaactatgtgatgcctgccgaaggcaaggcggggaagcgaacctagcaggctgtgtttggttgatacaggttagttcacgcatgttctgttttgtaacatttcaatttcttgcttaaaagttgtaaaataacgtatgtgacgcaggtttggatgtggacgaggcttcctgttggtcggcccatgtggaggacccatcaggtttggccgcatcaggatgccgaccgacatcccactgtagctcacatgtgggaattggtcccatctccagtactaggccgcaggaatttggcctattaccactacacaaatgagatggactacctacagccagaacttgtaaggaaatcaccgttctatcgcacatgaaaatattttcttactatatagtactaaatgtgattcaatgtttttttattgttgttgctgcaggtggtatggatgccatatgaggcacaagaagtgctcgagctggaactaaatcccatgtgccatatagaggatgcgttgaagaccctttggtgcccactgatctgcttctatgcagtggagttccagatgtgcaaccgcgtgatgcggcagttcgggaggcttcaaacaatcccgcaccgtttctccacaagtatcgacttacacaagttagtaattttggttaagaattttttttgcatgcagagttattttcatgtcaacatttctgacatattcgagattgatattttgcatatgtgtggggtggaccgtcggaagaacaagaaggtcactgattgggcctattaccatttagatcatatcacacaacgggagaagttcgaggagaatgcag

SEQ ID NO: 1508 - DNA, 812 bp, Oryza sativa
acgacgcaggcgggctccttcgcaggactggaggtacacccccgatgtgcctcgtgctcgcactagaggtaggaggaggtgagtgcatggttcgttggatggatggatggactttatgcatggttcgatcaatggactacgacttttgctcgttgtgtatggatggatggatggaatgtttttatttcttatatgtatggacttaatgtatgcatggattgatggattctctgaatgtatggaatgaggttggacttgatgtatggatgtatggatatagcctgtgatgtgaataaattactgcctggatgtgtggttgtgttaagcaggactgggcagagagctgtgctgcttattacagcaggtctagaacctcagcgctaggcaaaatggcgctgacatactccaggcctgcgccagatgccttggcgctgagctcctagcccagccatccagaaggcttgctgggctgggccatggccgagctggctaagtccaacctcagcgccaggtgccttggcgctgaggttcccagggccagcgccattatggctggcgctgacatcccagcccgcaagccatccagaaggcttgctgggctgggtcatggccgagccggctaagtccaacctcagcgccaggtgggcgccgaggtgcccagggccagcgccattatggctggcgctgacgtcccagcccgcaagccatccagaaggcttgctgggctgggctatggccgagcttgctaagtcccatctcagtgccagggtgcgtggcgctgatgtacctagtctcagtgccatttctgttgg

SEQ ID NO: 1509 - DNA, 706 bp, Oryza sativa
gctgcaaaagagcactccagaacacctccagtgcacatccatcgcccacacgatcttgacgcgcgcgcgcgcgcacaaaacacacaaaaataaacgtcaatttgcaatcgtcaagagtagagagagtcgctagaaacatcaactgatggcaacatccacacggcgtcgaggaaaagaaaccatttctaattgctgcaagatgccaaaagatgccagcccgagaggcagagatcactagagacacatcaatagtagcaccagtagtgtaacaaattgggaatacactgtgggagtaggacagggacaatgacacaggaaggcagaagaggacgcatgatgaacacatcaacaagagagtgaaattcaggacgaaatgtcgacaagatattggaatctttggccacgcacgcaccaattcttgggtgacgcggccggaatcgaacggcacacccgacccaacccaacccagcgaactaaacggagtcaatcatctgatgacctaaaaaaaagggaaacaaattctgccaaattttattggtttttctttcccgtttgcttcctctcttcttctgcttgtctctcttttcatcacttagaggcgtgtgcacgtctcgtacaccggcgcgccggtcacctgcgcgactgcgccgggtagggcgcgacgcgcgtcctccgtgtgccgtccgacggcacgcggccaccgacg

SEQ ID NO: 1510 - DNA, 3231 bp, Oryza sativa
gggaggaattcgaatcccggccgtctcgagcgcagcgcgggcgggagagagagggagtgggcgcgggggacacgggcgtgggtggcgacgtgggcgacgtggcccggaagacgcgggagcgagggcgcggcggcgccggctggaggttgggggggacccgataggtaggccccacctgtcggcgaccccaggagagaggaggggggcggccggctcagctgtgcctcggccttcggccggcccagtgggaagggggaggaaggagagaatgggccggtggccctttccgaaaagaaaaagagggaaaaagaaagaaaaagaaggaaaagaatttccagggaattaaatattgcttgttctcatttttaattggttaaaattatttctagagctctgaaaattccactaaaaatcttgttagcgtatttcgacatgtagaactcaggaaaaatcccacatgccagttccgattattatttgcattaattccttcaaggtttctctcttgcttttacaccggtattttcttgagaccatttataacttcaatttaggcttgggaaagaacttcaggtgtgacaaacctaaccccttaaacggaatcttggccccgagattcggaagagctggcgaagaggtgcggatgggcggccttcaactcatcttccctttcccaggttgcttcttcctctgagtggtggctccaccgaatcctgcagaatctagtgaccttgtttctagtcctcctttcactggtctcaagaatgcgaactggcttttccacataagttagatcttattgaatgtcaatgtgctccgaatcggcttgttcttcgggtaccctcaagcacttcattaactgggacacatggaacacgtcatggataccgatcatgttggatggaagttctagctgataggcaacttctcctcttcgttccaagattttgtatggccctaggaagcgtggtgccaacttgcctttcgtctggaaacggtgcactccccggagcggggtgacacggaggtacacataatcccctgcttcaaaagtgaactcccttcggcggttgtccgcgtagcttttctgtcgagactaagcaattctcagcctctctctgacggttctgactttctcttctgcttccgttaacacttctgttccgaacagttggcgttcacctgtttgatcccagaagagaggtgtgcagcacttccggccatacaacacttcgaacggtgccatttgtagactggcctgataactgttgttgtaagagaaccccgcataaggcagactcatatcccaagctccaccaaaatcgagcacacaggctcgcagcatatccttcaagatttgattgaccctctcggtctagccatctgtctacgggtggtaggctgtgctgaaattcaaacgggtccccaattcttcctgcagcttctgccaaaattttgaggtgaattgactccctcgatcagatacaatcttcttgggtaccccatgcagacacatgatccttgctaagtacagctctaccaatttctttcccgtatacgtggtatgcaccggaatgaaatgggcaactttagtgagacaatccacgactacccagattgaatcgtggctagatgatgtcctgggcagacctgttatgaaatccattccaatctcttcccatttccattccgggatctgaagagggtgtaacaatcctgcgggcctctgatgttctaccttaactcgctggcaaacatcgcagagtgcgacaaattcagctatttctctcctcatactagccctccaaaacttttctttgaggtcttggtacattttggtactgcctgggtgaatggagtactgagtctggtgagcctcggtgagtatcagatcctttagttccttgtcatcaggtacgcacaatctttctcccaaccagattgtgccgtgttcatcttcatggaaatcccgggcttttccgaccctcatattctttttcagctctgctatttcaggatcatttacctaagctgctctgacttgatccacgagcgtaggtcgtgcctctagggcagccacgtacccgtgttctacaagtcccaaattgaggtgttcaagctcctgctgcaattccttacacatgtcttcggcgcataaagcattgcagtagctcttcctacttaatgcatctgccaccacattggctttgcccggatggtagtgaatgctcatgtcataatccttgataaactccaaccatcttcgctatcggagatttagatcaggttgggtgaagacatatttcagactcttgtgatccgtatatacttcgcagcggttgccaatcagatagtgcctccagatcttcaaagcatgaaccaccgctgccaattctaagtcatgtgttggatagttccttcatgtggacgcaactgccgcgaggcataagcgaccactctgccctcttgcattagaacacatccaagcccgtgacgggatgcgtcgcaatagacttggaagtctttcgtctgatcgggtagaatcagaactggagcagacactaatttcttcttgagctcctcaaaactcttgtcacactcagctgtccacttgaatttctcgtctttcttaagaaactgagtcataggtctggcaatcctagagaaattttcaatgaaccgacggtaataacccgcaagtccaaggaaactccgaatctgtgacactgtcttaggcggtgtccacttggtgactgactccacattcgatggatcgactgccacgccctgagctgtaatgacgtgacccaagaatttgacctctgataaccaaaagtcgcctttgctgaacttggcataaagctggtgctcctgcaacttctcgagtaccagacgaagatgttgctcatgctcttcttccgacttggaatagattagaatgtcatcaatgaataccacaacaaacttatccaaaaattccatgaacactttgttcatcaggttcatgaagaatgtaggtgcattggtgagtccaaaagacataaccgtgcactcatacaacccataccgagtggtgaaggctatcttgggaatatcctcttcccgaattctcaactggtgatagcctgatcgcaggtctattttggaaaacaccttggctcctttcagctgatcaaatagatcatcaatccgcggcaaaggatatttgttcttgattgtgacctcattgag

SEQ ID NO: 1511 - DNA, 1936 bp, Oryza sativa
ggtcatcgtcgattccttgctgcaaaccacccagtacggaagaaaggcaagcactttgaacataaggcggaccaccatacgaagcctaaacatcgcagcgggaaaacagtgtttgctatggttaaagatcttaaagtagtgttcggaaaggggtctggaagccagcctatagagagcgaagatggtcacgcggcgatgtggaaaaagaactctatattttgggagttaccctattgggaattcttggacgtccgccacgcaatcgacgtgatgcacctcactaagaacctttgcgtaaaccttcttggcttcctaggtatatatggaaagtcgaaagatacactggaagcacgtaatgatctgaagcatatggaacaacgcggcgaccttcacccggaaccaaaggagaaaggaagccattacttgagtccagccagctacactcttagcaaggcagagaaggaaagtatgtttgaatgcttggagagcataaaggtaatgtctggatactccacgaatatcaagcgaataataagcacgaaggagaagaagttcacaaacctaaagtctcatgaccatcacgtgttgatgacacaactgctactagttgtaataaggggtatccttccagacaatgtccgggcaacaataacaaaactatgtgctttcatgaacgcaatttcgcagaaggtcatcgatctggatagattagaagcccttcagaatgttgtggtgcaatgtcttgtctgtattgagttgatatttccaccttcatttttcaatataatgacgcatctgctttgtcactttgtcaaagagatcagtattctcgggcctgtgtacctacacaacatgtttcctttcgagaggtacatgggcgttctgaagaagtatattcgtaaccgtgctcgtccagaggcaagcatcgccaaggggtatggaacagaggaggtcatcgaattttgcatagaatttattgaagaccttcgcccaattgaggtacctgaatcacgccatgaagggagactacggggaaagggaactctcggaaggaaagcaataatgacggtagacaacaatttattccgtaaagcccatttcacggttctgcaacaatcttcattggtagctccttacatcaaggagcacttggctctagttcgcgccagaaacatcggtaagtccgatgcatgtattacacggcatcacattgatactttctccgcatggctacgacaacatctcatgggtaacgagacgatcaaccaacaactagccttcctggcgaggggaccatctgggtcgatcgcgacattccagggatatgagatcaatgggtacacattctacacgagagcccaagacatgaagagcacgaaccaaaacatcgctgttcgtatcgatgccatgggacacgatggaacaactggcacgtatttctgtgccatcgaggacatatgggaacttgactatggtcctctcaaggtccctctgttccggtgccaatgggttaggttgactggtggaggcgtaatgattgatgacagtgggatgacaacggttgaccttaacaaggttggatactcggacgaaccttttgtccttgccaatgatgtaacgcaagtcttttacatgaaggacatgtctagcaaaggaaagaagggcagagggcctgacgagccgaagcatcatgtggttctcccaggcaaaagaaaaatcgtcggagttgaggacaagactgacgaggattaagatcagttggatgggcaatcccctttcatggtgacgattgaccctagcatcctcctatcaaatgaagacaccccttactcacgtagcgatcacaaggagggaacaatagtgaagagaaagtacgtgcggtcaaccgtcaccgtcgatgtattggcgtaattattgtgtacacgatgtaaactat

SEQ ID NO: 1512 - DNA, 13341 bp, Oryza sativa
ctgcgtccgggcgcggcgtggcgaggcgacacacgcgacgccgcgagagcgatgggggaagcgacggaaccacgcacgtgtagccttatcgcccttgcctttttgcctatgcgccgtgcctgattgaccagctgcttttctttattattatattatttcttcttttatattattttaaagtatatgcgatgattgactcataatattttttttcgtgcccctcacctccttctcttttttttttctttataattgtataaaacatgaaaaaaaaaggaaattactatagaacgtgtatcgaatttttttagccattggattagctccaaatttgtgcacgcgagatgagagaaaatttttggccattaaattcactccgaaatttatgcacgcaagatgaaagaaaatagtagagaatcgctacagagataaccttttatacaaagaattttaaattgtgagaagcagcttgtacttctgatttattttccgactacaactatctataattatagtctatagattcttgtaatctatataacaatctcaactatttcaaagagcttcggacagctaaatatcctacgtgaggcaataactatacgcgtgagaaactctctaaatatggcctacttatagaacgatgggtcggtagctaggattaagccaccggctttcatggaccacaagctgcttagcgagctgtgccaaattaccaaccatagtccagcaactaggaattgagccctcttgaaaagaataactagggctgtgtttgagaagaggagattggaaagatacgcaaaacgaggtgagccattagcacatgattaattgactattaagtattttaaacttaaaaaatggattaatatgattttttaaagcatcttttctatagaattttttttacaaaaaacgcaccgtttagtatttcgggaagcgtgcgcgcggaaaacgaagcaaaactcactaacaatcacttagatcacctaggaaagaacacagcctaaagcatccattctttttctcaactccaaactcgtacttttaaaactattaaatggtgtgtgttttgtaaaaataaagtttctatataaaagtataattattaatacttaattaatcgtgtgctaacgaggtttctcgttttacatgcgttaaaatctgtcttcaaaagtgaagatggaacgcaacctaaaaattgaactgattgaatcccctccattacaatagttcagttttatatacaagtcccttgcatttctatattactaaacagactaaaattcggaaatatacaatttcttaggaattacacaatttttaagggattgtctatgagacgaatggctgaaaaaatttgtgttctcggcccgtttgtctgactctctatgatccaaacacgcatctcccatccacctgcgcaaggaataagttcaccggaggtccctcaacttaacagcgagattttttgaggtcccttaacaacaaaatcagaaatgtctacccctaaattcacttaaaccgttcaccggaggtcactcggcagtatttttgtccggttttgctgacgtggcatcctagtcagcaaaaaaaatttaaaaaaaaaacttggggctcacatgtcagctgcatatcttttttcttctcttttcttctccttctctcctcttctcttttcttttctctctcctcttctccttcaggctgcgggcggagcaaccgcgcgccgtggccgccgtcgtcgtcagctctccaccgtcgtcgtcgccgtgagcgaggcaaagcggcgcggccgttcggcggcggagcggaggcagcggagcgcggcggtggagcggaggctgcgggcggagcagccgcgtgccgtggccgccgttgtcgtcagctctccaccgtcgtcggcgccgtgagcgaggctacgcggcgcggccgtccggcggcggagcggaggcagcggagcgcggcggcggagcggaggctgcgggcgaagcagccgcgcgccgtggccgccgtcgtcgtcggctctccaccgtcgtcatcgccgtgagcgaggctgtccggcggcggagcggaggcagcggagcgcggcggcggagcggaggctgcgggccgagcagccgcgagccgtggccgccgtcgtcgccgtgggcgaggcctagagttacatgcatatatgcattcattcatgaatatatacatatatattcgatcgatcttgtcactttcaacccgtgcaggagcctgcaaatcaatcacaagctgcttttgctttggtctttttctctctactgcatgcatgtatccctcacttgagagcccatagctagcatgcatgcgttcacaggcttttggcctttcttctcttgcgcgcggagggacgctattgccaccgacaagctcgcgagtgaagctcggccggctctctctcctctccggcaaaaagggcgccaaggccgccctgctcaacgacgatgattacgagccccccgcgccgccgctcccacccggggacggcgacgacgacgaggagcccatcaacctcgtcttcaagggcggagatgactagatgaggccggcgggagagggggtggcgtgctgcatcggcgaagaggtcgccgccgaccgcctgccgccgctccgcagccacacctgccccccgccgctcgccgaccaggccccccgctccgtcgtaatcgcccgccgccctccgcccaccgctgctccgcctaccgcgctcgtggaggtcaaccaacacgacgacgctaccggcggtgaagagctggagcatgacgagcgccgccgctccgctgccgctctcgcccgctgccctgcccgccgctcccgccgtcccagccgcctctctccccctctcccgccaccgctggcacgctcgctccacgccgcccgccgccacgcccgcctcctctccccccgcttcttccccgcgggccgttgtgcccgcaccgccgcctgtcgccacaccctcatctgcccagccggctcactgaagaagagatgagaaaagagaatgtgcagctgacatgtgggtcccagatactttttaaatttttttttgctaactaggatgccacgtcagcaaaaccgggcaaaaatactgccgagggacctccagtgggttgaaggagtttaggggtacacatttctggttttgtggttaagggaccgcaaaaaatctcgttgttaagttgagggacttttggtgaacttattcccctgcggcaatactctcgcgtgcatggtgcactttccagccattgtaacccattttgttgtgtcaggttggtggcaaaaaagcccatagccacacgaaggggcccatgatgttttctacagggcacacgaaaaaacaaggaataagttcaccggaggtctcgagattttttaaattaccttaaccgcaaaaccagaaatcttcacccctcgactttacaactttacaaaaccgtctaatttaggtcccaaggcagtatacatggctggttttaatggcgtggcatcctagtcagcaaaaataattaaataaatatgtgggggcccatatgtcagtgagagaaaatgatgtgggccccacatctcttttttttctttttctcttctcttctcaacttctcagttctcacgcgcaggcgggaagatggcggccgacggcggagcgggcgcggttgccggcgcagcgggcgctgcggcgcgcggggaagaagcgggggagggggagaggaggcggccggcgccagagaaggggagagaggcggccggcgcgaccgcccgcgacggcgggagcggcggccggcgcgcgcctctccccatccggagccacggcgggttagcaagcgaacggcgtactcgctatcgccagccacgccgcctccacggcgccgcgcacctcctcggcgcgacaccggcagaggatgcggaggagagcggccggggtggacgcgttcgccgatgggagcgccgggagagggctcgacgacgagcaggcggatgggcaggccgtcgatgctccaccgccgcttcgcctgcctccggaacgcgccgcggaacccgccacagaacgcgcgtctgtccagccgacgcatcgactccggcgtccgctccttcggcggcaccgtccccagctgccccgtctgcctccggtcgccgtcgtcgtcgttatgaaacacccattaattagtttgcacgctgcatgcagctagctagccaaccggattcatgggattgtccaccatgccctgcccgtgttagaaattaatcttgttgtttcttaatttcagcatgtttatctatatgcatatgtgtgtgttgcatggcctggagagctagctatatgtacgtgggtgctgcatggtttagtgagtagtggttggcagtgagtagtgagccaataaagagccaggagatgagagcacatgtatgtagcttagttagttagccatgcataattgtgggctagtgattagccgagtcttgcacaagattaggagtaggaagtggtcagtttgcatgcatgcaggttagttggttggttcatgcaactaacgtcggcgaagactcagtacttgtgaagttgcggccaagtaaacaggatgtgggcgtcgtgtgtggcttgagaagcggaacaaccagcttcgtgtgtgtatgtgctgtgttataaatagctgctcattgtaatcatttagtaaagtgaaaaaccagtgaaaagggcacaagttgttgtggtgcctctaagctcctgtgtgtttgcttctgtgtttgtgtttcttcctcgctgcctcgttcaaaaagtgtagcctgtattcgcgtgagttgctttgattcccaacagcccgaccatgggctggtccaacacgggaggatgccgtgcttctccagctgcccacgcagtccgacgccgctcaacatcagcagctgcaggccactcagcatcagcagctgcaggctccccagcgtcccggtgtggtcgcgtgcgccgatgggagcgccgggagagggctcggcggcgagcgggagaatgggcagggaagggtcgagctacggcctgcgggtggctgcggccgccgcccgccgcaggctccgctctccgccgctccgcgtgcctgctcgcccgtcttcgccgctagtagccgcgctcacccgtcgctgcctcccgcctgctccgctctccaacgctccacctgcctgcttgtccgccgtcggcactcgcagccacgctcacccgccgctgcccgtcctgcctgcttcgcagccgccgactccgctctccaccgccgccactccggccgctttgccgccgcggcgactgctgcagctctcccctccgcggcaagaaaatggaaaagagaagaggatgatgctgacaactgggcccttactatttccttctcacttactcgtgggtcctacattatttttttattctttttgctaactaggatgccacctcagcgaaaccggacatctatactgcctagggacttttttttttggacgttttacttaattaaggggtacaaatttctggttttgtggttaagggatctcaaaaaaaatctcgctgggatctcgggtgaacttattcaaaaaaaaaaagacaatttcattttacccctactttaatttttaatattgacttactttttagggtatcgttggcccttgctttttcaaaacgaagctgacgtttactcctattgttgacagaagttagtgcaccctggatagttgagtttaagaagtagaaaaaaaaagaaataatggattttaaatttattgatttacctttctaccttgggtggtcacaataccttggaatttttttccttcccttatcatcttcatttcgggttccccttatccttaattccttatactctcagcagctcggcaagcagcagagaagcgacgacggaggctcgacacgaagtgtaggcaactgcgacggtggctcctcatgtggaggaagtgacggcggttgctcggtgctgcggtggaggcaatggctggaggtggctccgcgcggtgatgggcggaaggcagctcgccgcgggttggagacgacggtgacgagcaggccaagaggcgacgatggaggcctgacccggcttggctgcgagcaggcgactgggaggagttgcttgaggtttttttttttttttgacatggggggttgctcgaatttgtgattaggatctgcttgactttgtgatgcttgtagcttgctatttgtcttctagttttgtaaaaaaaaaaagagtctcaaaattatgcctaaattctttcgattttttttcaatttttgtctaaattttatcaaatttgtggcaaaagtatgtcaaattttgaaacattttttatatttggtcaaaattttcatatttgtacaagttagtgaaaattgtaggatacaggtacaataaggagcaaatacacaattgatgaaggcaaatgtgtaataacaccattcgcctgtctatccaaagtacagataaaatttagcttcgtttaaaaaaagtagggataatttcatttttaccctacttttaaggtttaatattgattttaaccctactttttagggttctcatttttacccttgctttttcaaaatgaagtagacgtttacccttatttttacagaagttagtgtatctcggattattaagctaataaagaagtagagaaaaaaaaagaagtgatgattttttaatttattaattgacctttctacccctttcattttgccataggccatagccatacaacatccacatcctttttgcgccgcgccccagacaagcaggcagcggctccgcacgaggaggcaactacggtggctccgcttgaggaggaggcgacggtagctcggcatgggaaagaggtgacggtaggggctcggcttaggcagcagctccgcgtgaggaggagacaacggcagcgcctagtggggatcaggcagacgaggcggcgaacaggcaagaccgcagacaggcggctgccagctgcaacaggcctaatgatgccgacagcagaccagctaggcgacaagaagtaggtggctaagacagcgagcaggccaagccacagttgcgagcagtaagggtacatatttagaccgaaccgaaaagaccgagactgagaccgagaaattcggctatctgttcggtcctagccctcaaaagaccttgggctcgattaaccgaattaaccgaaaagaccaaaattttggcccagtaggcctaggaaggccaataagcccactagaacaaaccctagaagtgatacaaccttaccactgccacactcccatcgcgcttggcctccgcctgaccgcctctaccgcgccacctccagcctccaccgcctccgcctccgcctctgcctccgcctccacctccaccgcgccgcctccagcctccaccgcgtcgccgccgcctccgctctccactgcgcggcgacgcctctgtcaaattttttcattccaaacttactcctgaaaaatttcgatcagaccgagaccgagaccgaatttgtcgatcctaagattttttttagatgaaatttggtcctgagttttcaaagaccgaactgaccgaaaaaccgaaaaccgagaccgaatttttcggtctgaccgaacgcccacccctagtgagcaggcgagaacacggggagcaggcggtggaagaaaattttgtaggatagcggtccttcactcgtccgtaggacttcgccccttgtccaacacgtgttaggctggctagtcacaatcttaaagcaaaccttcatcttagtccccacgccgtgaagcgtgaagcggcggcgccgtaagcgtccagcattcttcctgactttactcgaggcgtgaagcggcagcgccgccggttgtgcccctggctgcagccacgtgagacgaagctacgtcgacagcagcgacgcggcgtgaggtgatgggtgttcttagagcaggtacagtagcaggctattagccagctataaacatattttaataagataaaagatgagagagaagagctgcgggctacagatctatagccagctgcagcacagactctaagacgcagtgtgtgtatgacaggtgggaccatatattaatagtatagtaagcaactattgtgtaaattgactattatattggctataggtgaattggagcttgtagtgggctatactattgaacttgctcttatccggtggaaggcgaagcagcatcactgatttgcggccatggattagatgtattgtcttggtcaaaaactgatctataaacattgagaagctacggcctacgaatgcactgtaagcttggagttcaggtttgcatattctccttaaaagaatagaagtgtggaatgaacatcatcgtcgtcgttctgagatttgtcagatcgtattaccactgcctaccatcgctggtttggaatcaagcttttgccatagatattgatgcatcgtctcacgggtttgctacaagacgagcagaagggcggcagcacccgtccatctcccgcacaccgcgccgtatcgatcgtctccgcactatattgatggccgcgcggcgcctgttcatctcccgcatgggacgaactaacgacgtcgggccacaggatttaccggtttagggggaaatgagggaggtttgctttgagattataattggacacgtgtcatgtggaggggcgaagtcctttggatatgcgaaggactgctgtcttaagaaattttcttccgcaggcggcggcgagctttgccaggctgtagtgaccagacgacgacacagtaggcggcaggccgcaagcaggccaagcgacgcctgcttgccttgctttactgcgactgcgagcaggccatttgctcgactttgtgatgctttgctacatgatgctagctctgtaaaacatgagtcaaaattgtgcccaaattttatcaaaatctgtccaaattcgtcatatttgcatattaaaatttcaagctacatgggggtataaatgtcttttcgctaaaaatttaacaccgtcaacttgcacatccaaagtagggtaaaacttggtttcgtttgaaaaatcatggacaaaaacgaaaacctaaaaaacaagagtaaaatcaatattaaacattaaaatagggtaaaaacgaaattggccaaaaaaaaagggataaaaatgaagaccctatactgtcagggtatgaaaaaaattacccaaaaaagaaaaggccaggatgttttgtcgttgaaaagaaaaggctatgaaaataaacaaagtgatttaatcaaagtcgtaaaaaagttcttagccccaaataatcaaagtgaccccagcatattcttatctaaaagttgtctgtcagtatcaccttttcacctatgcatatgtaatcatgctataaccaatcatgtaaaccatcacaatactccctctatcctatatattttaatcatcacctaagcaaaaaaaagaagcgtacagaccaaagacaataaaacattcatcattctgcattaatactcattggttaaggtgttacgtcgcttcgtgctccgtgaattacatcaagttttaaatattgcatgtagttggaccaatagaaattaatcttgggtagttgcgtacagtgcattcaatgatgctcatttactcttggcacaaataaacaaagatgcacttgttagaggatgatcattttggaaagactttaaaaaccttatgtgatgattaaaatgggatagagggagtataacacaaataagtagagcacacaattatcagtatgatgggacaaacctgagcaattgacacttgagcagggctccatgttctcaagcttagcagtgattcaggcctcacaacaacccaccaccaccttgttcagtatcctagtagagtcttgagttggtatttttttaacaacattactagaaatatgaactcccagcaatgacgccagaaacaaccctagtatatatatagttacagaagggatccgcaagcgcacggatatatcattgtaatatttcacccggaagtatttgtcagggttatggataccacatacctaatagtagttgactaagcacggcagagcccaccacataccatgtcttatacggaatcatacctcgtatataggagttccggataaggaaggatgattagagttctatatagaaacgacaatgactactcggattgtatccatattggtctccctaattctacttgaacaaggtgacatctatgggtataaatacaagccccctaggaggagaggggacacgccacaaagcaaacaacaacaacagatcaacacaaatcgatacaagccagcacacgccaagacaagccaccggatatcgacatcagagataagcctagactgtcacgtccagaaattcccgaatagaattccaagcagaatgtgcattaaaatccccgtccaggaccggccggggtacacaaacgacaatgttgacattcagatccacgtcttacaaacatcataaacgtcttacataaatgcagcgaaaaacgaaagacaacaagagctaagccttgactagaactgcagcgggaacaccactccacaagcatcctcgacggcacggacgaagcctatcctcggagaaacctccatctgacacatactcgtactctggggttgggaaaaatagagcaagactgagtactacccactgtactcagcaagtcataccggaataggggtatgatgcagggaattatcaaaggagagctagggtggttcatttgcataaagcgagcattcataaatagaagtttaaagaagaaaacagtcataataattaatcaatattaatcatccactgtccaacgctataccacgttgcgacaggccccaccatccacctatactatccaatttcaaaagactaaactagggtgagactaatcacggtgaatctggttgaccgcccataaccgcgggcacgactattcgaatagttttactctgatcagaggtgtacaactgtacccacaagacacagccccacgacacgttttcgtgcgccgacatgccaccacgacataccggaaagaggccatgacaggacccttcgcataaccccctctaaccaagcacaccacacctcaggtttcacccccactcctcgcaaggcagcgggcagtcccctctcgtgcctaggtgaatccggaagcgacagaggccgtcgcagggcccgccccgctccatcacgcccacccttgcctggatgcgtcagctagaggaaagctacactacaagccccgccgttgcccacgctggcttgtggtaagtacgataagttcttccagggcatcacgctaaccggtccttaactgccatgggtgtgaccagcaaaaccatgcacccacagcccaccatatgatttattttaattaaccaacaccaaagcggtggcactaatccaacaataccattagaaccaacagtctaaacattaataggattttccccactgtgtactagttgaactaagcatggctaagcaactcctagtccaacgtctattcatgttacaacccaagctaacaaaggagcaaggtaccaaaatagcatggctgtaacaataggtaaacatctcataataacattataaaacgatgcagtatttgaagaaaaacaatagagcatttgcaatataggatcaacatgttcaagtgacaagcatgacttgccttgctctgctgctggaggaacctcggcgactatttcgaagtacaccggagcgtcggaagaaccggaatctaagcgacatacaaagcaaacaatgcaaacaggctataagactactgaaacagagaacaaaaccatttttaatggattctacacatttttcttgatttactgagacttgaatgggcttaaacagagctcggatgaattagttatgaattttagaagattcactgtgtttattactataacaaaaagtccttaaataatttattgcgcaacaactcccagggctgacgtcatcaaggggggtggcgccgatgggcgggtcccactggtcagtgtctcgggagagaggggaaggggcggcggcacgtgggccccactcggcagcggctcaaggggagggaacggttggcaagcgggccccacagccccggctccacgggccagtgtacaggccaggcccggcatcaagccggccgaccggccatggcaaagcggcggcgcgcgcatgcgaccgccggagacggcaaacggcggcgcggacggcgggcgacggggaaaaaagggaaggaaaggaaggggaggggagacctcaccggaggggcggcaacggccggcggcggaaaacgagggaggcggcgaagaccggcgatgccgaggtgcggacgagcgacggcgacacctagggaaaaagagaggaggaattaggacggagggaaaccctcacggcgaccatccacgccggccggagtcggaggggagagagaactcaccggcgacacgagggagatggggtttcggtgggattccggcgacgcaaagcggcggccgggaaaggtcttgcggcggcgaagctaggggtggcggtggcttagcgcggcgacggctctagcggcggtggcacacggccggagtgcggcggcgggcggcggcgcaagcggcggcggtgcgagctcggtagggggcacgggatggagcggtgagagcggaaaacgagagaggagggcacggggagcattttataggcggagggggaggcggacgtggccgggaggcgccccgatttcgccggcgacgtgggggaggagagagagaaggtgggggcgattcaaaatcgaatcccgcccctactcgtgcgcgagcgcggccggaagacgcggggagagggggcggcgacgtggcgtgggcacgggcgacgcggcgtgggcgcggggaaagcggaggagtgggtgcggcggcggcggtttcggcggggtggtgaccggcgcgggcggcgggaggttaggggaggacccgacaggtgggccccacctgtcggtgaccccgggagaggagggaggcggggcggcctgactgggcctcggcctacggccggcccaacgggagaaaggggagaaaaaggaggaatgggccggcggcccattcaaaggaaaagaaaaaagaaaaagaaaaaaaagaaaagaaaagaaagaaaaaggaaaaagaaggaaaaaggatttttcctggattaaaattgcatgtgctcaattttaattggttaaaattatttcgagagctctgaaaattccactaaaaatcttg

SEQ ID NO: 1513 - DNA, 1870 bp, Oryza sativa
tggattccccgacgacaaaatactcgacgatttcggctgtggggagatttaacccgaccgaaatatgtctttcgacgagatcggaaccatcatcgccaactattcgatctgtcaagatcgaccaaacttcaagacatcatctccgcggatcacgtcaattttaaggttgtcagtcatggtgcttcgtcgtagattgaacaacctcgccgccgcgaaggatgtggacgccaaacttttcgtcgtgttacaaccaaccgagtctgattactgtgaggctaatccgagcagatatatgctttgattaaactccatctcggactcgcgatttgctaaacagacgaaaaactatgacgcattgcttcgctgacttgctgtgatcaagtcagattaatctgatggcatagcatgcttacgataggaccgtgtacagtaatctgatgccataggtacgagtgcatacgtacagaggtggaccatctacacgtgctgatagctgaggataatccagatcaactaagaggtaattagtaggattaaattttaaattaatctactgattttgtagatatatctaacatatatctacacaggtacgtaatattttatatacaatttatcatgcatattttcagatcatacaatattgtcagatcaatgatttattatgtttacctagagcatgttctttatacaatatctattatgcaagcattccctatattaggccgactacggtctaatactgggggctcgctctattccttttatataaatcatacttgtttacggtttacataatatctgatatttaatctgctcgttatatcctgataatactaaaagattcatgccgttttttagtacatactcgatattctctgctatatattgtcttctagaaaatatttttcaggaacaattgagcactcgagtaggttgtggccaagtacacccattatcaagaacgttctcgaaaaatgctgagttgtcgcacccaactcctggttatcgaccagacaattgtagcgacatctcgccgcctatcaatttaaattcacttatattccaatgaactccatatatcgttgtcaaaggctccatatctttacggtcttacactgggatcgaccaagtgagtacggtaaatattgataagaggagtcacagataacaagagatactctcacgaatacggtttgtttccgtatgcctctcaattgcctataggtgatcgagatacgcttacacctggtcatcaaccagtagatagtagcgatctctcaccaccaaaaatccattttcaggtgatcgagatacacctactcctggtccttgaccagtcggttccaacaatctctcgacatctaacgtgataatcaacatgattgtgatagcgacagccaagaccgactagatcgccgttgtcaccaggacgacaacgtctaggactaatgacaccaagacgacaacggacaaggttaacgacatcacgacatcacacgatgacgacgaaactctagatccccggacttctagagagcccgaggacgaggtagtaggtccaggagccgaacctccaactacgataattcctcattgtcttcgttgtcatcaggagacagttctcgcaggtcacgagaatgtcgtctatctattactctggattccatacaagtggtcaaggtacgactacgactggtctttgggcctgtttgggggagcttaagattctgagaagcagctgctgagaagctacctggtgagaatctagagaagctgggaaacccagcttctggcttctaattcatttttccagattctacaactacagattctcagaatctgggtaaaaagctagactgtttggggg

SEQ ID NO: 1514 - DNA, 6245 bp, Oryza sativa
  unsure (1)..(6245): unsure at all n locations
atgcataaataatatgtggaactaacaaacatgctatgtagacaagatcatggttaaacgagatttttgaccgggatgatacaataaagtaagtttaataaagcaagtttagggatctcgacacacgttttacaagttcgtagacacaggtgaaacctcgtttaaagtttaagggccgctgatgcaatttactctaaaattaatgtgattgattgtaggagagtttttaattggtacaaagaaatagatagatatatacctgcaatgtatatgaagtcctaaatattatattgtgcaacttgtgggatgcatgtatgcagaactccattctcacatctcactgcatcacctaatcctaattatcctacagatatgaggcattcccttcaccatgtctcttcttattcttcgaaacatatataatcctatagtgtcctataatgtttctgaactagtgtgatggcgtacttcctgtacttaaaataagttaattgcaggtttgaagcgaatgatcttaatatatatgcctaattgtgttagttgtatattcttctaaacactacagaagtttaagcagtaagattagtgaacaaattctctcgatcggagcaatatttaagctagctttcggtatatcctttccaatttattcaaagatcctcgacatataccagaacaaatacgtacacatgttccaaatttccagtgaatgaaacaaaagttaaacaggcaatgattcactatctgctttcacaggtatatgtgtatttgttagtgtatggaagcaattgattaagaatacatggtgccatttgtcatgcaacaagttaatcgatcgattattaattttatggcagctgcaaggaaacaaatcacacttatacgctaatttgtgtttgccttcttttatgtactttcatgtatagaaagttaactcattaaattatgaactccattgtgtgtcgatcagtattgatcaagaatataaaaccatcttctagcaaacctgttttgtagtactgtttttctccgtttcttgttttatcttttgacttagatgtgtcgctttacttctgcagacggccggcacgtacacgagcgaattaataatttctgctttacatatacacgcggtatatatatcgatatatacgttgttaattactacctctgttttttattatataatggcattaaccctttttacatacgtttgactattcatctttttctttaaattttttgtgtaaatataaaagatttaggtttaagtcatgcttaaagaatatttgatgataaatcaagttacaataaaataaataataattacataaattttgaaaaaaaaaataatggtcaaacgtatataaaaaatcaatggcatcatatatattattaaaaaccgaaaggaataattcgaaagcagtaataatatagaataggacgatcgacgtgcaaaagtcgtccatttcgatcgatacctttgcagatcgattttgtcttgactcactaagcgtcatctgatgagccaaacatatcagatgaagcgacatatctctacagcaaacgagctatctgctaggagttgcacgcatcagtccaaaccaacgacatgcaagcaagctagctacacatatcgaaccatgcatcaagtacgtcagattcagtgttaaccggtaaaacaaataaactattagtagctcctatacaagtcatggaatattcagatctacaaataaatcacctgaggatcgatatatctactagctagctaaaattaaattgaacacacctgaattcacaaagttaataatcagaggaagcatctaataattaataaacatgtaatgcaagaacaataaatgccaattaattcctccaaattaattttctagtaataactggtgattgattaacttaatccatctgatgtgttttgctacctcctctccctactacacacgtacgttgctggctgaaaaaccctaagtacgtacacgcgcgcgctgcttcctcttcccattcaacccgcacgtgcgatatgcatgatccatattgtgtattgcatgcacgatgcatcgcaggctcgatgatttgcagcaatggcggatttggacttgttggatcgatcgatctcatggcttccacgcgctcgcccacacgacaggctgctccttccacgcaaggaacgctccggcagcagcggcgccggcggcgtcgtccgtggcaccgccggcgtcccgcatcgaccagccctccttgtaccgccggagaagcgaccgcacgtcgtcggcgacgtcctcgctgaatgccgccggcgagaaccccgccgaccgcatgcgccgcgcccacgacgcggcggtctcccggcgctcggcggactgggaggccgggcatgacacgaggtcgacgatggcacggccgaccgccctctccagtgacagcctctcgttgcttgtcttggggaagctctcctccagcgagtccatgtacgccgagaagaagcggaggccctcgccgaacaccttgacgaacgcggcgtcggtgtcggcctccgacgacgcgtccgcctccggcgccgccaggtcggcctcctcctccacgacggtgaccacgcgcggctccaggcgccggagcgacgccacgaacgcgtcgcgcccccgcgcgaccccgcgcagcgcgtttacgcagttgacggcgagcgcggcggtggcgccgccctcgcggaggtccagcgcggcgaggtcgaggtcggccaggtcccccgagtggtgcacggcgcggaagctgaacgggacgcccatcagccgcgcgaacttctcgaggcgctgcccgatctcccgcatcacgcgctgcgcggccgccgacggcgccgccgtgggcacgacggtggtgatggacaggtgcggcgtgtcgtccgaggaccgggtggccagcgcctccaggagggtcggccactgcgtgcagaacgtgttgctcaggtcgaggatgtgcagccgcgtcggcggcgtcgacgatgaagacgacgaggaggaggaggcggcggcgcccgccgccgcggcctccaggaacgactcgagtatggcgccgttggcggcgacgtgcccgaacggcgtccacgggctgagctcctggaacttgagcgccgtgcggcgcgtggagtcgaacgacgcgttccggtccgacgcggtggcgagcgtccgcagcgtgcgcgggccggaggtggtgagccgcgcgaagaggccctgcaggaagtaggaggccagcttctggtcgacgtcgccgtacggcgaggccagctcgttgagcatccacatgagctgctgcacgcgctggctgtcgcgccccgccaccgcgcgcgcgcactccatcagcagctgcgccgcccacctccccgacgacgacggcgctgccccggcgccggcgccagcaccggacgacgacggaacggccggagagccgccgaagtcgaggctgatatcaacctgcgggaacgagaagtccgccgcctcaaacagcccgtgcccgcccgcggacgacgtcgtcgccgacggaggaggaggcaccggcgccgacgacggcgcgcccgttcccgagtggaactggcgggaggaagacgaggaggagaagtcttcatccatgtaaaactggtggccgttgccgcattcttctaggtacgccgccggctgctgctcctccgcgtagtagtaccctccgccgccgcctccaccaccctggtaatagtagttggtgttgctattattgttgtagtgggagtgggagtggtggtagtaggtgtggttgtgggtgtggtgggaggagggggagctggtgctccctcgcgaggaggggtacgacttgtgcggctggtccggcggcgacggtgaggccgcgtgctggtggtggtgatggtggtggaggctaaccaacctgaagagggtatccatctagacctaagacacctgcagtagtagtagccaacatatggccggggtgcaaactgcagtgcagtgtagtagctactcactggctaccaccatacagcacagcagctactacaacaatctttctcacctcactacactgtcctgcaacaactgatcatcgatggatgcaaaggggatctaaactagctagttgtgttgtgtttaccatgcaatgcaaatgagtgaaatggtggtgacatggggttataaacatgcaaagggaagcaaaccaacaatctacttggcttgctacttgtgatgtgaaatggtaggagcacagcttggtcaattctgaggagcctgctgggccggcccccatctattattctttttatcccactggctctctcaccctctatctgtctctctgcttttttttttgtgggaccgaggagggagggaagagtgctgttgttattgggggattttctagcaaccgcttttactgggtgcgagagagaaagaggggactcttctcttctttgcaggtagcgatctcctcttatcgtggctttggctccttcagctttggtaaagggataaagtggtgacagtaggattatgcacgacagacacacagacagacatatactagccggcactaatacgtatacggacgactagaagcatttgaaaattcttccttgtcgctatctgcctctccttatgcccttggtatatattatttttacaattgagacacgacctctttcggttgatctccatattacctaaagagccacggtaagcgctaacagtactttctacattttttcatatctatccggtgcctataagtgaagagcaagtttagtatggccagctatgggctctaaatcatctatagttaattctaatagtcaagtcatataatggttagctataaacatatactacacaattaatacctagtcccatctatcatacacatgtcactggtggagaaaccatccttcgtcggtcggccgaattccacaatagtcccggttgcaataaaaaccagggctaaagatgatctttagtcccggttaaaaagggtaacggccatatttgatctttagtcccggttggtaagatcatctttagtcctggttcaaatgctgtcagggcttgtcaggcccccctgggatctttagtcccggttggttacgctgagactaaagatcccggggatctatagccccggttcataaccacctaacccgggacataaaaagtccccaacccgcgtataatataatgtacttacttccctccctcccagactgccccgagccaagccttccaaagatttgcattccaaaaaagcagcgggagnngtccatgcccaaaagtttnctagatgagattgtattttggtgatctatataccaaatccggaggtgcctaaaaggttagcaacttcatcctcccaatgttttttttgtcatattacatttggagctatgttttgcacacttttttgtctccaaaatttagttgtaagttgatgagagagaaaatttgtgtgggggaagaaagaatatatagaaatttagtttatttgctaaagaaggtttttataaaatagttgagaaggaaaaatatagtgaaagttaatcttaaataatagaaaacaaactaaaatgaaaattaaaagaagtacaacacattaatattagtttaaaactttagaaatagtaaataagaattatttggtgtaatattttataatttttgtatgaataatgatatgtcattattgtatgactgttgaaagagtttgtaattattttaaaactgtcattattgtacgaataattatttgtgtacgattttttttcatctcatgtagatggatcggcaatggatgtacgctaaccggcggtccaaagagtttattgacggcgtgcattattttttgagagtggccaaagctaacaggcataagggttttatttgttatccatgcaataagtgtaagaatcataaggagtattctgcatccaggactattcatttccacttgtttgagtcgggcttcatgccaagctataactgttggacatcccacggagagcaaggggttgaaatggaagaagatgaagtggaagacgacaatattccggactttgctcagtacgctggatttgaaggaaatcaaacgggcgaggaggaaagggatgctgatggtaacgacattgcggatgatcttggttagatgttgcaggatgctaaggaggactgcgaaagtgaaaagggggcctataaattggacaa

SEQ ID NO: 1515 - DNA, 582 bp, Oryza sativa
ttgacatgttaaatctgccctttacgtcaagatcttattgcatctaaatatattaagcttctgtttggtatattctatttgttttaatatattaacgtagagttgtatcggagtattagccgatacatgctagatctatctgatcggctatgctatgaacatatatagtcttgttgttaatatatatttcgatctaagtgattaatactgtctcggcacggcgaccgatctatcccaatcacttgatttaagtatatatcgacaccaggattatatattgttaatatctacagccgatcgagtagatttaattctttattatctattcataattgccgattgatttacatatgacattggctcaaagataaatgatacgtcatcggcacctagctgaccggctatcatttatgtacttaaccacggtctcttttgtctttatttcttgttgattgcaggatcaaatcaactggcatgctagcatacctaaaggcaagttttggacctgcactggagttaagcagatcccccaggcctcgtgtttttcatcaacatgcttttggcacgcctggtgggacctat

SEQ ID NO: 1516 - DNA, 1105 bp, Oryza sativa
cactagttggataacgcaagtactcgtctccaaaattctcaacaatagtggtactatcagcaatttgcagatattcatcttgagtgtcggctgcgactccattggttatcattctaagtgtggtggcaatctttaccaatggtaatatacccatagtacttgcagcatttctttttagcacaaaataatcatcatgggctaccacatcattaactatgcgcaagaaaagatgacaactcaatctaaacctgtgcaacaaaatgcgaattaataaagttgcctacaaaacagaatcaaccaaaatatgtaaattaattgcaaaccttcgccggaataagactgggccgtatgtaggattcggcgagaagtagtcgtgctgcaaccgttcatagctggctcgatgattacgtcgaacaacttgacgacaaggaacagaaccacctcaccgacaacgtcgagcattcgactgctcatattcatcttgcgcgactattgctgcagcagcgatgatggtctcatcgtcggatgatgatgattcatccaacaaaacacgtctcaaaagagagctcattgagtgatggaagaatcatgcacaataatttgcatggtgcaaaaagatagcaagcaatgtagtggtatatatagagatgatgcatgtctgtgctagccgttgcaatttgctagccgttgcacattttcaattagctagctagctgttggcaatgtagccgttgcaaatgtagtcattcaatgcacaaaaaaaatgcttcactcattttaaatatatcaattaaaaagatttctgttaaaatttaattgaaatattatcacgataaataacatctttaaaattaagtagttcaaaatatatctcttaaaatataaatgtaaggttagttgaaagatattactaaaatataggatgatgggatatggatgatctgttggagttggaagggatatggatgaggaatctttttttggatgatactccatatggacgtttcgaggccaatatagatgagctgctggggatgctctaacaaaccatgctgaagctgacaaatcctagcccccagccgtgaagttggaaaagtcaatttcc

SEQ ID NO: 1517 - DNA, 4478 bp, Oryza sativa
tgtattatgtctgtaagaattttattctacactagcatcttaacctttactcaaggacgagtaaagagctaagtgtggggggtttgttggcagctgttaaatgccaattctatgctgcaaacacctacataatacatagttaataatacatccaacatagtggtaggacttaattctaacaaattccatgagtgttggtgtatatttggatgcaggtaataaactgccgaagttgggatgaaaatcagacttaagtgaaggaagaattctatccataccagagtgggccttaaacttcatctaaacgtcagaaaatgggcccaactagggtttggccgaaccccaatcttagtcattcaggctgaggtttggcatgggcgttccagacgctctactgatggcggttgcggggcatttcagacattttgcgttttccgaccatcatgacctacctatttaaggaccctctctccctcacttcacacacacactccaagcttgagctgaattataagaggctctattgtactttattgtatactagaattagggagaaagtagagtagaagaagtcggaggaatttcggagttgtcggtagtcctctcttatttcttatactttgttaattactatgctttaatagaattatcattctgagtaattaagatttactcggtgataattaattcctggttagttcctaattaacgtgcaggataattgatcactatagtccagcaaaatatagtggttgctttagtgtttagctagcgctaaagtagatattaattgcgtagacgtggttgtcgacgtttgagatcatgactacggtattttgcatagtatggggatcgttggtaccagggtatatgcgagattgaggtaaaagagatggagatagggatttttatacatgtttgggccccttatctaacaggtaatagccctacatcctgttggctgaagccggtgttgctctttattcatctggatcacacaagtacaatatttgggataacctatctagctgtcattgacttggcggctagataaccaactcatagtcgacgacaggtagtcttcctcctcgaatccgcactcggcgagatcaaagatagcactatatccctcttgccggcctccgtaggcgccgaatggggtatgtctaggctaatctctgatgtcgatatttggtggcgcattagtttgtattggtttgtggctttgtgggtttgtggctcgtctcctctcctcctagggggttgtatttatacctataggtgcccccttgtccaagtagaactagggagataaatatggatatgatctaagtagtcctcgtcgtttccatgtataactctattagtccttccttatctggaactccttctatatacaaggtttgtttccgtataagacatggtatgtggtgggccctaccaagcttagtcgattactattgggtatgtggtattcataaccctgacagtatccccccgacttcaatgtaaatgaacgagttaaggttctcgatcgaagactttggaacaactattgttgtgctcgcttgaccattctcggtgtgatcagaaataacgctagattcttcttatcggtctttgtaggcaccatattgggtttgtctaggtcaatcttcgatgttgaccgagaaggtacggagcatgtgactaagtctcccgtcttgccgtaatcgagaatttggattgaagtcaagaaatctcgtctcggcgggtacactatcgcttcattccatattccttgtcaagccccatcaaccgttctcgagtaatcgagtaggcgtagagtctgcgacaaagccgtgaaatctgacttgattgttctgatgtctgattttccctgaaatcaatactcagaacatttgtcgtactcgcttagtcgatgccggtgtagaaccgtagagacatggagtcttcgataatgttgaatagaactcccccgagcgagcgctcaagggtaacatgatataatatgtatggaaaaattgaaaataaattgaatctgcgtgtgacaataaaagagtactctcgctagagttgccctcagcaaacgaagtttggtactcttcctagcccacagctgtttttatggaaaagccattttccacaaagacagcttgaatcttataagagcatccctagcagatcatggaaccgatcctccatcccagttttggcgtgtaggggtgaaaaaacgcgctccagcggatgtgctaacccacacgccaaaattggcggatgcgccatagtaggagagagaagaggtaaaaatagcgtatgtctctcttcacgccatttcgcccaaacgactctagatcgagatcccaccaccatcgggacttcggcaagaacctcccctccggcgcgagctccccccctccagcgcgagctcagcaccggcgcgccttcccctccatcgtcgtcgtcccgatccggcgtacgtgagttccccgtgcccattttttgattttttttcagcgatttatggagcgagcttacaagatctggggcgccgtcgctgtgctcccgccgccttccacctccggcgtgcgcgtggccgccgccctgcgcctgccagccgctaccctgcgcctgccagccgccgccgctccgcgcccgtgagccgacgccacccctcgcttgccgccgttgccctgcgcccgcaatccgccaccggcacccctcaccagagccgctagtgccagccttgagcagccagccgctggcgcccctgaccagccgctgctgcccctgaccagccagccgccgccgccccttgccaaccggcgtcccagatccgccagcgccacccagcgccgccccttgccagccgctgccgccctgcggccgtgagccaccggcgcgcctcccttgccgccgctggtcgcccctgagcagcccgccgttgccgcccctcaccatctcccccatccctctgcctgccctgtttggtagagaagaggttttgagagcaaagaagagcagaaactatagtatgttaagtgaagataagagctcttttcagtatagacaccacacttgagcagagaaatatagtatgttgatttttgtgaatttatgttcattgagcatatatatataataggaattaagtacaaactagatttatgttgctatattgcttgcttttatcttcattttatttatgttgctacgatttttcttgctaggtgaatccatggacagctatgttaatttgttgggctcaaacattgatgtagaaacttgggatcctagtcaaaattttccccaaactggacagcaaccacaatatagtcctatggttggtgaacagccaagtgctgaagttgggggtcctctagacccaacaataagagatccaaaatttcagcattgcggaaggtaaaatgttggtgtagcttggctgaatacaactttagatgcaatcacaggagctgagcaacaccgtgactcctactaggcaaggattcatcaatacttccatgaaaacaaagatttcctctctaatcgtaaccaaaattcacttaacaaccgttggggtacaattcaataatacgttaataagttttgtgggtactatgagcagattcttaatagacctcaaaatggaatgactgttcaagattatgtatgcatctaattcagctcgcatcttgccaattaatgcaaatcactcaggctactactttgtacaagtcagaagagaagaagacattttctttaatgtactgttgggagattttgcatcatcatccaaagtggaatgataggttgtcccagaaaaaacagaaagcgaatgtcgatcctttggtgataccatctgcaaggacaaactccagggaatttcattgcagccctgacattagtatctctgatcctttggtgagaccacctgggaggaaggtggaaaaggcaaaacgcgctcgaggtgatacttcttcatgctcaagtgagagtagtcttgtagttattgcattaactaacatgtggtcggagaaaaaggagatgagtgcacaatctagggaggaaagaaatgaccggttgggtgaagttatttcactagagaaagagaggttgaaaatagaaaaatgaaagttagatttagaaacccatgaaagagaagagagaattatgaacatggatcttcgtgctatggatgggccaagaaaagcttattacttgcgtttgcaagaggagatcataaaggctcatatggattgagttcatgatgtatggatatgtgatacgtattgctatttcctaatgagttgtgaacttttatgttgtgtgccgtgtaggcatgtgtcaattatgtactgatgcttgtaagaactgtatgagttgtgaacttttaagttgtaggtatgtgacatttatgttgtatggaagaatggtatgattaattgtgagcacatacatgttgcatacatcattag

SEQ ID NO: 1518 - DNA, 865 bp, Oryza sativa
gaggccgcgctaccgccgccggctccgtgtcaccctcatcccccaccgccgccgcctcagcgtcacccgccggccaccgccgccgcagctccgtgtccgcctcccgcccgtgagagaggaatagtgagagagagagaagagaagagagaggaagagtgagagagaggaagagtatgacatgtaggtcccgttatttttttaatgaatagaatgctgactcagctgccacgcgtacgccacgtagaccaaaaccaccgtggattgggtcgagagggtaattcgtccggtttgcatagttgggggtgaagaatgtccggttttgtgattcaggggggtaattcagacgactgtgatagttcgggggaggtaattcgtactttttccttctaaatatcatccacaactggactcatgttgtgagtacgaccatataattaataatgtgaaataccatccacaactttagtattttgacagtgtatgtttctaaaacaataggtggttgacacaatttctaagtgttttcttttccagttttctaacttttttttgaccaagagttttctaaagaggagagcatatatccttgaggtttcatagcacacctcatttcggtgattgcattaatttctatccataaacgacacgacttgaaattcattgcttttaaacaatagtattaatcttcctattgtgcttcttcatcggcatgtcatcgcaaatcccaaagcaatttacataaaaatgtactatattatactccctcaatctacttttgatagacatatttccaaatctgaaaaatttagttttgatagacatatttcaatccaaccacctatcctcttattgactttctcggatt

SEQ ID NO: 1519 - DNA, 9910 bp, Oryza sativa
tctcagcctgcacacgagccaatccgcagcaagttggcagataaataaattctcattagacagaataaattgatccacaaacaacgtgtgaacattcttaatttcagactccagccaattatacatagcatacaacacttgagatgcaatggagaaggacccagacaatatatcaggcaaggcacaaataataattcaaccaaacaaattaaaaatatgaaatatgtttcagttaagatactacaagaatgtaaaacaaagacttaaataatctaaggtcacttacatgagtgagaaaggaaaatcctcaatttcaatctaaacggagggtgtacaaatttacaaaatcaaaatgggtatggcatcataatcttacctcctcgacatgctgggcatcaccaagcatgcagaccttcatcttggggcgggggatatggggcagcttgacggagccgctgaaacgcttgtccttttgcgggtcatagttcttgagaccaatctgaagctcaacggtctcggtgaacttcctgcccttctccttggattccccaacaacctgggagatggcttccttgagaacctcgctctgcaacttactgcaattgatcacgcaagctcagcacgtgaattttgttcaggaaacaaagaacgagcatttcttataccgatcagtaacctatattcagacataatctagctagcgccactgatctctagcgagaagcagaaaactctagatcatgcaaggtgtacagctacgtgatcccagtctatctcgagatccatcgctttaatgagacataaactaaacaaatcgtccgaattccatatcatcttcttacatcttaataagagctttgatctaacaaagcaagcgcgcagaatcacagaaggccatagcgacagaaactaagcaatagaagagattcgttaaccgtaagaagggaagtagagattgggcggcgggaatcacctcatgatgatcggcggcggcggcggcggagggtcagggagcgaaacggcgcgagaggagagaaggcggcgagtgaggatgcgtgctcccgacctagggtttttgtggctgcatgctctgtgccgtttcgaccgtccgatcggatcggacggtggagattgacgccggtgggcttcctttcgtcgtgggccgaaacataaagggcccattccacatatggcggtcgcgcatctcaatctcaaaaaaaaaaaaaaaaggaaaaaaacctccactacgcaaatcgtcgtcgtcttcctccgccgaattccccaccccaccggcggcgcgaccgggcggagatgtaccacccgacgagaggcggcgtccgcggcggacgggatcgtaagctctctccttctcctacctttcccaaatccactcgccgtgagatctcaatcgctggctgcgggccctaattctgccgcgtaatttttttacttccgtgaaacactcgctagggtttcgatgctgttgctagggactcgctgtggctgtaaggttctagttgttgatttgtcgatgctccttcctcgcgtttgattgcatctcgtccggtcttacttgttggttccaactcgtccgtgttgcactggattcgattagctagttcgtctcttgtgtctatgtggttagtgcgtaggatcttaccttccaactcatctgtttgcttgtatgatcttgcatcaggaggaattctgtgtctgccatattgttattgaatcatgttcctttgaaaggttataagatggaaactgcacatggcgcggtcacgcacgtatgcctgcccgcattcagcacccttcggcacgcgtgttcacctttatctcttctctatccaattgataccaagttcctcattggtatccgacattgttttttagtttaaaaacaatggtcataagatgaatggatgaccccattgcaagggatcctcgtgtgacagactgacagtcggatcatcaagggacaacaactactggggttacaacgtactgctgccaaaattaccttaatgaatggtggcatggcaataccagtcatcaggatgaaacatgacactataaaattagtattagcacttctatatgctggatgtatgagctttccaaaatttacgcgagtttttcgacttttgtgggcatatactatggatatgcatttgtttggtgcaatgtacggcccttattaatgtgctcccagctctaggatatcatgtatatagctttaggatatcatggaatattcaggtttactctctgtatttcgatgtgttttatgctttataatggtaaggttcatcctcatgctgcatgagcaaaaagctgctagatacctacaagatacaatgaggtgagaaaatgatccaaattacattgattacaattgctgcatctgaaagagaaaatcatcactttttttttggggggggggggggttcatttataggcttgtactatataactactttgtatatgataaactcactagattatcatcacttatgggcatcatcggtgccctaattgtataaccttatgcttactattcaactttacaagcgctataaataatgagtgcagcccgttagctcctccaattgcacctgtggttcttcattttgtactatgaacataaagctaccttttctcaaacagaaaagcgtgcactggactactcctacacctgccaacatgaataggcctacattttgatcgtttgtttttgctataagctcttctacatgttgttctgttccactgccattgtgtcatctccatcttgcactttgcattgtagcttacgagcttttttgttatatgggttgaacatacaattattagaaaagctcagtaaatctaaatacttttctccttttgttccttgcagaattcaaatgggatgatgttaaggttgacaagcaccgagagaattacctcggtcatagcattaaggctcctgttggaagatggcagaaaggtaaatataacaataccccttgtttacatccacctttgttggctggctagtccttataaaacaatggttttttactgctcgacatgaagtggtttttcttcttcttcttcttcttcttttttatgtcacatggtctaattaaattgttaaaaatatcttatctcttactgtagtttcctacttgaccttgatttagctgtactgttagtctactagattagtgaataccagttgtcccatgtccagaaatcaagagtggctaatcacatctccctcaagttgttcaggttaacactatcattttgtgtataccgggacattacctttgatataattgaactggaatattatgtatttttagtgcgacaagtgcgtaactgttgaaacataagcaggcatttgtcagggttagcacgaactaaacaaaagcgctggcattctatttattgaccttctagctgatacaaataaagtgctatggcatccttttttattttatggattccagatacaaattaaaattagtcattcatgtttttcgaccttctagttatttatcaactggaagaaatgttggtcttgtgagcagtgaatttgtgaaccgtaggtgcattcagtgagttcaatattggcatgtgttgttttgttaccagctcaagtgagtttgtaattgtaccttagaaacctcgttttggcttgataatagtaggctaatagcaatagatctccttttttagctgggcttggccaaatgttttgataagccttcaactaaagtggattggaatgtcaatgcttgttttacttttttaagtcctgttattttaatgtataaccctgtggattctaagttattgatacgagagactgattatctcggccagggaaggacctgttctggtatacaaaagataagaaatctgactcagaagatgctctcaaggaagaaatcaggagagtgaaggaagaggaggagcagtccatgcgggaggcacttggcttagttcctaagcgtagtagtcgacctaagggcaaccgattagataagcatgagtacgcagagcttattaagcgaggatcaactgcagaagacttgggtgctggacatgctgaagcagcacaagtgcagggtctaggtttatacaagtaagttcatgctgcaatagtttcaaacccactttaaatcatccttattatatagtggtcatataatcgaacttatctgaaaagttttttctagtgatatttgatgaattactaataatataatcataatgcacattatctcaggggtcctcgcagagaggaagaatcgagctcctttaaccttgatcctccagaaatggtgcccgctgagcaggctgacaaccctccaccggaaaccaaaccggaacgtgaagattccgatgatgatcgtaggagcaaaagggggcgtgaggagaggggaggggagaaagagcggaagcgagaaaggcactcggaaggaaaggagaggaggcgtgacaagcaagagaagaggagtcggcatgagtcggacgacaggtcgaagcgccaccgcaaagacaagcacaagaggaggcatgactctgattccgactagttactgcggctctttcaacctgtctcactgtatcctgccatcatatttcatgccttgctacgtttgcttgatgatgatgtagttgtaaaaacagcttgtatactcttcttgaatacattgtctgtttttaacttgcacatgagaaatatgttgaacctgtaacatcagcggtgcattttggcaatcttctttctgcctatccttgtcttgtgcatttccatcttcacgggatgttaagtgttacggtgtgtagttcacatcaaaattagaagtttaattaaaattaaaacgatgtgacggaaaggttactccctctgttccaaaaaataacaatcttatactggatgagacacatcctaggacaacgattgtccagattcgattcgttgtattagtatgtgtcccatatagtataaggctgctatattttgggacggagggtgtgctctgcttattagttatttcttcaacgatccagtgaaaaccattcttaaatttaacaaacgtttaacacgttaagcggctaattatccaaccagaatttcccaggaggaacacgcagattagcaaaggaaaaataaataaaactagctgagtcaactctctctgtcgtcatcttcttcgtgtgtgcagtgtgcgagtaactcgactcgacgaagggcaaatacgtaactttctcggcaggagaggagttgggttgattcgcagcaaaggcacggcacggcacgcacgcactcgaattcaccttcaccttcagcgcgagccgcgagcgagagaggaaaagggaagcgacgatctctgcccttctagaaggttcgcctcgtcggtccccttccccccctctcctctcaagcttcagagccctctctctcccttacacgaggcgagatctgctccccttctcccgattcaaccaaccaccacctcatctccgattccccctcttcttcttcttcttcttcctcttcttcttggtggggttagtttctgaatcgtctctactgctaacctccgactctgatgccgcttcctcttcccttctctcctaattcacattctattcggatttcctttttgagggtactctagtctcactagtggagtgattgattggttgattggtgttgttgttgttgggaacacaaattagggtttgggatttcttgactggacgacctcgtgcgatttcgggaggcaggagccatgaacggcaataagcagtccctgatatacagcttcgtggccaagggctccgtcgtgctggccgagcacaccgccttctccggcaacttcagcaccatcgccgtccagtgcctccagaagcttccccccaacacctccaagtccacctactcctgcgatggccacaccttcaacttcctcgtcgaccgcggcttcggtaacacccctcttcttcttattcttatctttctgtgggaactgaactacagtagttagtaattgtgatatctgttgagctcacttgggttattttgggggctgcagtgtttctcgtcgttgcggatgaggccgttggaaggagcgtgccgtttgtgttcctagatagggttaaggaagacttcatgcagcggtatggctccagtatcgacgaggagggtcaacacccgctcgccgatgatgcagatgatgatgacttcctcttggaggaccgatttagcatcgcctacaatcttgaccgggaattcgggtatgaagtcaccatatgctgtgttacctacatatgatgtttctttcttttactagtatcaaatgtgtctttaacatgtgtttttgtgtttgggtatagaccgaggctgaaggatcacatgctgtattgtattaatcatccagaggaaattagcaagctctccaaagtgaaagcacacctcacggaggtcaaagggattatgatggacaacattgagaaggtatgtgctcaaaacagtgctttctttgctgaaagaatatagtatattgtgtacggaaacaattgttgtgtaagtaaggtttcccaaaaactctggattatattgttctagacacctaacagttcccctgttctattcatgtatggccatatttctgtgtgatttatttctttgatgaagtaaacgtggatatcatgtcagggtatgatgtaaacatgtttcaccttttctgctcaatgaaaaatcgcgtaaacttgtttcacctttcctgctcaatgaaaaattgcaaatggaaacattttcaatagttcatgggccacatcccatgctgcttggaagttcctgcagaatattattactgtgtgcagtctatgttgctatgcatagaagtgctctggtgtctgttggtgtgattaatttacgaattgaacaagtaatgatgggatcttgagttttaaaataaagatcagtttttcccccctttttgtgagttagtacatactgttgtcattgtggtgatgaatcgtctgcttattgttttgcccacgtatttgaactttttttttgttacaaagtcttcactatgacagtatggttattggcattctagtttcaatatcttgggatataggagtatcattttagttatgctgactttccaatatagaaacccatgtctagtactcctacccagtatgtaattagtcagtctggcattttacaggaagccagagaatgcaaacaatatttgtggcctcatgtcattttagtatttaactgaatacagaaaaaataaactcctttcttgatgtttcatactactgactcttactgtcctggattttgtatagatattggaacgtggagagaagattgagcttttggtcggcaagactgaaaccttacaatcacaggtatggaaaatctgtgtgaaatttttgtttctgtaagaatgtttaagtaaccatgactaagtggtgtgttttcaaataatcttcaggctgacagcttccacaggcatggaagagagctcaggcgtaagatgtggcttcagaacctgaggtttaagttgatggtgggtggtgctgttgcggcgttgattctcttcctctggctgattatttgcgggggcttcaagtgctagaacattgaaagcctttttctttgttttgcattcgatgtgtttaccgtgtcgtgtgcatatataacgaccagcaaatcctgctttcgatatgcttcgtgcagagttaaatctccttatggacctttattccttgtagcctgttctcatgtttcatagtattacaataggggggctctggaaatggaatacttgtgtaaacaaaccttgtgaaaggagacaacttagctatctgtattatgtacattctgaaatgctaatagcttatttcaatctcattttcattggtcattctcagctggtgtcctaaatgttgattgcgtaccgcgcgtctgcgccagatcatttaactcgctattcatattctgcaattaatcgattctttgaactgtaagggtctatctcaagattaggatggcgcaccgaatttctgattgcatgaaagatatagtttatcttcacaatttgcaaagggagaaaggctatatatgttgatatgcactctgcttctatcaatccctcccgtgctatgtttagcggtgaagcaggtgtggatatacctcaactgacagcatatgatcagtcgaactgaatttcatacggaatgagttagactgactacgcctaatcactttcattgctgccctttttttttctccctcttctagcgttgcgaggtaaatgtattagttagagaattcgagttcctgttatataaatttataaaacttacggaacagaaacaacgcaaagggtgtttggtctagtggtatgattctcgcttcgggtgcgagaggtcgcgagttcgattctcgcaacaccccgttttttttttcccaattttgcttcaacggatgaccaattgcctgtgccatttacctgagtctaattagcagctatttttgacttttatttttcccaccttgtttgtgcatgcaaccgcgtatagaaatattttcacaagataggtatgtcttgtttgaaccaaatatgggttccggcactttgtatcgccaattctgagatatcaccattttttggtggaaataatagtagccaaaattgtctaagtacgagtctatacaacatggtacagattggaggttaaagcaaaaccagtttacttgtgtgaacatagttgtgctctggttagggtccatgtgataaaaatcatagggtacgtacgtttgatggttaaagaaggtacccgtggttagtggtgggtgattttaatgagactctttgacagtttgagcacttctctctgaaacaacgaagtgagccgcagatgcaagcctttagggatgtggtccagagatgtgaactccatgatctggggttctcgggggtgccatacacttacgataacaggagagaaagccgcggcaatgttaaagtgtgcctagaccgcgcccttgcagatgatgggtggaggggactgttctctacagcacaggtgtttcatctgtcctctcctagatcagaccattgccccatccttgtcaaattttattctgaagatcttcgcaggaattttgcgaagtgtgtccattatgaaatttattgggaaagagaccatgcaatctctgaagttatagcagaatcttggggcgtttccggagctaagcaggatctgagcgacattaatcaagctctgtttaggatgatgtctaaccttcgcccatggagtaagaaaaagttcaggaatgtcagccgggagattgagaaaactagaaagaaactatctgaacttcttctaagtaataccgacagcagggaaataagacgggtgtctgatcaaatgaacgaacttctgtaccgtgaggagatgatatggctgcaacgatctcgaattgcttggctgaaagaaggtgatagaaatacacgtttctttcacagcaaagcagtgtggagagcaaagaagaataagattacaaagctacgggatagtgacggtactgttcacaatacgacaaaagagttggaaagcatggcaactgagtatttccaaaggctgttcactgccgaccccagcattgatcattcgagagtcactagcctgataaagccgaaagtcacggatgcgatgaatgaggaactatgcaaaaccgtcagtgaagaggaaattgcaaatgccctgttccaaattggtccattaaaagcacccgggccagatggattccctggtcggttctatcagaggaattgggctatactaaaggacgacattgtgcgagcagtacaagaatttt

SEQ ID NO: 1520 - DNA, 657 bp, Oryza sativa
aagctctttgggtcttgccacaccacgtggaagtggggggacattgacgggaatgaccatcgacatgagcccgtctatgaaagaatcgcaagccgttgttacgtatatccttctctttaaatcatgcagtcaaaccctacgcagaacctctgaatcgatctgtcagaagatcagtcattggggctttgctgctgctttgcatgagccaatcataattcgagggctgcagatggaagagaagtggcgtaccttaacaatcattaaacacctgcagaatgaaaatttcatacgcatacgaaacaatagacacattccttcgttcacaaaataaactgactgatgagttcgttctgtgtgagaaatatacttacttcacaaagatgccaaagttctacgcgccactgttggagactatattgttgtagttcgcgacatgaagctcaacgacagaaggtggaaccgcatgtgcaagactgcgtagagcttctctcaaatcatctttctcaattgtggcactcccgtccctatcgtatctgtcgataatgccctgcatgttgccaccaagaacataaattagcccgataggtaacactcactgaaagtacagactagtaggcatcatgacacctattgattaattgagcaccatataatctt

SEQ ID NO: 1521 - DNA, 7072 bp, Oryza sativa
agttctcaaaacatatgcttcctgcactgggcaattgataaatccttccagatgctccatcatgttcgggcaaagctctcctactgctgtccaaaatcagataaagcagaccctgcagataagtaactcctttgaagataaatatttgggctttccgacgcctgagggaagaatgaccaaaggaaaattcaaaagcctccaagagagattatggaagagaattatgctgtggggtgagaactttctgtcaaccgggggggggaaggagattttgattaaagctgtcctacaggccatgcctgtttatgttatgggactcttcaagctcccggagtcggtctgcgaggaattgacaaaactggttcgtaatttctggtggggagcagagaaagggaagaggagaacgcactggaaatcctgggactgtttgattgatcagaagttaaagggaggtatggggtttagggattttaggctgtttaatcaggcgcttctagctagacaagcctagagattgtttgacagacgggacagtctctgtgctagaattttgaaggccaagtactatccgaacggttctctcattgatacaagttttggaggaaatgcctctccaggctggagagcgatcgaatatggtttagaattactaaagaagggcatcatatggcacattggcaatggtaaatcagtcagattgtggaaggatccctggattccgcggagctattcaagaagacccatctcagctaaaagaaattgcagactgagatgggtttcagacctgattgatcagtccgggtcttgggataatgacaaaatctcacaccatttcctgcccatggacgctgaggccatcctaaacattcatttatcttcaaggctggaggaggacttcattgcttggcatccggatagactggggagattttctgtcaggagtgcttatcatttggcagtagctctagcacaggttaatgatggctcgagttcatccgggaatggaagtagcagagcttgtaatgccctttggaaatgcaatgcgccccaaaaggtgaagatttttgcctggcgagctattactaacagccttacaacattggaaaataagaagaagaggaagcttgaagtttcagacatctgcaccatttgtggggtggagtcagaatatgttgtccacgctttgtttcactgcccacatgcccggcaactctgggaagcgatgagtgatgatatgcagcttaaccctctcagcaacattcacaatggagattcgaaagtgatcctggacctgttggagcagtcgcagccgaaggatcaggttatgcttttaatggtactgtggcgaatctggcacacacggaatgaaatagtgcatggcaaaccagccccaggaatactagtgtccaaacgtttcattgaaagctatgtcctctcccttgctgagatcaagcaacacccccaagcaaatcctgaaaaggggaaacatgttgtggatgtggtcctaaagaagtcgcacagcatcaaacggagtcgagaacctgctcctgacaaatggtcgaagccgctcccaggaagcatgaagctgaatgttgatggctcattccaggagagtgaaggcaagggtggtataggcgctgtgttgcgcaactgcacaggagaggttatttttgctgcttgtggacatgttgatcactgtagcagtgctttggaaatggaactcctcgcctccagggatggtcttgccctcgccctacaatggaccctgctaccaatagtgattgagacagactgcttggcgatggtccatcttttccgcgatgctacaggagctaaatcggagctagcgtttttaatcacggagatagattctctcttggtgggaaatagggatattagctttaataagtgtcttagaagtcaaaatcttattagtcactgtttagcaaataagggccgttgtgacaagatcacacagttctggccggacaataagtgtacttttatctcacagtttatatgtgaggaggctaatgagtaattatccctttcccctgcaaaaaaaaagaaggtacccgtgagatgcaagacttggcaataatcttgtgtataactttgttatattcatgtggatatttgtgtgtgcatgagtatatgtgcacgtcttacttgtacttagaaaaacatcttaattgtatcgttacgtacctttttataatgtcgacgacaactaagatggtgacaacaatattggaccatgtgcgcaacaatgggataaagctactaaggacatctatattgtagtgaaaaagcaggtaataaacaataatatatgctttcttgttagcatacgttgtggtgcctaataatagctactatcaagtactccctcatttcctaaatgtttgacgctgttgacttttttaaacatgtttaaccatttgtcttattcaaaaacttttgtgaaatatgtaaaactatacgtatacattaaagtatatttaacaatgaatcaaatgataggaaaagaattaataattacttaaaatttttaaataagatgaacgatcaaacatgtttagaaaagtcaacggtgtcaaacattttgggatggagggagtagtatgcttgctaccaataataagcaggtcaaatatgttatttgtacacctcgaatacatggaatggatgaattttgtttgtgtacgggtccaccttatttaccacaatgggcatcaaattttgtagtgtgtatcaagttactattacttgataatggaacacactattaccaccaacctagacaagatacattgctgttgttttaaaggggataaattgtgtgtgtgtggtgagtggacggagaaggaggagggtttttgcgtgtgtggagctaaaggcaatagttagctctaagacatcataggcaactttgcgacggtgtaaaagcttggaagaaaaataattgtgattgtgcgagttacaaggctatgataaaaaaagcgatattatagaccaggtattttcttccaatttaactattagctggaccattctatataaattatataagactattaatttttaaagggttcttataaagaaaaattaattaaaaaactcacatgttctatagaaaatctgaagggcatggtcgaaagcttgtttataggtctaaaacttgtgtgaaatattggttcatagtattttttttctcgagtttggctggaaaagagaccattaagacaagagaataaaaatctcctaccaaggccataaaaaaggcaatgaagttgtgctcgcctcatcttaagaacgcgaagcggtagctcactgagattccagcgtatttagtttaagaaaagtagggttgttcggaggctcttatttctccagtaaaaggtagtccctttatttgtaccttgttttgaaaacgaaacacattgccctctagcgagcgctagaacaccacttacctcttttagagcacatatattgctatgttgcctcattatccccttcctcctctatggcgaccgctctccttggcagcgagctcccacaagatcatggcatattgcctcaatcagagcctccttagcagtagccggtcgacgaggtgtcagctatgagacttgtatggctttgatcctgttggatcttggattggtcgcactagatgttgcagcgtacgtgcagactcgagtagtggacgttagcttggttacttctttcctttcgtttcataaaaaaaaaacttcttactatcagttactttttactctttctcttatgagacggccatcctatagcctcctagggcacattgtcagcttcatcggcggtgataacctagtggagtattcatttcaggggacaacggcatttctgcttgataatcccctaatgctcttctattttcggtgaataaatttattgtatgcagtattgtttatcatacccaaacactcttttataggggtaataaaaatatgattttatttttagttagcatcaaattacacgtgggaatattttagttgcgaaaacagttactaatgaccaaaacaaaccttaaattatgtatatcctaggaagattgagctgtttatatggcaatctgtggttcaaggcctccagtccagacttgtttagttttaaacctaaattttacttctcaatctgaatattttagccatgttagctggattgacatggcgaaacaaagcttcaatgtgatgtagctggtatggcaagtttgttttgtcacgccacccaggctgacgcgacaacataaaattgtctgtgttgttttgccgtataatcgggatggcgtgattaaaagtttgagattttaaaaataaaggcttcattggttcgtctaataagttaaagcaaaaccaaaatttgaattttcaaacttgatgtagaagatgattttaagatatttataacgcatttttttatattgacttttaagtcattaagaacaaatataaaatttttatgtacaaattaatttttattctataacaagtcatttttaaaaataaaaaaaggttaaaaaaattaaaaaatagcccatcgagaggcataagtaaagtgtgagccgtggacgggccttgtcctattggggttgggccgcagcccacaaggggtgcctcgaacgtcgcatcccgtaggatgatccaacggccggggcacttgcataaagccgaagctcccacccctcatctcccctcgccgcagccacaccctctccaaaattcaaatttctccctcctcttccccaccccaccccccgctcccctcaaaatttccaaatcccacgccatatcgcacagattttgaattcccctcctcctcctcgccgccgccgccgccgccatgtcgtcgcggcaggacaaggagaagtcggtgaacgtccaggtcctcctccgctgcaggtacgcccgccgcgcgccctcccagatctccccagatccgccgcccctaacttcccctctctcccgcgcaggccgttcagcgacgacgaggtccgcagcaacgcgccccaggtcatcacctgcaacgactaccagcgggaggtcgccgtcacgcagaccatcgccggcaagcagatcgaccgtgtcttcaccttcgacaaggtcgcttcccatctcctcccagatctgccaaaattttaaatactggatgcctcggtttacctgctcttgtgctctagttttagtaccctttcaaacttttaaattatttggatgattccaaattctgcgaaatgcgtaccgaggttttcgtgattggtccggcgatttggacggtaactattcagtggctagggtttcttaggtgcattccaacgggctgaatctgcatttggctggagttggttcgcaattaataaagcatctggtttatacaagataatataagaaaaaaaaacaacacaggaatgtgtttccccttgttggagttgctgtggaatttatttcatttccggtttggccgcacagtacagagttctaatatgcagccgtttttctttcaggtgtttggcccgacagcgaagcagagagacttgtatgaccaagcgattatccctattgtaaatgaagtcctcgagggtttcaattgcaccatcttcgcttatggccagaccggcacgggaaaaacatacaccatggagggtgaatgcaggagagccaaggcaagcctacgctgctgttgctctttcatcatgtgtttgcctctaccaaagggttgcttattgtttgttttcctttcgtcgaaatacttgcagagtggtccaaagggtcagttgcctgctgatgctggagtcattcctagggcagttaagcaaatatttgacacactggagagccagaatacggagtacagtgttaaggtcacattcctcgagctgtacaatgaggaaataactgatcttcttgcgccagaggagatatctaaggctgcccttgaagaacggcagaagaagcccttacctcttatggaggacgggaaaggcggggtgcttgtgagaggcctggaggaagagatagttacgaacgctagcgaaatattctctcttttggaaagaggatctgcaaagcgccgtactgcagagactctgttgaacaagcaatccaggttaatccttacctttgtctttttaaactttggtttgctcatctcaagaaactctgtgtgcttattaccatatatgtaacatttcagtcgttcacactccctattctcaatcaccattcacataaaagaggctactcctgaaggagaagaattgataaaatgtgggaagcttaatttggttgacctggctggatcagagaatatctcccgttctggagctagggaggtaggtgtataaccagctagaatgctactatttcatttaacattcatttatgttttggatattttattatactattaagttagacacttgagcctgattgtagggacgagctagagaggctggtgaaataaacaaaagcttgcttactttaggtcgcgttattacagccttggtcgagcaccttggacatgttccttacaggtaagtggttaaaataccttgcaacagtaatctatttggccttttgtgctaactgattcgatctttcttacctttcagggacagtaagcttacaaggttgctccgtgattcactaggagggaggaccaaaacttgcattattgctactgtttcaccctccgtgcattgtctagaggaaacattgagcactttagattatgctcaccgagcaaagagcatcaaaaacaggcccgaggtgatctagcttcattttctcacatctacagtcaatgtgctgatagcagtgtggtgtgtaaacagaacagcttaaaatagtagtaatcgctttattcatattggctaaacaattgtacaaaaacaagtaaataattcaaataggaggtgcctagtacataccaaaattataatgggtttgacgagtacaagctgaaaatttttattaactccttaaagcttgtaattgcatagtgtggcctgctattagggctgcaggaa

SEQ ID NO: 1522 - DNA, 669 bp, Oryza sativa
gttactgtcgaagagaaagttgtagaagcctgaatatagcagccccctggcagatgcatataccagctttacattcctagttattggctgcaacggcagaagtgtatctgttggcgagtcgaagctcctccatagatgctggccttcaggatccatgacaacaaggtttccattgttgagaagctctgctcggtcggctcgagtggctgttgtgttggtgctccatacaactttgccattgtagtcaagaagggccaaggtgccgtccttctggaaggtgagcctggaaccctttccgttcaccggagcatcgcggttcgccgtccaagcgaccgtcttctccgacgacctggagaaccagatggagaaggtgaatgcgttggtggccaccctgtagaatccgcaggagaagtcgccattgggggacactaggatggtggtggtgtcatcctgggttgaaatggatgaacgtctagcaatgaaggcttgggttgaaatggatgaacgtctagcaaggaagggttttctatgatttgcaagagcaattgttggcatgagaaggaagaatattgtggtgaaaatgtagacgcctctcatggctatgacaacatagaaagcaattgcctatgatcatctaacgcaaatgggaaccaatgtgctgtagtccat

SEQ ID NO: 1523 - DNA, 998 bp, Oryza sativa
tgcacgagttctgatttggaatataagcatctataaatagttattctacctgtataatgcatcatcctttatgttacaattctttgaagtctgaaacggtcattgttctttgcaggggtttatgtgaagacattctcagctaatgtcaagaatgatcaacctatattgacaataagtccgttacattttaagatgcaagaaaaagttgctcatgatggtagtgaattaggaagtcaagaagcgaacatttggaggaaaactagcatcccttcagaaaatagagatccctttcaggaagctcattttggtaacaatgatgatgttctgagcacagatgttgataacacttctgaatccatattggaacataagattctcattaaacagtggcttgttgggcaacttaaagatatgggcttacacgttgggaactctgagataagtccagtagttttaccaaccaaagttttgctccattttgaagcagtagaccaaaagcataacaggggaaaagaatttctatacctgctaaaggttggctttgaaaattctagctacagcaattcgcaaggcaatgctgagctttcttggagcattcaaactgatgatctagaaaacttggaattaaaatttgggaggttggagctgggtgagcctgaattttttaattctgtattagatgatgggttcagcaatgggttcaagctgactcgatcttctttaggctggatggagaatgcaatgtcagatgtcacaaaaagtatttactttcattgctaagttccttaattttatttgctctttttatctcgtaaagtatcacatttcttatttcttaatccatgtttatcatcattttctttgtaaagggctatctgttctcttatcgtcaactagtctgaggttatttgaccagctaaagctccccttccctggtcatgttcttgtccttggacctcgagtaagtaatagtatctggtttgctttatgggttgtat

SEQ ID NO: 1524 - DNA, 1042 bp, Oryza sativa
atagttgatgcccggccaagagcaaatgctttagcaaatggtgcaaagggaggtggctcagagtcagcatcaaactacccaagatctgaggtatattctgtatatattaactttttttatataccatacaatttctttacaattattttttctctgtttatctggatcctggaccaggttctctttttaggaatacaaaatatccacacaatgagagatagtctttttcgccttagggactatgttgatacccatggatcagtatcatcaaatggaacatcatcagctgtatctcttgttggagaccgggtaagcctatggtttgtcttgttgaactaccacttgcagtatacatttccttgatctaaggttagattatgcttgtgccaggccagttgtaggcttctccatacgtgggcttggtgccagccttttcttacgtatctgaatccattacctgcctccctagctgcaatttacattgtttagttaaatatgtactatgaagtagcttcttaagttagaacttgggaccctttatttctgaattagaaatatagtacacattatgaattttttgactaacggaagacatgtaaagttggtccggataagtcccaagtgttacttttatcatactgaaatgcctataagttcattaatgacaaaacagaagaagaggagattgacgatctttttttctcacagagaaatcgtggatcaacctggggtggagggaatctgaatagcatgacacaattttcttcaatgttaggggagtggctaaaccatatccagagtatcatggtcggtgcttcgtggattgctgcacaaattgtccaagaatcagcttctgttctcgtccattgcaggtttttttttcttcaccagcttctggagatgctctaattgaattggtttacttattagtaaagggagaatgcagagaatgttttttgcacctacattcttacctgggcacctgacatttagttgagtctgtaggctaggtttgtaattgctggctgataagggctgcagg

SEQ ID NO: 1525 - DNA, 12265 bp, Oryza sativa
attgattacgatgcttttggtgatgttgttgtttttgatagcacatatagggtaaataaatacaatttacctttcataccgtttgtcggtgttaaccatcatgggtccaccatcatttttgcttgtgctattgttgcggatgagaagattgcaacatatgaatgggtacttaagcgctttttggattgcatgtgtcagaaacatcctaaagggttgattacagatagtgataattccatgagaagagcaattgcaactgtcatgcccaactcggaacataggttgtgcacttggcatattgaacaaaatatggcaaggcatctccgtccgaaaatgatttcagactttagagttctagttcatgcaacttattctgctgaggagtttgaggaaaaatgggtggagttcaagctgaaacgcaaagtggcagaagataaccaatggctcgggaggatgtacaacttaagaagaaatgggcggctgcatatactaaaggtatgtatttccttggtatgaaaagcaatcaacgtagtgaaagcctcaactctaaacttcatagacacttggatcgtaaaatgagcttagttcttttggttgagcactatgagcactgcttgtcgcgtatgagacatagggaggcagagcttgattcgaaagcttcacagtcagttccattcacagccaacgatgctagtctaattgaaaaggatgctgcccgtatattcacaccatcagtttttaagaagttgaaaatggatattattaaatcgaaagattgtgaggtgatagactgtatagatgaggaaaatattattaagtacatcatttgcatgaaaggaaaaattgacaagataacaatcttgacttgttcatatgttgaatcatcattgaagaatatgagctgtacatgcaagaaaatggagtgtgaaagccttccatgtcagcatatgttcacaattatggactatttgaaccttcaagccattccagatgtgtgtgtagtgcctaggtggacagttaaagccaaaattgcatttccttcagataggtatggtgaggtttatacctggtctgatcagatggaaagatatcgtagaatgcgtgcaattggatctgaggttttattgaagtgctcgatgtcagaggaatatactttgaaggtgatggagatgtttgaaaaactggacttagagacaaatgcaattgagggggatgaatttgatgtaacattgtgcggtcacgttgtagctcaaagtttacgctctgacattgctagtgtacagaaggttcatgatcctatggaggtagtacctaaaggtgcaccaactaaaaggttgagaggttttttggagaagggtaaccggcgttgtggttattgccgtgttcgtggacacacggttcgttcttgtgccatttacctaaggtaaggttctaatatattttgggtaatgcttttttttgtgttgtttttttgtaattggtgacaactgacaaggactagttttgttgttatttcagaaaagttgcagtagatgtatgaagtgcaaagtggaagcaatcaagctccatgtcttatccagtgggctattttgtgctatttgaattctgtaaatcatgagtcgtggcaggactcgtttgttgtgtttgaaaactgtattggagctgtgcttggtctattatgtttgctattttgtactcgtctgttgtgtctgaaaactgtactggagctgtacttgttttgttcaattattcatgactttggtttgctaatcgatcacgaactgtcctcctatctcactgtattggagctgctatagttaatccattattcaagtgtgctatacatgctcaatctgggaacgtgtgtgcttttcagtggtgaaaatcatatgtgcgggaggagatggcatatatacattttgagatatcatgatcgagtaccaaagtttaacaagggccaagggccaagagatagcatgcgaaatataatttcattcatagttgtggtccaaatacttcatttagcacaaaaggcaacttgcaacaagcagcactcatacatgcaattcacgaatagcacgtgtgctcacatatagcagacactacacaactgacggacagcagacatgctcacatatagcagacagtagactatagtaaggttgcagttgataatctccttcagagcaaatcaagacagtaactagaagggtcagtagacacttgtacgtcggacctgatatatgtcatagaccacacttgtgcatagcccagattaacccggcacggggtttgtcgtagagtgcacgtgtgctacgacacttgtacatcacacttgtgcacatgggtggacctaccatgattcccgggtatgtgcgaacggtgtgacatcgcgtgttgtgacatcgcgtgcaagtgttgtgacatcgcgtgcaacgtgttgtgacatcgcgtgaaacatttgcgtacaagtatgtgcgaacggtgcccttcgtcaggtccatcacagctcataagcagtgcagaaatgtgctttggaacttgttgtggtctgactcatgacaggcaatagtaatggggactttaaatttgttagacaacggtagtgcatgcagtcctgacttaattcctcgctacacttaccgatgagaactgtacagtcgcctattcaaaagcatgtagttatcgaacagacaagtcattaaattaatcaagttagccataatacaactgctaatacatgcttactaaaaatacagactgagatagagtcagataattttgtttcgtgctctagtatctccgtggcgccaaccatggcggatcaagacggcaacgcacgtgatgaaggcccacctcaggtgccacagcaagctcatgtgtcgtttgcccttaaggtatgtctaaaatcattcaaatcatgcttttgtcatatccattcaaatcgttttcctatccactgatttcatgctcctgtcctctaaatcttttacctggaaaataacagatgagctccatgactattgcttgttctattccaaaatttgtttcactcgttcaaaatttcgattcgtgtcaaaaagaagctattgaaagaatcggttttggtggtttattgcaaatgcctgatattacacttcaaaggataacgtgtgggcacatcgctgaccagttcgatgtaactacagaatgcgttgagattgaaggtatccagattccaataacaacatttgatgttcagtgcataatgggtttaccagctggagaattgttgattacccctaggccagtttccgatgatgaagactacaagtactactcggtgtacaaggacccaaaaaaaaagaatatcagtctagctatcttgcgggaagaactcttaaaagcaaaagtagccgacgaacatttcttgagaagatttgtcttgtttgaaataggatacattctatgtccgacaactaaaccatttgtcagctcaaattaccttgctttggtgaaggacatcaaccaaataaaacacatcaattgggctgctctcactagagattttctgatccgttctctcaaggagcttaagggcggaaggactaatctggaaggaaatctaccactcctacaggtaacgtaactactccatacttttagttcaacacagatcaatattattttttacagcttactagacacgtgttaacatttctgttcctactgctactactttccaattctggttatgggaacatgtgcaggtccaagattctaagtacaagatgacatatggtgataggacacctcctctcatgtcgtattggaatgagatgaaggtcaattcatggcttaagtacgacagcaaacatggcatatctggactagtaaggttcttatgtagtactaacacgaccagaacttctccttacatgttgttcaaatacaggttgtccaagagatcactcttcccttgcaaaaatgcgatccaatagttcaacatgacaatgaagagcatgccgaacaagcagcggacaataaagataacaacattccagttacagaccacggcccccacttgggaagacagaatcaatcaagaaattcacacactttccagatcagatacagaccatggccaaacatatgaatccccacaataccaaaattatgctacaagtcctgaaagcagccagcaacccaaggtattatttgtttcatttcaaacaaagtagcttgaaattgcagtttcttacttcgctctctacagaattcagccaatatggatattgtactgggccagctactgcaacttcaacaaagcatccagttccttgacaataaaatgacaaacaagttgatatcaattgaaggcatatgcaatcaaaatagaaaagatatccaggtaatacttttaagggtcacatctcacatttttgtgatagagcaatgcttatatctaacttataataggagattaaaaaaaggttgagatcagcattccatgtaacaagcgcaaagcacccaaaggtcgagatcatccatgagcagttcaacattacaaatcaagaggaagtaaggactgcacaagctgacgacacaaagaatacccaaacagagagcgtgaaaactacgcgaagtgacaaggtgaaacacacacaatctgacagcatgatggaatcaaaggtgaaaactgaagacatcaaagagacaagccaaactcctctagttatcctaagcgacgatgacaacagcaatggaaacacagaggtcctctaattcttgcacttacagtcatatttaataatctaatattgtattgtataattgttaatgttataccatccttgcaagctgaacccaaatacaaagatcctaatattttaggaaaaagggtcatcaaaccagcacacaaagcataagatgacttcgtgtactacaagaagaaattcacagttactgcatcgtccacaaaacaaccaaagatagacgatgttgatgccataacgattaattatatttccaattgcaaagacaacatattactttcagctatcaatggagtcaaactttattcccagtttcttagagcacttgttgtccctcaagaagcacctccaacatccaagtggttaaatggcagtgtaagcattcttcacaatactaccaatgtttttatttaaatttcaatcctgagtattattcatcttccatcatagatcatagacgcatacattgagctcatcaaagacgagcaagccgacacaccaagaggaaatgggatggcattactagaatctgaagcacattgccagcaatggaaatctgatggtgcaaaaaaaggaactttcagcaaaacataccgtcaaagaagagccacagttgcatccaaatacctcaaccatgatatggtataactaaatcctaatgtatccatccatactaccagtaaatcaaaacatttatttttcattcattccatgcagatcttcctaccgctaaatagaaataaggaccactggtatgttgttgtactcaatgctggaaaacaaaaaatacagatactagactcaatacgtatggataggaacacatatgaggctaacaaagacctcaacgatacggtatgttacattctaccgtatcatctgcgtgtttatacaatgcattcactttgtacattcatatatacaatcagcgattgtgttttgaaaacacagattaaaggtattgacaagttcatcgcatatgcaaccgaggacaaaagcattaccacaagatgaaaaaatacaaatgtgaccgattggcctttgtgcccaatgcaagttccacaacaaagggacggttggtcctgtggtttacatatgttgaggttcatagaacactggactggaaaagagctatcacctcaattccatggaatggtatgtttcctcaatcaaaacataaatatacaacctacttcattgctctaaatatttctaattcatctttcaggacacatgcactacatttagagcgaagctggcatccaccctaataaactctttcatgaatgaggtcatcaacatacaagaagacatcagacgcatacaaactgagcaaatgcaacaaaagaaggacgagtgactagactcttttgcaaatttcgttccatgcagttagaaaattgttttgtatctttctgaacttcttgtcgctcatacatttgttaccaaggcagtgggcaaaaaaaattcagaaaaattgcaatgtaatgtcacatttccacccaacatttctatctttctgaacttcatgtgcctcaaacatttcttcccaaagcagctagcacaacaatacatgcaattttatgccacaaaactatagttcccaacgcatttccacccaacgtaactgtagcgacgaacttaccgctgcggcgccgttgcagtctgttccgaccaccatatcgccccttgaccacgacggcaaacctctctcgtggctggcgacaacgagcggaccagggctgtaccgacgagaagcgaaccggcgtcaatcagccctggacttcacagtaagaactccgcgggagcgccgcccttcactcctcttgcctttgccctggagtccgcggaagcgccgcccttcactcctcttgcctccgccctggagtccgtggaagcaccgccctggagtccgcggaagcgccaccctggagtccgcggagatcggatggggaatcagatcaggaagcgccgctggcaccattcacttctggcgacggatggggaatcatatcgggaagtgccgctggggaatcagatcgagaaagaatttgcatccctagggttcctccagcttcaaagcgaaagatgctctaatgatatgcgaagttacgcatatgcccttccacccttaaacccactcgcgatacagctcaaattcatccacagtacctcgcggtacccctgttttcagtccgttcgatccgctccaacggacggcccagatttcgtaccgcgaggtaccgtacctacctgctagactgtagaaaacctcttttataaaaggccaaaagggtcaatatgccaaaggttcggtacggtttggaaaaggaacagcaacacagcattccgccgcgccgccgaaatcgccatggctcctcccgcctcccgcccgccgacgccgacgccgacgccgacggcgaatgcggcggcctcctcgtcgcggatagagtcgccgtcgctcagggcggccctcgccatggctctcatccactacaaccgcctcccctctcgagcagcagcagccgctgccccctctccccaggctctcctcaactggaagcgcaaggtaggtcgcattccccattccacaaccccgccgtcgaaccctaactctcattctctcctctgatcccgtgcgtgcaggccaaggaccggaagcgcgagatcctccgcctccgcgaggagctcaagctcctccaaggtacgtatccgccgcgccgcgttcgtttactcgatttccagtccccaattcgtgtatgggtgtgatcagacggggcgcgcggggaggagatggagccgccggtcgcgtcgtgccgatgccacttcttcgacgggtgcggggaccttccaccgccgacggacggcgatgctggggagcactgggtcgacgacgtgctgcggaggagattcgtcagattgggtacggtttttggcttcgatacactggttttttttttgaatttttgttgcttctagtagaattttttttttttgaaacctaaggcggaactttgttccacttttatatttagaagaagagaattgacccagtttataaggaaaaccgggcccgaaaaccacacaattgcacggttaattataggagcttctagtagaattttacatgtataagctctattgcaacagtgcggtggaaggataagcgcaggagactggacagatcactgcccacgagtagtttgatgggtgggtatcgctgcaaacatatgttcttctcactcactactcggatttcagattactgtagaatagtttttaactgctcaaatcttagtttcaattgttcgattgtgcagaatataacactgaggatgaggtacaacagcttagcttgtcgattgatttcctggtggagttatcagatggcttgtttgccaaagtaaaattctgttgtcttattatatctaagaatgtaagatatcccattttttgtgtttctaaaattagatttgtttgtgcagagagaagctggctcctcatttactacattttctcaccaggcagtagacttcattctgggtaagtgagagttgcacagttatgccacgactgaacatttaataaattatatctgttaattgtgccccacatatgcttcaagcggtatgagttctcgtcactgataataacgttcaacatatttgatttttctgtggttatttacatggcaagttgatactggaacctgaatgcatcgtcttgtagttagcaaaggaattatgaatttacttccagccttacctttcagttttcacatattttgttgattgtttaatggtagccgtataagatggctctagaaactattttcagtttttctattgcacttgccacacattttattttgtggggttaagagcacacttgccacacaaatcgtcaatatgttgcatatgaagttatctatttttgttttctgtttattccatgttagattgatgcagccatgtgtgataatcaatggtttcagcttcactgaagaacattctctcgtcagaaagggaaaaggagataatcgaggagataatcaatggtttggttgcacgtttgatgaaaaggatgtgcaccactcctgaaaatgctggtacttcaagttcagatgatctttaattgatccatttcagaccattcctagagcattttggatatatgtttttctttcagaaattacatccatagtgatgaatcatgaaatggtgccattagttgcacattagcagtgttttagctagtagcaccattactattccttaacaatggacttgactttcttttcgcttggtttgttttttgggaacatttatctatgttatgacatcttatagttttgcttatttttatcacttgagtgttaactgaatttattttcagaatgtgctctgctattgtcaccaattctatatttatttgtgctcctttcattttgttcgtatattgcaggatcagttgactgttcagatgcccaattctccctgcagcacttattccgtaagttaggaaatgaggagtttgttggtcagaggataatccttgcaatttctcaaaagatctcaaatgtatcagaaaaattacttctggcagatccatttgatgatggtttccctgaaatgcatagcaatatgtttattatgtaagttgattttcaactccttcagatagattataacagaggaatttctgcacaatttgtcataagataatgtccgactctgagcaatatggtctgcatacagtttttttctcctcttttctgataatttactgtactgtcagttgagatgcagtcatgttttcagaacatatttgtcataattttttgcccaacacaatctatactctgagattgccagttgggcagttacaacaacttgaagatattagacatgacatatctcatcagaagaagaatttatgatctccagttccatcatacttggggcatgctttgtgttgttgcatacttagcaaatatttaatttgattttctttactccctgtttcctataaggattatttcttttgtgccttactttgtttttatgttgcaggatacaattaatcgagttcctaatatctgacagcttcaacaattggctatgccgtgatcattttgacagaagttagtcctctgttgccctgatggcgctgttttatatttgttaattgttattcaatgtgaattgtgctgcatccaacatgataacatgaaaacaataaactatatccacatatatgttttttcttcattcaattcttctggttgcagttaaatatctttggtttctacattgttctttggaattgcactttatcatctcatactaattatttgagtcgagtcacagcttataaattgtataattctatccctgaatctgaatagctaaatattgaaagatacatgctgataatggtgcaaacataactcatcattgcatctactatctctttttggcatttcatcacatgagcttgatcaaatctaaatacaacatttattcagaactttttgaagaatgggtcagatctattctcaaggcacgaaaggacttggaagtcctagatgggagaaacggactgtatgtggtatacattgagcgagtgattggaagattggcaagggaggtagctcctgctgctcatcaggggaagctggacctagaagtcctctccaaactcctttactgagaacatgctgcctctgactcgccaatgtattcacccacatgtcatttggatggcaattctcatgaattattagaggcttgtactctacaaacttggaaactacatatcacattttgtatatcaatttcagattttcaggatgactagctaagggaagatgatgtagcaagaaggtgttttgttctcctttgaatggctgggaaaccaactaccgaagcatgctcaaaagtatgtttcattaaccccatgtgttaatgagtagttatcacaaaccagtctgctataatttgaaattgtatttcttcaccaagacccttacatgcctacattatggtctataacacagaccttagaatctattaggggatccaatattgtgataggcattgtttggtatgtttagctaattgttttactctttactccaatttacttatgtcatatttatatatgcatgttttatgtctgctctaaaaaaggaagggagtttttcttaaatacttaagaggcaataatgcatcagccccttttgtcatgtgtgtgtgccgtgcaaagggcagttttgtctattatgctttcatgtactgtcgttttcttcatttctagatggtgatgtttaaattacggtgtgaactctcaataacaagaaaataactaagcgtgttctggggtggtgactttactcaacaagtcagttgctttacaaatttgatctcgtaagtgcccccttgggctatatgatgacgttctggaattaggattgcaaataaactgcctaaaactttgtgtagctgagataatatagtacacagcctctctgtatgtattctatacgtgatattctcaaatgtttacacaatgtaagtttatgaaacaatttttaattgagaaacgttaagaaatcaagtattctctgctatttcagagacatatgttaggtccttattctgaagggttatctagattagaaattgttaacagggtgttggctttaattatatctcagcaacatggtgcagacaacatgcaccatggaagattagggatgagtttaaagtcttaatagccaaagaatattagtgttctttcactctcgttttggcaaagaatgagcttgcactcttcaccctaagaaaagagatagcccttcctagctctagttaccaaatcagtgtttgagtagttacatcaccttttagtcagcagctagcttagctccgttctcaactggtataacaacaactctcatgagccatgaggggagatagtagttaaccaatcccaggatcttccgagtttttatcttggttaagctcaactgatctcttcatcccattgacaagacctgtatgcttgatcaatgcaaggtccttttcaggtaggccaataccatccagcatctggcatctgctccaatcaacaagtgacgtgcaccgccgtttcagagcctaaatccggccttcttcctcaacggtgaaatatctgaaatctgaatcccagatctgatgtattatatccttcttaccattttaacatgaacgattaaaacgacaggtgcacgttactggaaaggttaactcgttgtcatgtcaggctaatagaggatgggtgaaagcataaccagtttcaagaatcaatatcagctttcatttcaagtactccctggagttacagaggtggtttctatgagccctaaagtaagaccatcttcagaatttatggacttccgtggcaatcggtgagttctgataaaacgtcaattgaaatcgtaccatgtatagtagcagggctgcaggaat

SEQ ID NO: 1526 - DNA, 3646 bp, Oryza sativa
tggttatattcagtaaagcctctgcagcgaactatgtgaaggacctcgaccaccttctcttcccatgtcagcttccactcctgtttcttcttatcaaccgtatccctcatctcgcacttgtcctccccattcttgtcactttctgccatagcttgcttgtgttgtgtgctctccgacctggcagccagcaacttgtaaaaaaaaaacatggaaggtttggggttctcatgtgtccaatccaacaaacaaaacaaaaaaaaacatggaaaatttgtgattcttatgtgcccaatccaacaaacaaaacaaagatatgatggattgatcaattgcgaagtatgtgttgttttaacttttacatgaatgaatgatagattgtttaactgcggagtgtgggttggcactcccaatctcagtaatctttctctcaagtctatgacttcatctatgaggcggcgacaatagggcttgttgttgtacatcggccatgatttaattttggattatcgtaatggccggccggtgatcgggcacatgtacaggcgccgtgatgaggccggtgagattaagggttggtttgtatacatggatgggccataaacaacgatatcggagtgtaccgtagatgtggtcgccgtgccctaaatcctaatcgccgccgcggaaagaggaatcgccccaacttaattagctggtggtatacatatttaacgacagtttctacagaaaaaaaaaatatactccattaatcttaataaataaaaaagcacttacagtgttgatatgtccggggcagccggcggtcgatccccttgcgcggctcttcttctccgtcgccggctcaatacgagagctctcacggccagcttgcgactgcccctcgagagtgagagtgaggtcgccgtgaggtgacgattgcaggtcgtcgccggcgaccagatcgccgccgggcgccggttaattcgtcggaatgccgccgcttccgacgacgtcgtctgtacgatagggacgagaacgtagaggactgatttacaaaatactcaatcagcccgaaaataagttgggagcttgttctgccaaattttctaaatttaccgtgggctgttcaagttgatgtcatttctaaccataccattatttagcaaagttgttaaagatgtgactatattttttttcaaactttgataaacacgtaacaaatcttgccaaaatgttagtaatattgtcaacttaccaaaattttgacaataccaaatttagtaaggtttattttgaacacaatctgaatagcctcctaaaattttacacagtaatatttatcgggtcctaatcgagaatccattccgctgcgacaggtgcaaggtgttagggttagtgtttggtgacggatgataggaggggaggggcctcacccatagtgaaagaagaagaaaaagggatgtcatgtgctccgaatacaccctaaatgaggaaggcaccaacctatgaagactgagaagtcattctatgaactgtgaagggccaaagggcagggtgtggctaggacttctttcctctccaatctcttctcccatgcatttctttgattgatggtgaatcaaccttaccggtgattaggaatataacattttaatatcagaggctttgttcgatctgtgtgatgtgttgatcgcattctcatcaccttgattggtaaaactcctatagttgagttagtgattctctcaatttcgtgctcgatcggtttatactagacaccatggctccaacaaaggagggcatacaagttcgagaagtgctagctatgataaatttcatggaggagcgactaatggcggtgatggaacagttagacacgaaggttaatgagatggaaataattggcaaacaagtgtatatgattgcatcaaagcttgaacaacaagggagcggttggacaagttgcataccaaggtggatctatcgatgacatccctatgacaggtgtagcaaaagcatacgcaaataacgccttaaggtgcttaaggcagcaatcactccactatcaacaccacaagtattatagtgtgctctaagttattcgtatgtagatagaatgatatagatagttatgcaaatatcaatgttttgtttttgaaaaaaaaatgaaggttgatatttgttatcaatccaatggttataaaacattaatattattcaagtgactttcattgttcacatttcaatattttatttgctacatagtttaaaactcgataaggcaaattcacgtcaccttgggcactatctcagcgccaatgatgatggagttgagacactataggcttgtttggtatagctccaactcctaaatttagctcccgaagttaggtctggagtgcagttgtgcacaactctagtttattttatgatagagttccacccagctccactcccagttttggtggagctaaaactgtttggctgagctccagctccaggaggggtggagctggagctgtgccaaacagaccctatatcttagtgtcatcaggttagcgctgagatcatagtttatgttataaagagtaaatttcactttggtcaacctttatttaccaaattttcacattggactagagttagacttatattttcacttaacaccatatatagttaccatcatttgcactttggaccgggtttcacaaattacacatagtataatgattgtagatctgatttcatttattttttgtgttagaaaacttagaattcaacaatctgtactaacactacagttgggtatcgtaaaacatgtaatatcttttctagaaaaatagttcttaaactcaatatttctccaattttgtctctagtataagggttgtgaatgttcatatgtagtagtaatgaagtcccattaatctgataggatatcttataacatgttacaatcaatgttcttgcgctaagcatatttgcatggcaaaaaattccatatcattgtttcttgtaaaatgctaagcaccaagacaacaactcatgtgatggtaactataaccaggtccaaagtgcaaacaatggtaactatacatggtgttaagtgaaaacatgagcctagctcttgcccaatgtgaaattttggtcaataaagatggtccaaagtgaaatttactttttataaattagtttctgtgataggttattttttaaatgggtttttataaagagcgttgctctggtccagcagaaagtggcgcggggtactggtaccgtgaggtaccaaagcgaactccatcggtgggcagaatcggaagtggtgaaagttttgatgcgcgctggtggggccgtgggggtgaaaatgcggacttctcgccacagaaagcgcatcgctgtgccgcgagtgtcctcgccacaaagtcctctccttcgtggcgccgccggcgccttctccttcttcgctgcgtcgccggcgtcctctccttgttcgctctgccgtggctcgtctgccccttcggccttcgctgcgccacgccaccctagtgcgacctttctccgcggcactgttgtctccccctttgccgcgccaccgttgcctttccccatctccgcgcagagcgtccgtcgtctcccccttcggtgccccttcgctgcgccgccccac

SEQ ID NO: 1527 - DNA, 682 bp, Oryza sativa
attcctgcagcccctccgagcttctggtggcagcttccataagcatcgtaatccattctatgatccattaaagcataatggtcccctagtgccacctgctgcagcacttgctcctaccctttggccccaattttatttgagatggacatgccccattgaatctcaaggtggtgatcttgaatctcaatggcatgccatgaataaaaagtacacagaagcaatgaaggtaactaagtatagatctttatgtatacctttaatcattttgttgctgtatgtcgagtcatcatagtattttttttgtttgatttgatcacacaatctttaggaagttgcatggagcaagactaaagacataaatttatggtttgagataggataaccatcataaaagggacactgggatgttttttttttaaaaaaaattgctttgtgtgtcagacatccatcctgatgtttatttcttgttttgttttctcttgtaatggacaggcaaaggacacagctgaatcaagggtaaaagatattaaaacgaagatggaatctatgcaattagaattacagagggagaagcgtgcaagtagttcagccttggccatggctcaacgtgctcaaagggagagcgttgccatcagaaaggcagtgcgatcgttgggctgtacggttaatttcggcacgaatg

SEQ ID NO: 1528 - DNA, 5833 bp, Oryza sativa
agacataaagctttatttacttgagctccagttcataaacttacactcagaggcagctgatgtaatttcaattcaagttaaccatgccttagctggtacttgaaccccaagaaatataaactaatggtatatgcaccaaaatatgtactcaagacatgaaaatctttcctttcttgtttgggtgggaggggtcaccagtactggactactggttataactatcaattatacgtgataataacgcgtacatgtcatgataagctgatatgatggtgacaagccccatttgtccatttgcctcataggacggcagcaccatgtggtccatgagatatctgaggccccatgaagccatagagcttgcaacaagcacagatagcccttgcattcttgtgatcggaggatgtttgcctctgtttgtgtcacctacaaagaaggagaaaaaggaggctctggagtgaactccacttgcctacaaaagacttttgcttctgaattctggtattagttggggagtggtgtttagcacttgcacgtcaggatgtgaacatgcattgagagggggtagatgctgctgctgtgagcattgatgaagctttgctaattggcgacaaagaaccaattatcgactggacttttgtccaaagtggtttgctttagttagtagcgaatgcatgcattgccctgccattgtgtttcgtcagctacatgctaggaatattcaacgagacagagggggatggttagccagctttgaaatgaggactagaggaataggctctcaaatcaggtctcctgatctggtttggtgtgcttcgcgtccaaatgcaagaagctctttggcttatacaatattattatatatctattgtcgaattggtagcatgcttaattccatgctgtgtgattattggcacaaaagtatctgacagacagatggaatccaccaagtgaaaaaaaatcacaataattagtaattagctaactgcaccaaagaaactatagctagctactgaatgtctgcatgccctgacgcacgggcggatggacccatgaactgaaagctacaagattaactaaacaagatcgtgtagacctcgacaggtaagtgattggtaatcacatggagtgtcctaataagttgcagatgcccaaaggacaaggacaggagaatgtagagtactccaatagttttttggaatcaatggtgtgccttggaaaagtatataggacaaacagtgagatatagtctgatagatcactcgagttcatgacatgaatccttgagcatgcagaactacagaagtgtgatcaacttgtttttgcatgttcaaatataatgccatgcataacagtagtgtctgacatgtttgctttctgtcatcttgttttcctattatatacgttcgatatgagccctgttactgtcgtgtggctagaattaattctgttagatgcatgattcgcgcgtggctagaaatgacatttgtgtatacatcatcgtttctttatcataatttcttgccatcgtgccatggcaaattaactgcttgttaccaaaccatgcattacacagctcgacagcgagatgctttgcctcactgttagcttgatcgggatcgattcacctcacaggtacgttgattaattttgcttaaaataagcatatgctgggttatcagtgtgaactttttttctctgtttttttctgggatttgaaagcacgacgtatgaaattactaaattagactatatagtgcatgatagttgaatgatatcaaatgctgtttaggttagaattgttttcttctcttatcaccaagcgcataatttgaaaatgcaatccgaattttttacagttagcgttaataattaattgtacgtacataggagtacccattaaggtgtgattgaggtgcgtctctatacacacactactaaaatcatatacagtatatcacacaaacaaaattaattaaaccagctgtgagagcgagcacacatttcacaaatcgattgaattggaagttgaaacacaagatatgcattgcatacacacaaattgcctgtcgatttggctagcttttttgtgtcaaacggacacaagtaacattaaagcactagcaagctggtgatagtgtggactagtggtagtagtggcagtaaccatgcacacgcatgacaagcgtgtggacgcgacaccggctagcagtatagcttacaacttgagagaaaggtcgatgtcctcggcgtcgccgccggctgccgcggcgtgcacgcggtacccgtagcggcgcccgccgtcggcgatccagctgacgacggccgcggcggcgccgccctgcggcgggtagggccagccgagctcaggatgcggcggcggcggcgccgccgccgtcgtgacgccggcggagagctcgcggctgcgcttggcgaggctgcgctcgagcttgtgcgcgttctggtggccgcccagcgcctgcgagctgtagaacctgcgccggcagtaggtgcacgagaaggcgcggtcgtcgccggcggcggcgagaggcggcgccgggttcctggtggccgcggtgtgctgcctgccggccgccgtggagtggaccagccgcaggtcgaggttgacgtcgccggcggcggcggtggtcgtcgtcgtcgtcgtcgacctcgcgctgatgatctccttctccatcaattagtttctagcttggtatggatgtgcaaaatgtaattgtcggggtgggtaagaaagatagtgtggtgcgagctcgatcgaggcggccgtatataaaaggaggaaagtccaattaagcctggaggactagctaggcgatcgactagctaagcttagcttgtatggggattattgtcatgtcggccctctagtgcttacggccacacggcgctgttgttttggttgggcactagcaattaatcattaatgtcaataatggaaatatattccatgattattcatttttgaataataatcgatgttacatttgagctacatattatatgtacacggctgcgggaactcacctcccacgcacgcaaaacagagtgatgtattttcttatgattaattaggtatgtactaattttttttaaaaaatggattaatatgatttttttaagcaaccttcgtagaattttttttgcaaaaatataccgtttaacaattttttgtaaaaaaaatactatttaacagtttgaaaagcgtgcgtgtgaagacgaaggaggtgagttgggaactgagatcacttaattcgacactcgaaaacagtaacagtattaccaatctttctgccaatgatatttttttttaataatagattaagagacttaacctctacaccaacaaaatgtacacagctaatccatggggactttaatcaacagatatctcccaactggtactactagctagctagctagacacaaaaccaggatattatccaagatgatacccaacgtttccctagctagtccaagacaagttggtaagatatcgtaagcaaattttgaagttcttataaaaattgttacgtgtaaataactatgtccatcttgactctgcaattaaaggcatgctctccaagactaagcatgcattacatggtatcacatggataatgggtaataattaaggagattttttttccttttgctaccgattagagcacactacatcctcacttttgccatagcaaaaaacctcctcttaatctatgcgcgccattattctatacaagtaatgttttatttttgctgttgccgcactttgaccgatgtctaatataatgtctttcaccagtccataacaccttgtatgttgcttgtacggaacaataatggaagagtacgtcattactctgattgtgataaaagcggcaatatgtagctaacccattgtagagacaaaattgtctgaattaagctaacaaatggactacatattggcaatcaatcgatggaagctctttgccatcatactagctagctactactccttcacacacacacacacacacacacaaatctagaattgaatttggcataatctagctcctaagctcttgtacatccagattcgttgtattagattgtatcaaatctaattctagatcggtttttcgtgggacagagggagtgggtgttatattcactcagtaactaattaaacgtgacatttgcatatctccgtgagtatctggctagtacattgtaagtacctacgtgtcgtaatttgctctgcgttgatggcatgcatgacgtatgcactccagtcgtctcttgcacgggacgtgccagattattacttttcatattttactaatgtacggtatatttatatttataatatgctcagatatccatatatctgtactactatataatctttgagattctttaattacatacgtacctatgtacggaacgagtacggcatatctgcttgtatatatgtgtacagcaagatctattccatttgacctttatatacggtatatatacatgtatggtacatttagttatgtatgtagtactcctatgtgcagtcacgtccactgttctatatatggttgatacatgtaataagtcgtttgcttatatacatttgcagtaaggcccatgctgatcagcttgcatgcatgatcgacccattgtttgcatgcattgcccttgattagctaggacaataaagtagctctaggtagctagctagcttcatccatgcttacttacaactacctccatcacattataagtgcaaccatgagtttttatgcctaactttgttcttttgtcttatttgaaatttttttataattagtatttttattgttatgagatgataaaacatgagtagcactttacacgtgacttatgttttaaatttttttattttttttaaataaggcggacgatcaaagttgtgcacggaaaatcatggctgcacttaaaatgggactgaggaagtattaattagaaaaaatgttctatactccagttttgagcatgtgaaacgatggtcatggagagcagtactccctccatcctacaataaatttatatttataagatattaagataactttagtaagaaggaaaaatgacttaggtgttgagaaacaatattgataaatggtacttctcaatttacaaagtgagcaaggatatatagggtgatagaaactaattacccctgacccgtttcaaaatatagcaatctaatactagattggatactgacatattgtatatcctaacactacgaatttgaagaatgaagaatgaattacctatccagattcgtagtatcgtagggttctagctactagcgctactagctagtatctagctgcaagggctacgtcatgcagattcatgcatgcatggctgaaacttgaaagccaaatgaaaacaaaactagctagagactaggcaaagatcccctctaagatgctgatcttactacacggctattatccagatgtattattatgctcgaccggatggaagctgtgggtgtgcatgcctctgacagtgacataggttcagtcttcagatcagcaagtacattaacatgacttggactgcagcatgcaactatgcatttttaacaaatcaggctctaggctcctctatagcttggcccattcctgactgcccgggcctttgcctgaaacccaagtacccaacaagtataataatttctggatcccatcgattatattttgggataaatttaaataataaaatctcttatattatatgatggaaggaatatgtttgctcggagtacattgcatttagatgctgtatt

SEQ ID NO: 1529 - DNA, 625 bp, Oryza sativa
aatgcaatgtcagatgtcacaaaaagtatttactttcattgctaagttccttaattttatttgctctttttatctcgtaaagtatcacatttcttatttcttaatccatgtttatcatcattttctttgtaaagggctatctgttctcttatcgtcaactagtctgaggttatttgaccagctaaagctccccttccctggtcatgttcttgtccttggacctcgagtaagtaatagtatctggtttgctttatgggttgtatgattttaaatcctacttaaacctaaggattgtttaattcttatatttttgtgaactctttctctgtttcagggttctgggaaaactgctttggttagggctgctgcaaaatactttgaagaccataaagagatattggctcatgtgtaaacatctcaatctttttattcagagttatgcagttgtttataaaaaaaaagttgggggcaccttaagttatatcattaaaatgttgatttgtccttgtgagcagaatatatatagattgttccaaacttacagtgggcaaggctaaggagacaaagcaaacaattgaagatagcatttctgaagctctgcttcacgcaccttcagttatcttat

SEQ ID NO: 1530 - DNA, 685 bp, Oryza sativa
tgctttaccatggaacatcttcaaaaaattaatcatgatttgacaagcttattgtaacatgaatgacgtcccagtgtcatttaacatgaatgagttgacagcattgctttactagcatttttttatttggtggaataagatatatttcaatattgaaatgcaaatgctaacacattagatattccaatgaaaaaaaaaaaactataaccatagaaatcgtctcacctgagccaacctctcgtcacgcctggcaatcttcctctcacgactggccttgctcttggcacgcttagcctcaaactggtcagagagtgtcttctctcttgccttctcagccttagacttgtggatactttccatgagaacacgcttgttcttgaacatgttacccttgaccttcatgtacatgtcatgatacatgtgcttgtcaatcttcttggcctcacgatacttgcgcagcaaacgcctgagcacacgcatcctcctcatccacaggatcttggtggggagcctagcctccctggtacccctacgcttacctgcaaaatggcagaataaggaatacgcagagacattttcacactaaaataacaatgaacttaattgtacacaacgcaccatagccagagtgacgtcccttctgcttggcctcatgggctctccgtgcacgggacctggagtgaat

SEQ ID NO: 1531 - DNA, 703 bp, Oryza sativa
cgaccactaagacaagctggaaatccccaaaacaacacaaaggtagaactcgaaggtagaatggctactcacttgaggcagttgtagtcacttcgacctccgcatcaagagtttggtcctcgacgtcatgtgggacgtgtggttcaaactcgaataccggaattatcgccagtgactcgggctgcccgcgctgctggacatcctcgtcatcagcatctctacagtcgacaagaaaaaacttccgagatcaacggtgaacaaggatgataatcacacgcacgaaggcaaccagagttcaagatttacaagtcacaaaaaatacaagaagtcctactcttcaaaaagggggaggacagactcccccaggtcatcgacttcttccatcaccttcttacgcgtgtcgcttgccgccccctgatccaagatctcgcgcatatcgagttcaggacgcgacaacctcacacacgcgaggacatgacacgccccggtatagatgccgttggacgtctcctccgcgatcctggccgtatgcttggaggggatttccccatcgccgtcgccagctccgcaagagaagaggtcaacgagaactcgtcggggttcgccgggatcgtggacttgatgccgcactcctcggcaagctggtggagaccggtgtaggtgacccgcagcgacccccggatctcggagaggtcatccccca

SEQ ID NO: 1532 - DNA, 609 bp, Oryza sativa
aggtggatgggcgtggtggcggcactcgggttcggccgggggagagaggaacaggcgcggctggaggaatactatgacgcgtcgccttcttgggccggctggtccgcgcaggggcgagcggcgtgggccgacagggtggacgcagaccacgtgcggtataagagggggaaggggagctgggccactgtggctgcgggccgaggaggctaagggcggctgcggcccaacggggagaaggagacccacgagggatgggagaagagggaaaaagtacaccagagttcatcattcaaatttctgaaggaacaatctttttgcagacttcagttgcgacagagacaagatatttgcagacaaggcaggaatggagtaaaaacaccttgcaaattcgatgattttttactgtacacatattacaggactgatgttacattatctctattcgctcatggcggataatctgtatttaattacccttccatatctcaggttcatctctctacatacaagatggcatacatgcactgacaacgaagaactaatatgcatgtacagacttcttgctttcacatatataatcctttcttcgataagctgaactccggacga

SEQ ID NO: 1533 - DNA, 1278 bp, Oryza sativa
tacattacaccacgtcgaacaagcccaacgcagacatcctgaactacaccggttcattatgtaaagttaattaaggagcaggactaatcatggtgaaactggtcgatcgctcataactattcgactagttttactttggccagcgatgtatagttgtactcacaagacacaatcccctgtcatgtcaccatgcttggcttgacacatcaccatgcgagtgattgtgacaagacccttcacataacttacctcaagccatttacatcacactgcaggtttcgcccctacccttggcgccactaagggatggcagtgccaggggccacccctatctcttcgactcgacgaagcctgatgattgggaggcagggaggtggaatccctggcaccgaactcacctcccatggccaacgcatctggtggcagcaccaacaaccataaagaaaacaagaggaaaggcaaggttgtagttggtttccgatagaggtgaaaacagatcggataatatccgatccgatccgctctgaatccgtccgaaacaaggatatagtatgggcttttagaaatccagtggatatggatgtggatgcggatagtatgatgcggatgcggatatggtatctctaaaatccggcagatgtggattatccgacattttggtcggattatccgataggtcgtttgccaaataatccgaaattatcaacatatgcaaccactctatctattgtatataacataagttggtacatccaatgggctaattcatcaattaacatagtttttttagtctaagagcttttatcgtctcatatcacactcgcgtagctactccctccaagttgataatacttgtcgttttggacaaggacacggtctccaaaaagcaactttgacaattattttccattataatatgtatgaaagtgttaacaaatatatgattgtattaaagtactttttaagactaatctatacaagtagtcaccatatttgaaagacaaatattttgaaaatgattcataatcaaagattataaagtttgacctcacccttatctaaaactacaagtattatcagcccggagggagtatattttatattatggacatcatgtatgttgtttagcacttaatcatataattattacgatgggtcatttattgattatagtattattgttccttgcattgctaactcgatgttgcattgattgcatatacacgtaacatcagataaatttaatccatttcccaaattggatcttggcctcaactg

SEQ ID NO: 1534 - DNA, 587 bp, Oryza sativa
cattttaagatcttgagttcaaatctctataagatcgaatattcggattggattatttgagggctaagttttaataggctaagtttctaatttaaaaagattgtatatatccagagtaaaagaatacccttctaaaaaaatgacatcatcaacgttccccactccctgagcatctctgaacatccatgcaaaacgattcaaaagtggttgattattaagcatccttgcataacaaatttagtctgtgaaacatccatgaatcatgtagtggtatatgtttacacagctctgatcgctaagctagcatggaaggatgattattaaacatgcttaataattttataatgctatattttactaccaagcttcacccaactctgtttgatcaaagtagcaaccggttggtccatcctgagggagcagagctgccttgaccgcacctctcgcgccttctttaggagggatgatccctggtttccagttgatctccgtgttgacaaatccaaggtgaacgcagttgatgcgcatctccgggtgcctcttggccaggatcctggtgtagaggttgacgacggtcttggacatgc

SEQ ID NO: 1535 - DNA, 501 bp, Oryza sativa
tgctacagagttcttgaagtgattcttttcccctgttcttttggtaaaaaagaaggatggatcctggcacttttgtgttgattatcgccatctaaatgctataacagtcaaaaataactatcccttgcccgttattgatgaattgttggatgaactcaatggagcgcagtggttcactaagcttgatttacgctctggttaccaccaaattcgtatgcaagtgcaagatgaacataagacagctttcaagacacataatgaacactatgaattttgtgtgattccttttggtttaaccagtgcaccagccacttttcagggcgtcatgaacagcattctgcacccttggcttcgccgctttgtgttagtctttgtggatgacattttgatttatagttctactcttgaggagcatattcaacacttgagaactgtgttccaggttttgcttaagcatcagctcaaggtgaaacgtagcaagtgttcttttggccagcaacg

SEQ ID NO: 1536 - DNA, 1258 bp, Oryza sativa
acaaacctatagtttccccatggcaatactgtcaaccagtccaaataattccttgttacattaaactcgctagaactggcttccaacagctgaagctttgtgagttcttcttcaatgacttgcaaaacatgagcaggacatttctccttctttgcttcaatccgctccctaaattttgctgcaacacataaatgaaggacaattttgaatcgtccactagaaatgtcaagttctctgggcaataaaaaaaacaaagccaataagaacagctgaatcacaaaccagacaatgctgttttgtcatcagtctccaaacctagctcctgaaagcatcagatatgcagagtaattatgaacctatataaaaccagatcaacctagaaggcaacaatgattatatttcccattttgcatggaatatatacagttcaagtcttcaagagcacacggctgaatatcagatgtcaacgttagtaattctgtagttctagaataggcaagggattattgcccattccgctaatctatgaaaagcaatggtgtcatcagcaatcggagtgccaaattctacaaaagtaattattcaacaatagaaatgtaacaaaagtaactttatacaagaaacactatatgatggagtaccttcttgattgctttaagttgctcattcaataaataacgccgctgatccccacttattttttcttcaattgcttttgcaatggattgctggaaaagaagtgtattggtcaccacaaatgctcaaccaagcaatggtaaccaaggctggagatagaagaatgaattacctgcaacttactaatctccatctccttcttgactaactcaagagttaactttagacgtttatatacctgttccaaaaagtgcaatagttggactgaaatagaccaagaaaatggtataaagaatgtggaatcttcaagaacttctagaagagtgctggtaagagaagctgtgctgatatgttccataatggattttcaaaacgtattcatatacccaatgttctattgattattggtgcatttggaaagagaatttgctagatcagggaataagttgtgcttctttgcagatttgcagtatatgcaaaataaatttcaaaatcagtatcatatctgctgaattttttaacaaaaaaaattatgttcaataagtcagagagaaaattctttggagtatagagtaaaattatagcacaaatgagacaaccagcgcacatggtgatgcacaat

SEQ ID NO: 1537 - DNA, 26111 bp, Oryza sativa
  unsure (1)..(26111): unsure at all n locations
aattaaggatacatatagagagagatgtggtagggatacacatgtagaccactatttgcaatgttaggtcccagaaataatggtaagttcatcatcgtgcatcgactgattgccccgtttgatatgaacaagagtatatcaactagtatactaatacgccattatattatatgtgtgcatatatatataggagtagtaaccagtgaaccactagtagcaataaaaatgatgatgtggcccttatttttaagattttttttagtagaagtagagatttggggcctgttcattttgatgttattttcaaccttactaaattttgtaaagttgctaaaaaaagtggctatatttagtttgctgtcaaattttggtaaactatataagaaatcctgccaaaattttagtaactatgccaaaattttggtatgttttttttagcatcaaagtgaacaggtcgttggcttgccaggataatgaatgaacatatgaagtcgatatctatagtagcgagacaaaagaaatgaaaagggggatctacctcgatcgatcgattgaccgatcgtagatcgcctagctagtcgcaaggaacttgcagttgcagtagcctccaccgcccaaggagcccgattcgccgtccaaaaacgcggggaagccatgccgggccgccatgtgaccctcgagacttccgtacggcccatttcggtttgggccaaaacgggattgacttacgtgcggcccattccggttccgtcacaggatctcgattacgtgaggcccaataacgagaatatgaattattgggccatgaagaatataatagtaatagtaggcctgcgtgatggaaaggaaaggcgggcgataggatgctggatggttcagcaacaaactgaaatttttactagcatcaggcattagttacattgtttttcctctcattctcaactgtatcgttatcatgttgtaccatcccgttcatgtggaagcttgactgttggagggttctgagcaaccatggcgaattgttggtgcattttactgagactctactaacaaatggagaggctaatttgcttaagaaaggaaaataaaaagaagaagggaaacgagtagttgaaagggaggcaagcagcatcgagatccagaccatcagcgcagcagagttgtttagatggcctcttgccggcatcggaaccaagcaagacaaatcacttgtcttgttggaccattagcagggtaaaaatatgtctaactgtagcaaaacttcagtttgtggttggaccatccaagacaagaagaaaaatgtcatgcacaactgagcttttagcctgatggatggtaaggattttctacagctagatgccatggtacctatcaattacatgcgactcaaaatagttatagaaaaatttaaaaaaaacttagtaacatcaattgtgttgatataaggctacacacaaacatgcataactaaatttgatctacaactagagaaacaaaaataataaagtcggatagtgaatagtacccatacaacgcagataaaatttgttatttttgtttcttcatatttcgatcgaatttagatttgcatgtttgtatagtgttttacattattgtagtctatcttactaaattttataaaatttttatatagctatttaaattacatgcatatgccacggtaccaccctgatggactggctggctgcaaggtgtgcccaatgtaggctattactagtagaattcagtgattcaccgattgatgatggatgccaccaacaaacaacgctccgcgggctcccttgcattcactctgatagtagtaccagttgtaacttcaccttgaaggtttgttcgagggagttttaattttcaataacaaccggtgaaaatctgaaaaagctagaaaaaacagcttccagcttaatatattttatagattttttttagaaatttattttatagattctacaattacaactttcagacactgatgtgagcttttaattctgaaaaaaacatgtaattggcagaaactctcctaaatagatcctcagtctctcgtgttgagcaatgatacatacgcaccgtacacataattactcgatcaactacatgtattcatcttaaaaaaatagtacccaacaactcaactgattttttttaaaaaaatttaatttaaaatcaaactctttcaaaacttatttttaagatctaaatcttttaaccatgccaccgaactgacgtagcaaaatgacattgtcgcacaggtctagctagcgtgacaactttatttgatcacgccacgctgactggtgtgacatgataaaactatcacacatgttgtgtgtgacatgtcagtgttgttttgtcgcgtcaagtgggttggtgtgaccaaaaggttcagattctataaataaatttgaagtgtttgtctttaaaactaaaaatttaaaaacttcaaaaaataataaaaaaagaaatacaactcaattatatattgagtatctagcctgcataatgtagaaacgtaaatcataacaatatataataacactataaattatttgatatctcatatctggattatgaaaatacaagtggtttgcatgctttacatgcacgtactagctagtactacaacacaaaacacaagtccatctcttacgaattaactcgatcatcgtctcggatttgtccaccgcattattcctcgtatcattcgtatacattcattcattcagactataaacacaaattataactagtactatctaggaatatataatacatgctagttttttaatgacactgactagctagcttgccggctggttcaaaccttgcaaacggtacgcgccattatttgaactcaccgcatgctcgtactactgtccacctccgatgccacctccagcgcctccgccaaatcctccgccgccaccggcgccgcctccgcctgcaccatggccgccgccgacgcctccaccgaaaccacctcccttgcctccgccgaaaccgcctcctgctccagcgccaccgccgccaccgaatcctccgcccgcaccgccgccaactcctccgcctttgcctcctccgaagccaccaccgaagcctccacccttgcctcctccgaagccaccgcctgcacctgcgccgccgccaccgccgccaccaccaccgaagcctccacctttgcctcctccgaaaccaccgcctgctccagcgccaccaccagcaccgccaccgattccgccccctccacctgcaccaccgccagcgccaaggccaccccctgcaccggcacctcctcccgctccaccacccacaccggcgcctccacctgcaccacctccgagaccgccgcctccgccatggccgccaccagcaccacctccgagaccaccgcctccacctgcaccacctcctgctccgcctccgagaccaccgcctccaccggcacctcctcccgctccaccaccaacaccggcgccgccaccagcaccacctccgagaccgccgcctccacctgaaccacctccaagaccaccgcctgcacctcctcctgctccacctccgagaccaccgcctccaccagcaccgcctcccgctcccgctccaccaccaacaccggcaccggcgccgcctcctgctccaccgccaagaccgcctccggcaccgcctccccctcctccaccaagaccaccaccaccacctaggcctccaccttttccgccaccaaaccctcctccaacgccaccgccatgtccgatccctccaccaacaccaacaccaccacctaagccgccacctttcccaccaccaaacccgcctccaatgccgcctccatggccaagaccaccaccagcgccccctccaaatccaccacctcccccaaccccaacaccaccacccttaccacctccaaacccgatcccaacaccgccgccatggccaacgccaccacctccaccaaagccgccaccgccgcctaagccgtccttgtccaagcggcgcgcctcggcggccactactccgagagctaacaacgacacaagggccaatgccgcggctcgcctacccattcccattaccatatatatttccgacgtccagtagtcgtcactcgctcactctcactcaagtgggtgatgatctgaagctcaagcgtgtagaaggtgggtttatatagggaagaaggggaaggctgctcctatcatatgaagcgtacgaagaagaaggaaggctagtgcgcaatgcatgtgcagtgtaggtcgagtagagtaaatgcagttagttggggagcctatgcctgcctatctacactccagagaggagaggagatcgagctgtgggctatggcggtggcggtggcggcttagcttggatgaggaggccggccgacacagtgagtactagtagtgcgtgacagctgctgcatgaggagaggagctggataacgcggtaggaataggatcggagaaaggaaggttacattacaccatcgatttgacgtgcggctagcgagcgaggccatggatggccggcgagatgcgcgcggcgcggcgggattgggttggtggtgtttgtgaaccggtggcatttatgcccacgcgctctcgatcagctggagtagactgcactgtgcagccggattttctctctgcacatctttaaccaaccaactgcatgcgcgcccgcggttgcatatgcatgtagtattatgtatggtccatgcagtcaagtgatcgagtcagcactacacatggactgggatgacgtacgtatgtactagtacgtaggagcgaaactaattactaaaatgaaaagctatgcgtgcagcgtatttcatacgcatatatgaatgcacaacgaatgtgcaattgtactgtattcatgtcatgtgttcttccagctgggaccgactttcatttcatttcattacggcttttgtacccctactccacatcaaaaatattagtaatatcactatatgcaaatatagtctccagctgagctgtactgaactattgctagtcatcaaactagtaatactagtatttattggactagctcgatctgccaataaattttggagccaactctgcagcttgggttgacaaggattccactccactgttcaccattgatactcctgtatgataacagccagtgtgttttcatgttaaaattggaacgatgcgacgaaaaagttgaaagtttgtgtgtgtagtaaagttttgatgtgatggaatagttgaaagtttgaagaaaaagtttggaactaaactcggccacggccagatatgagtcgttcgcttcatttctaggctctggcctgtgccaaactttgatttgcagggcaaattacaaactgtggatttcgatgaaaaccattctgcaaggcgcatgcagctagactctctttcatgtcatataactgcatgtttaaccttctccacagtttttatcactgataagagtgatctatacaagtatttaaaatgttactacatgaattccgttctctatttctaaccaaatctagtaggaactcacttgaaaggcggcagttcattccatcttccgcttgcaccgacggccggaacgcaattatctcgtcaattaatggaaggatgaatcgaatcaatcgatgataacaacaatgctgcgacaaattaaggcatacacgataaaaaggctgcctgcatgtcacataattgtgcgaaagcaaagcgtcaggcacaggatcacagcatttaatctcagcacatggtgatgccctgttgcagcacaccctccttgcaggccagcatgtcatattagggcagatcttatcgacatatgccactgaaacccgatgatgttcacagtttcacacaggacataaatcagaattacaggttgcagcagaaacaagacgatgacattcctccaaggttttttagaatctagaattacattgccaattccactctcatctcttcagcaaacaacaagctaattctaaagggcgttttacatccgcacaaatgctaccgggcacttgtcctaatccccacgatgcacagcgtggggatagctttctaaagggtcgatcaccgatgggtacatcataagagcaaatcgctagaggtctcaactaaactcttccgtatctgatcatcggcttttcttcctggtgttagcaggagaattattctgctctgaaatcatctttaacagattgacaagtgaccgcaatctgtcccacacactaaggccgtagagagtttcaacgagcaactcttggaattcaaatccattctcggagacaggatactgaataaagatcattagctgagtatcagaacaagtagtaaagccatacaatttttttcagactacttatctgggaattaacatacctgaataggttttgggatcatggttttaacatatggccaccatctatcttctacaactgccttgacaaggcagcaagcccgcaaaccttccacaccagcaaatcttccaaatccactatctttgacaccaccgaatggcaaagactgcaccaagaaagagaagcatacttatataggcaggataacaccgagcaatgaagaaaaacatgctttcagtaatacaataaatgaaatgccaaacattactacaagataagcatgtgagctgcaagagatctttccatggttagagattatcatactggtgttttctgttgactatttcaaagaatataacacaaactagaaacttctaattacctacctgacacatataacttgaagcaaaatcattgattgccgcaacaccacagtgtagctgggatgctattttgatggcacgcttctggttgccagaaaagacagcacaaccaagaccgtacttggagtcattggcaagtttgacaacttcattcataggaattagaatattcaatgaattagggcaagaaaagtaagggatacacaaagaatagtcacatagataaaaaatcacaagaacaagagagaaaggaaaaagtattgcgagcaaaaatcaaaacgtaaaaagtgaagaaccgattattaatggattaattcccaaaaaaaaaataagaaaaacagatggaaaagagaacagtgtaactatataacaaggagactatancctacttgctttgcgataatattatcatatgtgatgattaacattcaccaggacagttggaggaaagaattgatctactgcatcttcacccagatggccaaagctccctctgccagcaatctcagcacctttgtcaacagcatcattaacaagattctgaagtttctcagagtgctctatcatacagatagcacccatatcgtatctgccagataatggaggaccctaggaaaagacaaaagagcaatggagcaaaccaaaagataagcgctgaggcaagattaccagcatgaattaaaaatacgttggaaactaatatctgaaaacttaaataaggttgttaggacaccttaagaaactaatagcttaatatacatatttcagatagctctaaactgaaaagattcagaagatttagccgtgtgaatacagtatgaagttatacagaatgttagaaatgcaaaactacactgccaggttagctgttaatctgcaattttgcacttgcaagatgaagcacagtaacagtatccaggaataatttgaacatacatgaatatgatttgccacaggtctgtaatcttggtcaaaatcaaaagaaaggcaatacaaattgcatgtcagtaccgacttaagagtacaattttgtgtacttacgacagatatagatttgattatcttcaccacttgggaaacaaatgttgaatagatatccttgtgaacataaaatctttcagcaccagcacagttttgtccgctagattgcagggcagctctcacagcaacttgaacaaccttcaagtaattaagtgccatggtttagttgcagtgctcgttcagaaaatatggttctcaaaagaaatggcacattgttgaagaaaacatgctcttcatgacaaagaaacactaaattacacttacactgggtaagtctacatcttcacatacaataaatgcatctttaccaccaagttcaagagttacaggtattaatgtatccgatgctctgttcatgatctgtggcaagcattaaacagaacattagaacagaggacagtaaacgtggacaagaacttcaaacaagtacataaacttcaaacaacaagtaggactacatttttataatgctccctgaatttgctttagttaaaagttatatgctagaagacaggttgattccatatacaaaatagaagcacatcagttctgaaacagaatctgtagctataaaatgcataactgaacatgattaattgatttagtgtcccaaagtgagcaaaacaacacttctcagcacatctacagcagtataaaaattggccgcagcatgagattaagaaaccactagttcagaggaaagctataccatccttccaacaccaggtgatccaacaaatattattttgtcgactgaagatacaagagcttgacctgtttccgcaaaactataaacaagccaaaaaaaaaagagaccaagtaagccatggtaagcaattatcctgaatgctaaagaaatgcagagtagtattcatacccagttattatatgcaccagattatctggtgcaccaacagctgcaagagctgcttgtatgatacgaaaataaaagcagcctgaccaacttgcatgctctgaaacctataaaagggcatcttgctgatcaaatatataaatagagttgaatagtatttagcttagataaaaaatgaattccggtgattaaaatgaaaagtagttcttatttgcagcaaaagacaatattcatatggcagagtagtgttgcagatgtttcgcttagcatagcaaaaaaatgttaatgatataattagtacagtatggttatgtgaatatgctatctcttagatgagaactgttaatctgaatatctctatcagtgttcaaagctgaggacgtttgaccattcaaattctaaatgtcatatgtatatgaacaaagggagtacaaaaaagcaacatctgatggcttacctttataactgctgcattaccagagaatattgcagccagcattggattgaatacattgtggaaggggtaattccaagacacaatcgcaccaataactccaagtggatagaactcaacttttgctttcttgtgaagcattgatctccacaggacctgagcagaactaaaattaaaagcaagtaggggaatgcttgtatttaattaggataaggtaataattgaagaaagcacgagtttgttgggagaaaacaagctcgggtctgtgaggatatggggacttggatccaaaccaaaattctaaaattccttgagtaccatccatcatccaaacacgctaaggtatcacctcaggtgtaaagaaaggaagacttcagcaatggtgccacagtacctaattgctaacttcctatgttacagaatattaatgtgtggctgcatgcataaatgaaaaggcttatctttcctgtgaaagaactaacataagttgtgagtcaatgtctgtagaattcccaactattttgaggttttaaacttttaataggtagttcattttgtattcaagaccagagttcatttgctgtgtatttccaatgctcacacctgttgagctaccagacggtcccatataatcacatcctattgcacatcgtaaagacaaagtggtgaaaacaaaagtaagctaacatagaaaagttaatataatcattgacacaatatacaaggccctaagttactctgtctttcaaataggaatgtttctaagagtctaacctgtattcaggttttaaccacttctcaccctcatccaaaagccaggtaatcttctcacaggtggtcattatctcacctaatgaagcatcaaccatagtctttccagtgtcccgggatgatatcctgcacagcacaaaatgtagttaccctcagatattccatgttctggaaaatgttatcaggtgcaaaggtgcaataaaagaagaaattgatcaggccttcatgaacagatgcaagataatgaaaatagaaagcacaaccaacagcgtctagactaatttaaagataagatgccattttgaattatgtccttactcgcatatcagatcctgatgttcaagtatatattttagaaggattcgaagaaactggcgtctttgcttgaagctgctttttgcccatatcttttgtgctttcctggcttgcgcaacatgctccttaacctgattagtcaaagaattaaaggcaaccaaaacaaagtaggatgtcacgctaatgaagttacaagaaactgcagtaacaaaaagatacaaaatttatttgttccttgatcactacttcagaaaatcaaaatcgattatgaacgacgaactagatctcagttaataatccaaaagataatgacccagacaactaaaccctacattatatgttgtatttaaaggacctaacaaaagcaagccagcaatatacctcatcaggcgtcaatgcagggaagtatcccaagtatttcatagttgctggctcatagcattggaccttgtcagtctgagctcctttccccttccttggtggtatctgcaacagaacataaactgaatgtgttgtaagcctgtaatatcaaagcaaccatgtggctctgctagctctcataaatcacatgccactgtgagccttattcagctggagtgaatcaatgcaactttttttttaaaaaaaaaaagaaaaggtgcctagtgcttatctgaaacctctatcagcacaaatcagagttgactcgtagcatcaattcgaagaattcaaatagcactctgttcaagaatgcagttcatttacatgttatcatcttactgcatctggccattttgagcatgggaatttaccaaattgaagttggagtatgtaacaacgttttaacacttgatgaccgcacacactgttgcctgttgctttctcaaaaatttaataaccacgcccctggaatttgcttgaacataatctcaattttcacagaaatagcaagattgtggtacagcattggaacaagtcgctagacttaaaaatctaaaactggaaattccaggcagacagtctttaaacatttgtccactaacagtaagatagccatagtacaccagacagtaccaactcttcagacctatgagcacctgaactgaaccgaaatagtgaaacgcaatacctgaaagctagacgcaatgtgcgatcctatgtcattggaaatctatgtggaagaagccgaaacaagcaatggcagcagaatgggccggtttgcgcatcaaagccaaataagtggagaccgagggtgaatagacaaaagaagcagagtgcagatgcatatgaagtagtgaatcatcccagggcagtatagaagtggaaggaaaggggaaaggggattagtaagtagttaaacttacgtagatgtagctatcctccttgttctggttggcgtcttcgagcactgcatacaatagaacccgatccgatccgataccattagagtaaatcccacataaaccccatgagccatgagctatgagcagagcaatctcagagggaaataaaaaataaaaacagtaaaacctaagtaccgtcggaagcgtcgacatcgatggaggggacggtgggcgggatgagaaagaggaggatgcggcagagcgcgtaggcggcggcgagcaccaggagcggccaccacaacgccatggccggagactggggcgccaaccctaggtcgccgcgcgcgcgtggctcggactcggagcagcagcagcagcaagggagcgagttgaggttgaggaacaacaaatcaaaatcaaaatcgaaatggaaaaaaaaatccaagggggatcgatcggatcggggggcgtgctgtggctttattcgtggagtgcagcgcgagcgtggcgagatgcttctctctcagttcagttgcaactcacatttcgactcctctcgtctcgtctcgtgtcctccgccgtatattatactggactactgcccccacattcacagaaaattcatttaatcgtatatctagttatctactccctcatccgctttaaatttagggttaatcgaattcgtgctaatataatttatatcatttatgtgattttggaaacgttagatcatattattggtagaaattgagggtttgtcccatcacactttttttaaagttttttttctacttctgagaccttttttttggctatgtgccatggacaaaggccgaagatgtgatacatttccattatctaaaaaaaataatttatatcattttaagaaacatcattttaacttatataattgaaacgatggcattataaatttgtgccgctatttaacccttcgacatattttctaacaaaaaaaaataaccatcttggcaatctcttcctccatccccctctctactattctagtggcggtggacatccaaatcatggagcccctccaacacaaccatccattagcactgcggaccgacgagaggactaaggaggaggcgatgccccgaggtcgactttgccacggcacttggatacccccatggcggtggagagggacgggacacggacgggcttgacggctgtagccataggagagagggacaggcctggcgcacggcccttctaccgccacgacgaagaaggcacactgaagtggccccaaccaccaaatccacatacacgtgggtatggtgagaagtagatgtttgtgtagtagagacaacaagtggagctgcatccaccacaaatggctttcctctgaaaacgagccaaaggccacagctcggctgttggtcgctgctgattgtcaccatcttaggcagttggggtcgctggctgaggctactatacgtggtctaagacgccacacaatggtatacgcgagggaggaacagaggttggaagggaagacgaaccggtaaacaatggcggcgatttgctgaggtaggtttgcagcctgccaatgcttagaaaccagatcaagagatgcaagaggaaaatgagtggagaggacgaaggtacaagataaggggcaatttggtaaaaaaaataatgtcagtgcatcatctccggtatcaacagatttataatggcatcatttgagttagtgaattgtaataggattttccaaattaaaacaggaaaaattatgatggtatgaatacaattaatcctttaaagtacatgctattgtaactttgttttaattcaaaaatttttatctttaactattgatttctaaaaatccgtgttgttgaacaatatatttctcatggtagatctattaaaacgtaaatcatataaatatgaatttataatgtttgacttgagacaaaaactaaaataatagtaatttgagactgtggaaattaactcctcgtgttcatgtatagttttgcatgtattataccaatcagcacagtcacgcgcggcagtgctttcaaacaaaatgaactgaaaaaacattcataagaccataacaagataagcagagatgtggtttttggtttcacatgatacagcaaaagaagagaaaaatgggaaatcagcgattattaattatctgatcgtcatacaacagaaccatcccagcttagactgtctccaacaagtgacctataagggcacccaaacccaaaatgggtctctgatagtactatttcagcctccaacagagtacctatacagaagacctattttacgtgctataagacacataacctaaatttgagtatcctctcttctgaagacctatttgcagtaagggttctcttttaggtcttattgttggagaagaccaaaaataggtattgaactctttgactgtagcgctatgcaaacgtgaaatgggtattgtattttgggtttcattgttagagaaagccttatctgatcggaaacttcaccgaaactgaaactctgaaagtggtagatagcatgcacgtgcatttgtacatgctgtgcagatcaatgcgtctctctttatgagaactaattataatcagttattatcaatatactataataatgttgtgtcagataacagatttggattgacccaaaccgagttcatcctatccgtgacaccgtgatagctaggataatacttgcgtgcctcaaaatcatagaaagcgctccggttggcgtctccggcgtcgttgcatcctccaaactttggcaaatatatcctgttacaggcaatgtcccgcggcgccggcatcatgatcgcgttccagttatcaacgaacaagacggcaccatccaacctctccaatttggtccatgccatctcacacctgttgagcctgaacacgctgatcgccccatcgctgtgcggcctgaaaacccatgaactccagcagatggcagtacatgtcacctggaatcggatcatcaccaaaattattgccatccacaagtacaggcgcctccggcttgtcaagaactctccatgtcgtgttgttggggttgaagacggcgaggccaccacgggtccccaagcagtagaactcgccgtcgtagaacaccgggttgcagtacgccgtccggaacggggtgtgatcgtcgattcgctgcatcgtccactgctcgtctcccgcgcgccacagcgtgacgtagacgctgcggtttcgccccgtcggattccggtctttctcgacggagaacgcgatgcagtcaggagacgtcggcgccgcagacaagcatatgccgtcgaactggttgtcgacggggaacgtcgcctccgggaactcgaacatttctccggtgaacgggttcgtcgcgtacatgtacttgtcgcctctcgtcgcaagcacccatccgtcgtgtctcgaggagaagagcagcatctggaagtgatcctgggactgaaccaggcctgcacggttgttcttcatggttgtactcctgctcgacgattgggtcgaacagcttgtagacgccggtagaagtggagcagatgctcatgagcatcgggtacgtcgagtatctctgcgcgtaatggatgggcttcacgatggagctccatcccttgcagacttgtcgcagacggaagtagtcgatgagtgatatctttgacacgatctcctctaccatgtcagtaggaagaccacaccagcatggtgatgcttgttcggaggcgatgtcgacgacagagataccatcgccattttcctgatcgattttgctgcttgaatgtacaatggcgcctgaataatgttgagttgtgtcgtcgacgatggagctaattggtgcaggaaggagccagtagattgaatcgttggaggtgagatcgggcagcagggtgaaggtggtagtccgatcatccaggcggatagtgtagaggcgaacaccatggcggcatcgttggtggaggaggtagacgcagtcggggcgtatccctgccttggtggcgtcggacatgacgacgcagttgtcagcgacaaagatggccctgtcgccgatggtgtccaccttgcgccacacgtagtcgccgccgtcgtcggtggcgtggacgaggcgatgcaggtcaatgtcgaggagctccgagtcgcgggcgccgtagccgtagtggcgcagcaggaacacctcgccttgtgattctaccaacattgcgttggccatggagtggatgcagctgggctctggaatgcctctccgctcgatgtggggagggtaggaggagacgtcgagcatggcgatggagctcatatcggtgggcacgtacattttaccttggcaactgacgatgtcgcccatgagtaggagttcgtcgtcgtcgtcgtcatcggtgtcgagctgccaccagtcgtcctcgccgggccgggtgtaggcgagataggtgtccatgaaggtggagaagacaatggtgcagtcgggcgagagcggggacgaggagatggcacacctgcgaagaggctccaatggcgtgtccagtgggggcagagaaataatggtcatgtcgtcaagaggagagacgaagaagcagtggttggaggaggcggcgtccaacatcaatagccattggccttgcaagcaagccaagcattgtttacccttgagctccagcatttggtgccgccatgccgatgggttgttggtattgctgttgtgttgagaaaaagggtccatgagcgtgggtggctcgttgtcattgccctcggcaaacttgaagacgaggaggagtggttttgacgacgattccatctcaagttcaacagcaggcagcatgacaatggattatttgccgtcttaatttgcttgctgtatcaatcgatctggagtcatcgatcgttgctaagtcaaaactgaataataatataatctatacgtataaaatacatatctctatctctatttttactattataaaaattaaagatgtttttgccagtattttgatacgtcatttgtgtatgagtcgttttttcaattcgtttgcttttggaaatacatatccgtatttgaggcggatttaagttcgttcacttttggtaatacagaaaaaatcatataagaaatctatttaaaaaagctcacatgctaacttgagacgatcgaagtcctaactacgggcctgttcactttgatgccattttcaatattaccaaattttagtaaagttaccaaaaaagtggctacatttagtttgttagcaaattttggtaactatataagaaatcctgctaaaattttggcaagtaaccataaggttttttttggcattgcgaaaatttgattttggtaggatttcttatatagttaccaaaatttggcaggaaactaaatgtagctactttgttggcaactttaccaaaatttggtaaggttgaaaatggtatcaaagtgaacaggcccttactaaaaaatatatatatctaagcaaactgctataatgaatttcatcttaaccaaaccatataaattaaaataaactttatccgttgcaacacacggataatttttctatttatatataaataacgaagaatggattaaccgatacatactttacatataacagcgcaagcgatgcgtggcgatcgagtcgtcaaatcgaagctcctcccctcggcctgatcgatttgattcgagtcgcctgccgcggtgacggtatatatacaaatagaggtagatcgacttagtccgagtcggagcgatttgggaaaggcaagtgctatttgggcccaaaaatagttccagcccagcacattacattattcctggcaggaaaaagttcatttgtggtccctaatcttgtagacttgtactgagtttcaaaaactgaaatagcatatataaggcatctctaatctatctattatattattaaaggaatagaaaaatgagcctctacgttcactctcatggcctagaaattctcacattaatcggagaaaaagaaaaggcagagtccatatagaaatacaatttagaaatagctgaaattcggaattaaaaaataaggaatattagaagagaaaactagagtccatatagaaatacaatttagaaatagtttgaaattcggaattaaaaaataaggaatattagaagaggagactagagtccatatagaaatacaattaggaaataactgaaattcggaattaaaaataaggaatattagaagaggagactagaattcatatagaaatacaattagaaaataactaaaattcggaattaaaaataaggagtattagaagtagagtatagagtccatatagaaatacaattagaaaataactgaaattcggaattaaaaataaggagtattagaagtagagtatagagtccatatagaaatacaattaggaaataatagaaattcggaattaaaaataaggaatattagaagtagagtatagagtccatatagaaatacaattaagaaaaaaaaagaaattcggaattaaaaaataaggaacattagaagtagagtatagagtctatataggaatttaaaactaacaaaaaaattggaataaacataataaaattaaaagtagagtttagagtccgtataaaagtacaattaaaaataactaaaatttgaaattaagaaaaagatgtgaagaagagtttaaagtcaatataggaatacaatttagaagtaactgaaattaaaaattaaaaattaaagaatattaaaagatgaatttagagtccacatagaaatacaattagaaataataaaaattcagaaataaaaataaataatattggaagaagagcatagagtctatatagaaatacaatttacagaaaattcggaatttaaaaaagaaatattaaaagacgagtctagagtccatataggaattaataatatgaatattgcaaatatgcatgttagttattaattatttttaatatcaaattttagttatttgtaaatttaatatcaaaatttaacatttatataaaatataatataaatattacacattaataatataaatattacacattagtagttttataaagttattgcaaaatttaaaattatgttgtcgttttaatatatttgaataatataatgagaaaacatatatgctattatatgagagaaaatataatgatgctaaccgtacaatctgcgcgggccaccatgctagttttacaaaacgggtcacattaggtctaaagatggtattgcttatgtcatttccaactcaataactaaaatgatgacagcagcatattaaataagttaccatctagaatgaaaagtgatctgtcaaataaataataaaagagaaagaaaacaggtcttgcatgagacatgatttttacacatcaaagttattatatgagataagtaggggtgagtcagcatggccccacatgtcatacatagaagaaaaaaacagagccgcctggagcacccggccggcaggcgaccaggtacgaagagcccaccaccggcgaccactcttcctcgctgtggcagtgaccaagcgccctctcaccgccggccgccggcacctcgacggacgaggaagaagagggggccttggagcagcagcgagttgaggcagaaggaggagcacgtcgtcatcggcgtcgatccaactccaagacaccgtgcgaacaggagggagggtttgatcgatggcggcaggccggcagcggaagcaggacacgcgcgcgtgccgcacctagcttccaccagcttccatccgctagctagctacttatcagaatcactacccaatggccgtaggggcaactggcaaaggaggagaagatcaggtgctgcttcttttctttcttcttcttcttcttcttcatcgacaatctttttcagatgaacgccatctttttgtccaggaacatgttgttgattcaacaacagctcgatcagtctgaaattaagatcgcgtgcaggaacatgaatcgaggagcagggcgtgcagcggcggtggagactagagccgtggggcgtggcaatggcagcattgagccaatgacggagatgaggacgagagcctcgaccgaccagaccagaccataccaaaccagacagacgagcgcaagataaataaagatccggaaaagaataatacggggaaaaaaagagaggaagatactccaccacattagcagtgcgaatgcaatcaaattcatctcaactgtatattccaaactaaagcacttctacatactaaaaccagatgcagataagtgccatcacatcagcaatatatttggtctctgcacaggaccacaaaagttgcctttcttaagttcaggcatcaaaacatctaatcaatacgaagacatgctttcttaaacgaagcctgatgagtactactagtgttccttactactactactagtatatggagtactataagatgacacttcagttctgctgcttgatctccttcagactggacaagccctgcaaaaacatcgagagatccaaaggctcagtaccgtaaacacacagacagtacgtacatacatatgaaaataaattaacttacttatcatattgccctaattgtgcttcttcttgagcttggtattggtccgctcgtgtttgtccttcgccttcttcgcgcccttggcgatttccgtcttcgtcttttggcattcgtggtctcggttgagagcgattttaccaccgcaatccttgcacgtgccaagtgggtatccgccatcctcacgcttcttggaagccatgacacgaacactggatgttcaaaacattcaacatatataatcaaacctaatgttatttgaaacaaacaaacattccttaggaatagaacccgacactacaataaaaacgttcaacacctacgatcttgtacgagaattaaatccaaggcaattttgagattttactgacagcaaaatacatgcggccgcatcttaagtcaaaaccgaaaccagcgaaggaggggagggatgtttcacaagaaaattgatcaaatacattaacgtcaaataaagacacactaacagggattttcttttcacgaaaaaaagaacttaacatgaaaaaaaaagggacggagatcaccatggttcctccaaacttgtttggagcaacatcaaaagaaaacgtggaaaaaattagacgatggatgaggagatatgagaaataggaagcagcagagttcgatcccaactcccaagaagagggacgaaaacagaggttgaaacgtgagtgaagggacgaaacagagatcaccattgctgtggttgctcgtccccttcctcctaaaaaaacaccatggaaaaagaaaaaaacaaagcgaagcttagaaacagtttagaacggaaagaggggacagaaatcaccatggttctcgatgctcttgcctccatagtcctctaataaagaacaagacccaaaatcaaatcaaagcgtaagcagcatgtgtacgagatcaagaagacagacgcactcactctaccactcgatcgagaagaagagaaagatgatgaagaagaaaaacaagaaggagcatacacattagtttcagaaaatgttaaacgaataagaggaagaggaaggaagtggggagctcgtcgcccctccgttcaacagcaactcaaaagaaaagaaaagaaaagagaaggagaggactaggagggaggaagggacagagatcatcatagctatcgttgttcgtcgccctcctccttctcaccaaaagcaacatatattcaccatggaaaaagaagtaatcaagtaaagagaagaagaacaagtagaattcagcagcaaactcaacaacagaaatgagaagggggagccgggagcgagggaagggacagatatcaccatggctattggtgttcgtcgccctcctcaccaaaagcaacactctccaagacgaagaagaagagattacacaagctttacccgctcgagaagaaagagaatagagacatggaaacagcttagaacgggaagaggggggcagagatcaccatggttctcgatgctcatgcctctctactcctcccaataaacaacaaaatccaaaatcagagcggcatgtatacgagatgaagaacagactcactcacactgtcgatcaagaacaagaagaacacgaacacaacagcaagaagaagaacaacaagaacaagaagaagaataagaagaagaacaacaacaacaagaagaagaaggggaggaggaggaggagcgagtaaggcagagagatcaccacgagtatcggtgtttgtcgccttcctcctcagtcctcaccagtaaatttgaagaagagaagaagaaatcaaccgaaacccgaaagaaaaagaaaaagaaatgagttaggaatggacaaagatcaccattagtatcggtgttcgtcgcttttctcctcaatagaacagcaagaagagggagaagaagatcgaagaggaggaggaggagatcaacaacaactcaaaaagaagaaaaagaaaaaaggtaggagggaggaagggacggagaccaccatggcatttggtgttcgtcgccttcctcatcctaaccagatggagaagaagaggaagctttaccagtgggagtcctgggagagaagagaagcagaggaggaggaggagggagggatggagttggcgagcacggagacggagggagaggtggtggaagttgtgtgctgcaacagtgtacatatatagccaggatcgacgaggcttgtgctctcatcaagcggatccaaaccgtccgtgactgctcatccaagtatccgacggcgcaggaaccaactgccctgtgccgtctgatggtgtccacgtgtgcggccgcgatgtgccttgagcagaggaggaggaaggggggtacctccgccgctgccgccgccgccgccgccgtcgtcggcggtgctcgatgccgcccatctgtccgcgagcgcagcggaggaagacggccggcgtaggggttgaggaagccagcggcgccgctgcctccggtggctccaaagcctccactcctcagccatctgctccggccgcctgccgcagctcgatcgcagccggcagccaccctcacacacacagcacaacctcccctcccgctccgccgctggtcgtcgccggcttgctgccaaagcttccaccctctgtccctctctcggtctcgggttgcactctccactctccccctccccgcagacacaatcccttctttgttggatggccatatggtcacacgggccgatcctatattctccggcctgttcgacaaaaatggcccatcaatgacctaacccacgcgaacgacgagccctccctcttattgaaagacgcatcaagcgcagcaaaccatatatatatttataaaaaggaaatattaacataaaggcattcgttctttttcatttttctttaaattttgactaaatttataataaaaatatattagtattttcaacacaaaacaaacatatattattaaaatatattcaatgttgaatttaattaaactaatttgatattttaaatgttgttaaacttttctataaacttggtcaaacttaataaagtttaactagacaaacgacttataatatgaaacggacggatggagtagatatttccttgtgatacttgccgaaccatctttgctgcaacattcttgccaaaaattttctcaaaatttattgttacatggggcgtacaaaaaattaagtcataatttaagtttcgctaagtgttgcaaataatgatgtaactgcaatcatccctggcgattctgtctgcccacgcctttgaaaaatcttaacacttcgctagcttgtttctgtctcagtatcacaatggaaagctacatcaaatatttcattgcacattgggagcaagctcatcgaaatcccttttattcgctgctgggaatattattgtctttactgcacttctcctggcagcaattgttttccctttgacctgtttcaggaggatatagagtgcatgagggtgacaatccagtgtttatatgcatggaatagcacacaaagatcaatgatcatatcgatagcatctcaagattgaccttttctggagattagcatgaatgataattttctcagcatattataaaatcgatcatgaacgttatgtggtttgttgatcaatcactaattaaaagagaaatcaaagatgaaaggcataggaggatcaatcctctggttgtaataatgaaatcacttgctattcccttaaataagagagatttcgatattccttgtttcaaaattcagacatggaaggcatagtggaaaaaaaatcagatatagaaggcatgggtcgtgtgtgtaaatgtctgtagcattcccgactattttgaggttttaaacttttaataggtagttcattttgtattcaagaccagagttcatttgcagtatatttccaatgctcacacctgttgagctaccaaacagtcccatataatcacatcccattgcaaatcgtaaagacaaagtggtgaaaacaaaagtaagctaacatagaaaagttaatataatcattgacacagtatacaaggccctaatttactctgtctttcaaattggaatgtttctaagagtctaacctgtattcaggttttaaccacttctcaccctcatccaaaagccaggtgacttctcacaggtggtcattatctcacctagtgaagcatcaaccatagtctttccagtgtcccggggtgatatcctgcacagcacaaaatgtagttaccctcagatattccatgtgctggaaaatgttatcaggtggaataaaagaagaaattgatcaggccttcatgaacagattgaagataatgaaaatagaaagcacaaccaacagcatctagactaatttaaagataagatgccattttgaattatgcccttactcgcatatcagatcctgatgttcaagtatatattttagaaggattcgaagaaactggcatctttgcttggagctgctttttgcccatatcttttgtgctttcctggcttgcgcaacatgctccttaacctgattagtcaaagaattaaagaaaaccaaaacaaggtaggatctcacactaatgaagtctgtagtaacaaaaaatacaagatttatttgttcattgatcactacttcagaaaatcaaaatcaattatgaatgacgaaccagatctcagttaataatccaaaagataatgacccagacaactaaacctacactacatgttgtaattaaaggacctaacaaaagcaagccagcaatatacctcatcaggcgtcaatgcagggaagtatcccaagtatttcatagtagcgggctcatagcattggaccttgtcagtctgagctcttttccctttccttggtggtatctgcaacggagcataaactgaatgtgttgtaagcctgtaatatcaaagcaaccatgtggctctgctagctctcagaagtcataacatgccactgtgagccttattcagctggagttaatcaatacaacttagaaaaaaaaagtgcctagtgcttatctgaaacctctatcagcacaaatcagagttgactcatagcatcaattcgaagaattaaaatagcactctgttcaagcatgcagttcatttacatgttatcatcttactgcatctggccattttgagcataggaatttaccaaattgaagttggagtatgtaacaacggtaacacttgatgaccgtacgcactgttgcctgttgctttctcaaaatttaataaccacagccctggaatttgctagaacataatctcaattttcacggaaatagcaacattgtagtacagcattggaacaagtcgctagacttaaaaatctaaaactggaaattccaggcagacagtctttaaacatttgtccactaacagtaagatagccatagtacaccagacagtaccaactagtattcttcttcagacctatgggcacatgaactgaacccaaataatgaaacgcaatatttgaaaactagatgcaatgtgcgatccgattagagtaaatcccacataaaccccatgagccatgagctatgagcagagcaatctcagaggaaaataaaaaaataaaaacagtaaaacctaagtaccgtcggaagcgtcgacatcgatggaggggacggtgggcgggatgaggaagaggaggatgcggcagagcgcgtaggcggcggcgagcaccaggagcggccaccacaacgccatggccagagactgcagcgccaaccctaggtcgcagcacaaccaagaccatacttggagtcattcgcaagtttgacaacttcttcatcggaactgaacttcatgattggcagaattggtccaaatgcctataaacaagcaaagagcattgataacactaatagcattagttcaaaaagacgtcaggcattctttcaggcttacctcttcttgcataattttcattgtgtgattaacattcaccaggacagttg

SEQ ID NO: 1538 - DNA, 3579 bp, Oryza sativa
caatgtagtccgacgcctccgccaggagcgccgggaacgccagcttccggcacccgggcactagccgccccagcaccttcgccttgctcgccagcggcggccgcgagcgcggcgccggacgcgcggcgggcggcgggggcggcgcgccgaggcgcacgcggcggagcgcgcacgcgcgcgcgcgggaggcgaggatggcgcggctccaccgcgaccgccctcgcgccgccacggcgagggcgcggtcggccgcgtggcgcacctcgcgcgacgacgcgggtgatggtctgccgctggcggcgcggaccaggcgcagcgcgtcgagcagcttggaggagtagctctcctgctcccgcctcgtccgccacctggctgccggcgaggcggcgggatcgagcttgcggtcgtgtggcgccgtggaggtcggcgaggacgccatgggcgacgcggggttgtgtaggtgagggagacggcaaggcgagctacgagagaagagaagagggagggaggagtttgtagagtagaggccgagggtgggtgatgcaggccaacgactcaaatttaaaggggaacaggattaacaccacgattactgcttaatcacccttgtgatttccgtgccctaatctctcactctctgtctttatataaagtcttttgcatggttgacactagtagcattctccttgggataggatcaataaagtaatttaattgaagtggccaatctgctccatgtgcatacatatgtacatgggtgttctttcttatttgaatagaaattgtatgtggttaaaagatttttattatctatttgtcctctttggacatgtgttaaaaggactgtattcgtgattaatgtacataatatatttttctcctatataataaaaaaaatctactactaacttcatatttttaatgtatgacgccattgattttttatccaacgtttgattattcgtcttatttaaaaaaatttatacaattatcatttattttattgtgactcgatttatcatcaaatgttctttaagcatgatataaataccttcatatttgcataaaaattttaaataaaacgaatgatcaaatgtttgtcttaaaaaaatcaacggtgtcatacattaaaatacggagggagtactgggcaatataaagtactccagtacattggcagtgttggcacatacgagtaggtgattggtgatgatatatccagcgcgacaatggcgatgcaagcatgattaggaggaggagaacctgagcctctactctatgcagaggagagggaggggctcctcatctgatgagcagagcaacaccatggccatgccactatgtcacaggaacgaagctagtagctgactactctgaatgtcacaggtaagaagaagagtagtagtacaacctctgtatgactgtattatgtattatgtaggcatatgctgcatatgcaattcacatttttggtccgcacaattagcacaaatcatgtaagttaagctaagccaccacctacttccacatggaaccatcattatttccaccaatcttcttctctacctagtactccacatggagcacttagcatgggttacaatatcgcgtgattattgctcgtggttgattctcagtttttctcagttacctaaccgcaatgcttttggtagcggtaaactctaaaaaaaagatagagaaaaccctgatactacatctgtttttaaatatatgatgatgtgtgatgtttatcatctgtcttattaagataatataatattatttatattgttgcgatttattttattattaaatgtgctttacacatgacgtacattacatatttgcaatccatgtctaaataaaacgaattgttaaacatcatatttaaaaggtaaagtgtcaatttgtcatataggagtgtttagaaattgagggaatagcttaccttccttccttcctcctcttcttgatctcttcataaaaattcaggtttcacaagtaaagtgtttgcataagggataggattgctcaccgatttcatccttggcggctgcagaggacttgtgaaaggtcaaatgtgacctaaaattggaccttctctttaattggtgagggagtaaacaaacaccacgtatcctgaattcatgatacgaactggctagtacaacgcaaggcctggtccataccatactaatcaactaccatgttgaaatgatgctttaatttgcactacaattcaggcacgtttgagttgaaagcttctcattacaggctaatttggtggtagtaggaggttgcttctttgccttgacagcctttgcaatgagtactctatgctagtattaactaattaacctatagctagtctataattaagccaccacaagataagcatcaagcgccgacgcacgaagcaggaacaaggacacgtgagtcgtttgactgttgttgatatgatcagcggcggtgcacagtttgtcacctgaagatcgatgaaaaatgaataaaaacagcgacacgaaaacacacagctagcagcacagaggcttgcccgcctttgaaattcaccaagagaagaagatgcatgcagcagcaggcagcatagtatgataagactatatgcatgcatgcatggctccatccactgtccactgctgcctgccttgctgagcctgaggctgagctgcagtgcaggttcaggatgccaaagcaaagcaggctactgatgcgtcctcttgttaacaacactaacaatcaagtgtgtgtgtgtagtatgttaagctgcctttgtggatgccagcgatgcgacgccaggtgaacactgtacctacgggcatttacacatgtttcagagcttcaggcttgttgaggcctcacaaccttcaaattccacagaatctagcctgccagtgccatatcccatgccatacaccctctcgaatttactgcattatcctactagtattatctactcctatatatcctctaatgtaatgtatcctagctacctactactgatcgagtaattaatctaatctgctcaacagggcagagattctagttaactataaatctgctccgtgaggccttatatatccagacgcaagaatcacaggacaaagctatgcaagaatcacagggacgaagctaagcaacacaagatctgattaattatcgtttcgacaatgcagagggccggccatgtggatatcagccagcagagacacttcgattgatcgcttcccatcccataaataaataaataatactgatccattagacacgctgacgcttgacagcctcaccacgcacgttctccagtccagcgcatgaatcactcatcatacaacatctcccagcctcaacgctcagagatgatgattcatagagtatatggtagcatgggtgaactgaagaaagcctgtaacaataatttgcattttgtaaacagagtttttaaagtgctcgctattcaggcacatgccttggccttgttcattcagcataaacatatatggatcctgatcctggccatgacaccatgaccatcttgcttgcacttggttatggctgtca

SEQ ID NO: 1539 - DNA, 3280 bp, Oryza sativa
gcccaagaccaagtacctccactgggtgtcggcgctggtgttcttggagaagccggcgaggacgcggtgcttgaggtcggaaatgtcgaagcagcagaggaagcgggaggcggcggaggcagcgtcggagcggtcacgggcaggcgagagcaggtcggtgcgggaggcggaggagcaagaggaggaggaggaggaggaagaggaggtatcatcggcggagcagggcttggtgcagctggggatgtagtcgcggagcatgtcggcgacggcgcggtagcggcggagcgcgaggagagagcgcgcccggagctcgagagcggcctccatgcgcggcgacatctctagcaccgcttccactagtccaagcgccgccgtagccgctgagtgctcgccaccttccccatccagcggcgcggcggcggcggcggcgagagcagcccgagcctcggcgaggtagtctccgatgatctgctgcacaatgcacagcaccaacaaatcagttgctgaagccaaagccaaattgggagcaaaaccgcccaaattgccatcttttttggtggcacataacacattggatgaagaattaaagagggggcaagaaacaacctttcggtgtccgcggagccaattccttctcctgtccggcgaggacaccgccattggtggcaagaaacagaagcagcagtaaggccttggcaatctactggagtactcctatgtatggtatggagtatatatacttaggaaatgtagatggattgggaatgagaatggagagcaagaaattaaagaaatgccagctccctctgtcccttaacgaaccaaccaaactactccatctccatgagtcccatgaccatgagaggagaagagaagagaagagaagagaagagaatggaagggatcgagtagtatagtatagctggatatggatgatcccaagctggacaagaagaagatgcccgtgctgtgcactcctcctccttggcacgcacacgcaggccaccctaccctagtattggtggtctcctagtgcgtagggtgccatggcctatgcatccacctcggctaaaagctttttaaagagaaagaaagagaaagaaaccattggcacatcaccctgccagcaaagcaattcctgccttttcttctctcctcttctcttcttttttttttcttttctttttccctgctggcttttctgatcttcttcatcttctccatgtgattaggacactctgctcattcattcacattcgcatctcatgataaccttttactactcctgcacaccacctagagtaccacagtaattgtcgtggataaactcacggcacactactcctactcctacctacttacacttataatggcatgtgtagtacagtagtaaactggaagaattatacagtaggattacagtacatggagtaacaatttttaattaattaccttgcatatatgataatgctgttagaggcagtaatgaaatggaatgcagagagaagaaagagcagcagcagcaaagcatacttaaatttcatttcaattcattgaagccttgtcacatgtagaggcctgcctgactgtcagcatcatatcatgcatggcatggcctttccagcacaccaactactctgctgtccacccatgttactccagtggtattgctatgttacacttcccttcccccttttcatttcatcactgcaaaactactcatctttcaaactttaaaatacagactactcccctactaccagtacgccaacagtaatcaaagcaaccattacctacccactacctctacatagtgtaccgaattcatcttattactgctagactaggggattaactcacaagccctaaatggattatactacaactgatttacctctagaagaacacatgttagcatgtactatgagcaactaacaatgagtgggcccagctgtcagactgtgtccatggagagtgctaatgaggtggagccagctgcaggctgttggagcagtcgcctgttaatcaataattaagaaaaagggtaccactactccaggctggttgccaatgccatacagtagcattttatttggtgactaccatcggatgcctgattgcatatatatattgcccatgcatatgtcttcgcatacggtcaaacggatggatggaggggatcattggatcaatccatccctgttttcagactagactttcagggtttttcaggtggctggactggattggaccctaaggtcaggtcaaccttgttgacacctcaccatttccatcactccagtaccctgtagatacaagtgtactggagtacagtacatgtttgtgactacagtatatagatactcttgctcaattatttagtccagtagaaacttgggtatgtggggaagtggaatccaagggtatgtatgctttacttcacccaccctttacattaccacttgactacacatttattaaatattttctaatcagttctagtacagtttttacctcttaaactgtgagaaagtatatatctcttcaaggataggtgaaaaactcttcctacaaatattgacgttctctttttgaacctattttttttaaaaaaaaattgacatggtctaaatacaactttggctataaatttatatcacactatatttgtcaaacctgataaaagcttgcattaccagagtattttcttgaggcacattatgttcatatatcaaatcaaaatatttaaaaagatcttggtgttcaaagttttaataaagttatggctaagggcattttcactttcctaccattttcaaccttacaagttttggcgttagcatattttggtatagtcaaaaactaaacataacgttaccatttaccctaccaaatattggtaattctagaagtttcctctcactaaatctctctcaatggtaaggtttcataccaaacacaaccaacactatcaaattttggtaacttcaaaagtgctaaattttgacattaccaaattttggtaaggttgattttggtaacaaagtaatgaacaagcagccctaagaaattttctgcatgatgttatgttgttgtgatcagaaggagtatttaattactgtttgtttccatttttccgaagctagcattattgattgcagcagttgattgtcatatgatcatctttttttttcgggggaaatagggagatatattactcaaaagaatccacatcgaggagatgtgaaattatcatccttgcatatacgagcgatatgag

SEQ ID NO: 1540 - DNA, 3146 bp, Oryza sativa
aacataccccgccaattggaaggattcggccagttaatgttacttcacccgtcatcgcaaggtccttcttaacaggttttcccatagctaaggacaacattgatgtgatcatggtgcatccagcactggggccatccttaggggtggaccctgctggaacatgcaagtgtacctttgagtttgcaaagaacagattttctggctctttatctagtaatatagctctaccaacagtatgcgcaatctgagcactttctttcatgacatctccaagctggccggtcatcacaagtgcacctttcccatctccttcctccactttcgttgtttcaatgtataaagtagaaccacccatagcagtccaagctaaacccatgacaactccaacaggagtctgctcatatattcgctcagcttggaaaacaggtttcccaacataatctccaaggtttgacgaatcaattactaccttctcaactgccttatcagctgactcttccttggctccctccatatccttgttgccctacataacacaacagtaagcaattttctttcaaggtgagctataaccttgtaatgaattaatgacaaactatactgagccatagattatatttgtatgtttattaagctatcaaggtcgaatttatatgtttgacaaattacttaacgcttgcatccatggttttcagagccaacacagtagccagggaatgaaaaacaacgataatatccagtattctagacactggaactttgtcaaccataaatatagacaagacaatcacaaaacatgtacctcccaggtaagctactataggtcaaatgtcagtcatacaatagatttacgcatgcaaatgttatcttatcaaacagttaagcaagcgaagttctctacaagcaaaaccaatcatgcatgcaagcatatccaactaaattggtcaaccagcctaaaccggtgacaactttaacagcctaatcagcaggtcaacagccagcagcacagaaataccacttgtaggattttgcatatttgaagtgagcattatgttcaggttcaacatctaaaagaaacacataagcagaaaggaaaccatgacagcaacatattaacactacctctggtgtgcacaacttgtctgtcgatagggctgaatcagttaaaacagcttctttgggtgtttcagctggatgcacatcatgatcgactgttctattcagtaaatctaattcgctagcttcctttgaggcagtatcagcattggtcattgcagcattctctgtagcaggatcctccatagtctcatctttcaacttgtttgcactatcgccaccattaggttcttcgctcgctgttacaatggcagcttcttgagttggctcatttgataccccttggcgaacaagttgcagagctatctgcaaaaagagtaacagagtaggtaatgcaaagcttgtaaaaggacaaagttttgcatattactgaagagtggaggatataaatggatgcacaatagcctttcgtacaaatgacttgaagattgcttaaacactatcaacagtcagctaacatataaatgacatatcaatgcaccgtaatatatatagataatttgcttgctgctgcaatgtgctaggaatgtaggtaggtagacataattttctgctgctgcaatgtgctaggaatttaggtaggcagacctaattttctgcaaggctaagcaactagcgaaaacaatgtatgatttgaaaatgtataaattaattaaataatactaatataaactaatgctaagggtgcaagagtacaagcaaaaataacaagaaccaacattttgtaacttagaacgaagaaaatgttgctttccttttgtgagtagaaattgattcctcctggctccttgttccaaactagaataactgtcgttttttttaagaaaaaaaaaaaactagaatagttgaaagatcatcaggcagaagttctgttacacaccttgcggtaaattttctcaatttgcttttgaagattccgcactcctgcttctcggcagtaactttcaataagggcaagaagagcagcatctgtaacctcagcctgtacatgtttgtagtcaggcagttaaagttgaaacaagcactaaattttggtcctagaagcaagccctgttagcatattccacatctcaacaaagttgtattgctgtaaaagtggtgtgtcgtttatacaaacttgaaattacaacgattattcttcacttttcagtacttttagtccactcgggactctaatagcaattccaagtttatttgtcgaaaaagaagctaagaactttacaatcctttatcatgtatgcaatattaaacagtaaagggtatcatttccgaggtaaacttaaaagaattctgatatgaattgcatatgcaatcctcatcgaattactcagaaggcttaatgaaatataaaataaagtataataatctatatatctcgtgcagtgaacctacccaaatgtaaagtggcacatggtgagaggatgagatttctgaattagtacatgactattcaaatacaattctggagtcaaaaccagtggtaaggtgcagtttcacatctaggtgtgtttaccataaagcttataggttaaggcactctttggcattgtgttgcgttaagaaaataccccctctggttttaaatgtagattgttttagccttcccaactttttcctaaatgtacatcattctggaacttttaggcacttcttttttttccatatttgcccttgccaaaagaacgctacccctatcacaaataaatgacatctttttcaatgtattgtaaatggagggaaacaaattcttttgagatgtttttttattaatgtgcacaagcctaaagcaatagatatgataaacaacttccataatagcttgccatagagaggttcaatgtagcactaatgagtccatgaccactaggagagaataaatcaaaatccattcatcatggtgaaaatcagggaattaattaattaccaaaatttgctgccttttttcataacattggaaacaattgttctgttaaataataatatttaaactagtcactgttgactcctaaataaaacgaataattcatcac

SEQ ID NO: 1541 - DNA, 5970 bp, Oryza sativa
ttttagaaaagtcatttacctgagcaagtgtaccaacttcgttaaggcgctgcagcaactccttccctttaagatcatcaatgcttttatctgaatctgagctggtcacaatatttgggtcagtaccttcttcatccttcacaagaaatgctccagcatatgggatggatcttttgcggttttctactaaggcttgcaacagcttttggtcctgaggggtttataaaaaacaggaaaaacacatcattaagaagggaaatgaataggtagcatgatacggaaaagtgaaattgatttaaccaatggcaaatttctcagcgccgacatacctttacatagatcggcatataaaatccaggaaagagtggacgatgtgggagaggcagtgctatgacctatttgaaaaagtaagcataataaagtaagagaaggatacaactagcagaaccatgttatgaaaaatatgaactgttaaataaataacaaataatctgaagggagacgtttagatctaaaaaatgatggaaagacagcaaagccctcccttgataacagagaaagagagagcatgatacccttctagacttattggtagaaaacccattttcaagacatggcatgagttcaaatagctactcaaaagactacaatcaaattataattattttgatccttcatcacacctcaaatgaattgctcactttagtcctaaatagattgtgcatttcatttggcaccaatgcaagttcttgagctattcaaatttgtcatcgaaatatcatatgtactccattatacagtttggaggcactttttctcaatgtttcctagtatatcctcatgagtatcactccaagtaacaaataagctctccttcccaatcgcctcccacttcataacggcagaataattatttcatggtgttccttcgttcttgtgcccattaatatgtgataattagatggaatatttattcaattgaacaacacttttcagaggggtgcaagctttcataatgcattaccaagcatcgcaccagtgacttttctcaaattagaaaacagtactgaactaaactacagttcaggacaacatgttaatccctcagtgagcaatcagcattttcctctttctttcccctaataaatagaaaggcaccatgtttgagcactcaaaaggaaggagaaaccatgctgaggtactgaactctttgtgcagctcattcaaggcaatcacactaacctagttgatccaaaccaaagaaactctaccttagcattacaaaataatgagctaactttgagaccaaagtgtttccatgctcagattgagccatggacttacgatatccaatcaagggagtggccttccatgcttactctttggaaccaaattacacattctccaattacttaggacacaaatgcatcgggttgctattggctactgcaagcaactaaacaaacggttatgatccaaacgagtagagcgcgcaccgagaggcagtcctcagggcggaggacggtgggcacgatggcggaagacgccttgccgtccgcctccccttccgcagcaaccgcatcctcggccttagcttccgccgccgccgcctcggagtcgctcccggcggagttggagcagaagcgcgccctcctcccgagcgtcgagacccggccgcctcggagcgcccccaaaaccctgagcagcggcgacctgacctcctcaaccgccgccacggccggcgcggcagcgaaccgcgaggggaagacggcggcggcggccgccgcggcgcgcagcatgagggggtcgagcgattctagctagggtttgggcgaggggagggggcgggggcgggggatgtggcggcgcggcgcgcgccctgtgaaagggaagctcgatttcgttggtttggggaggaagaaaggaatggaagcaccgaacgaaacccttctaaaaccccctctcttttacccatttttcattactattctataacaaatttttattaaactgaaagcgaaaaactatctttggcatttttttattctacaacaacattagctgaattgactagaggaagattcagctaatgtataacacatctaacatgttatacatggctaattaagtagtttagtgctttaaccatgaataaactatatgggtctttttatcacgtacttacctccgtcctataaaaacatacctactgcgagatgtgatacatccttattagatttatttttttatagaatgaaggaataacatactcacacacataaacaccatttccacccctacatacactcacacacacgtttagaatgattaaaaatctatagcctcatgtaagtgcgcatcatatttgtattatttttctctaccgtattaagtgtagttcgattccaatattattaattgtgaaaccaatcactattatttcattagcacgtttttcaaactattaaatgattttttttctaaaactttccatatccatgttgtttcaaaaattaaaataaatctatttttaagtttataattattaatatttaattaattatatgtactaatgagttttcatgtttcgtatgcgttggaaatctgtatataacctgagaaaaagaactcggtctaaatataaactttgatatataaaagacccttttcgaggagaaatatccgaagggttatcgctggtcttgtgtcaagtgccagtcactcagttcatccacagcaaagcgcacaggcatagcagcctccttcccctcttcttcttcttcagtagtggagtacatgctacctctgcttcagcagcacatgggaatcacccatgccaactccatcaccaccgagccttctccttctccccgcccgccgcttcttcgcctcttgccccagcctcgccgccggcgtcatgctcatgccaaacacatcgccctcttgaccaactgcaagtgcgcctccgccgcttccgcttccgtggaggaagacgacgtagcaggtggtaggtgcctcttttggccggggaaacatcttttggtttaggattcttctctctagagattggagattaattaatcaataataagttaattcattcaccagtcgtagtcccctgacctaaccccttcatatttgggagataatactcgtattcaatcccaccattttttctgcctgaattggggaacgactgtgttttgctttgttactttactatatattactacaagccttaaatttgtactcgatgcatcaatctgcagggttgggatatcgtcatcctccaaagcaaatacaagaaatccttgatgttccacccaatcccagttaccttatttcccctcgcagagatcggatcatgttcctacagcgcacagccatgcctccattatctgagcttacgaaaccagaaattgtactttccggcatacgcattgatcctgggtctaacatgaggagcagaatgtaagtaacacaccattaccattcaatcatagcaggagggttgacacctcatattcttgtgttcaatgatttacttatttgtaggtcgttttataccggcattattatccatgacctgatggatagtggaactttgggtccagcaaaagaggtccatggatatgctgatggtgcaaagattaattttgtgacatggttatttcccaaacatgtttaaatttaacttttaatgtgcaaccaaatcatatcacactgttttctattcatatttcctctttcggcaattttggaatttcaggtcacctgatggtcagcacatggcatttactgtgcgctacgaagataaggtgattggctgatgctttggactatgaaattggacaacatctttagtggttatcgatccttttgtttcactgttgtattttagtaggtggacaacagcgtcaacttgtcactatgggttgccaatgcagaatctggagaggctcggccactctgcatatcagaagacataagattgaatgctatttttgagctgtgagtgtctgcatctttccgatggagcatctttctactcctttccttcctaagtcatcagattttatcatgtttttctttacagatttgtatgggtgaatgattctaccgtattggtctgcactattccttcgtcacgtggttgtccaccaaagaagccattggttccttttggtcctaggatccgctctaatgagcataaaaatgtagttcagatgagagccacaaaagaaatgttgaaagatttgcatgaagaagaattgtttgattactatgcaacatcacagttaatactgctctcactggatgggacagtgaagccaattgccccacctgcgatatatactgctcttgatccttcaccagatgagaagtatctgatgctcacttctgtccaccggccatattcttctactgtctcgtataaaaggttcccaaagaaggttgagctgtggacagttgatggtacatttatccgtgaagtttgtgatctgcccctagctgaagatattccaatcacatctggtagtgtccgtaaggggaagcgtttaatcagttggaggcctgacatgccttcaacattgtattggtgagtaacaattccttagaagcttctgttgaaaaaaatatattgttgttctaataataatagtaatatttttccaatcctgatgatagtaggtaagctcaaaattgtagaatttataatgccaatgcactgcttctgctttgatgagatttgcaaaggtgaccgtgttattgtcttctcttgataggtagtgcagctagttgcttgcgtacgaaacaactagttgacagataatgaccctaggcatgctattagttattcttttgactgactttttaccatgtaatcacaatccattttaacttgactatcaacttttctgaaagatcaacttaatgcaagatttggtgacatagtatgtcaaaggtaacctcaaattagttagaaaaggtgaatggagatctgtcagaactcagaaacaatcatcatactaacagtagtccctacttagttcgtaataccacatgtccaatcaccatgctaacaatagttctcagatctgactgcgacccagttctattttcgtatgtgatgttttgaaagggtggaggcacaagatggaggagatgcaaatgttgaagtctcaccacgcgatatagtatatatggagcttgcagatcctttaaatggcgagaaacctcaagtcttgcttaaacttgaccttcggtataggtattaaattactactggcctaacattttctcctcatggtgttacagagtgaatatgcttttacagaaaggcaaattatgatgagtacatttggtttagcttggagataaatttggatttcgacttcaaagatgtaatcaatgatttttcaggctaataatctgtgtttttgcatttaaaatacacaaatatactttgtccaactgcttgccaaatcactcaaaatttactattttgatgaaacctgcagaaggatctcttggtgcaatggatcacaggcactggtttatgagcattggtacaggacacgcagaacaagaacatgggttatctctcctgactgcaaagatgttagcccacgggtattatttgaaagatcttcagaagatgcctattcaaatcctggttctccaatgatgtgcagaacccctgcaggcacctttgtcattgcaaaaattaagacaaactatgaaggaacctacatcttgttgaagggaaaaggtgccacaccaaaaggaagcatcccttttcttgatcttttgaatatgtatgcttacaactatctctaccaaacatttctgttgcacctcccatgcctgctctgttatgactctttgaatccatgaacataatgtaggcataactttttttctttacagaaatacgggagtgaaagagcggatatgggagagtagcaa

SEQ ID NO: 1542 - DNA, 885 bp, Oryza sativa
aaaggtaaaagaagtggaatttaagaaagtttcttacatccaattcctcaagcacctcctggcaaagaaacttattgcaccagaaatagcagcaccaaaatcagctaaccgtgggtagttgaaatcacccatgtgctgaaccaaggaaatgagacattcagaatgtagtgtgtatccaatggcatccaagaaaataaatttgtaaattaccattgcttgtgaaaaagataatggacttgtaaccaattaactctgtgccagttcttacacaactggttagagtctctgttttaatgacctatatttggttttgtaagaagtcagaagtcaggtcacacctgtgtgtaggtttgcacatgatccttccaaagggaacttgccttgagaacctccctcaaggtggatataacttcaaatgaagttgcttttataacatcatcatccttatcgtacggtttttcctgtaaaggacaagataaatgatccaaaattgcaaggcacctcccggcagtaaatagcaatctcgcatttatttcatagtgaaatcaaggctaaacaaagtttcttcagaacagcaactgactttcttcagtttcggaaaacaacactctttcttcttttctctgagcatgtttataatgggaaatacaaaataaaacatgagaatcggtggtggcactgtagaattaccttaagatggtcaacttttactgtaagtggatcctcctgaacctacagttttttgtatcttggtgaaaactaagttaccaacataaacccacaagaattgaatagcaagcaaaaactaatgtatcttaccatttcggttatctttaaacgacggtgaccaagtagcacaccctgatccccttgaatgctagttat

SEQ ID NO: 1543 - DNA, 4323 bp, Oryza sativa
gagggggggctgagctgcggaggcatcggaatggcggcggcagcgctgcctcgcctcctcctcgccgcggtggtgctgtgcgccgcgttcgcctccgtaccagggttcaccaacccctccgatggtgagtctactcaaccccaatctgtagcgatcgagtagttagcgtttgatgcctctactccgagctcgcgtgcgtacttgctcacacttcgtattagtgttcgtgttgcttctggtcttagccacatcaatggatgtgattgtgtaccacagcaagtgtgtgcttgctagtgtgcccgtgccatagttacctttgttcagttcctgcgtgtcacgccgtattcatgtctgtgtatgacttcgctgccttatgtttaattttccatggcagctttctgggtggacatttgagggcggtgacccctgtggtggccgcggtgaacaacggccatggcatggagtcctttgaagggattcatcattcatccattgtcgctttgtaattcttcagctattcgactgtgttgcaatgccggacggaacgcgcgacggcggcgtagcccggacgacgaggaggaggacggcgacaccagcgaggaagaagagatggaccagatcgagatggcgcagctcgaggggaacatcaggcggcccgcacgagggggacggggaggccggcgagatcgcgcagccccgagcccgcgcgccgcctgggggaatctcgcgccaccctgggagccgccgtcgccggccgcgcgcaccctacgagagcatagatcgagaggaaggaaggagaaacagagaaagagaaaggggagagagagaaggtgacgtgtacacctgatatgtgggccccacgtaggtcccacgctgacttagccgccacgtcggacaaaaccgagattaaaaccaccgaaggacctcttgtaaccggttttgattagttaagagacgccggatatctgattttgcggattgaggatgtttttgtaacttgatgacaagttgagagaccttcggtgtacttttttccctttaaacctccctgttataaaggcggtcatgtaaattcattggcataaaaaaaacctagaattgtaaatctaggacagtgaaactataaatagactatacgggatatgtaatagggatccaatattacttaattaactaatatactttataatcctatttttcataaaactcgagtgagcctacctttcagcaaaagtgttcatcatacgacaacacctactattggtaatttgaagatgcgcagacaatacttgatcgatattggtaatatccttggtaatgtacttgatctgtaagtatagttactctatggctggtttagtttgttgccaaaattaatcttatcaaaatttgatattactatagtttgacacatatgggcattgccaaaatttgaaagtattggatgtgtttggtttaccaccttttcaaattctttttttatgagaagaaacttttagaaatactaaattttagtatggtgacaatggaaaagtatgtttagttattacattaccaaaatttggtaaaaccaagaggtttcttttgcaacaaaggatttttaaggaattttagaggaattcatgtcctatgaaaaattttcctacgtgattatttggatcacaagaatagctataacaaatcctatgaaatttctttggattggctcaaaacataggaattttagagaattctaacattagcttcaacctcttagcaaaaatccttcatctctcaactctcatcttgtgttttttctacattttttgcaaatagctattcctataattttcttgtgtttttccaatccatagaatttgagatgttaggacatttaatcctgtattttttttcgggcattttaatcctgtattgtttttttcgggagtacattcgaaacagctgaaagaggtagtccgagtgtgcagtgatataaataaataaatgcagcagccagcgaggcgtgatgtggtgtgctgcaaaacgtaaagtaagcggcgtatgtcgtgtcctgttgccgtataggagtatgtacatgcacgtgtgcgtaccatatgctcgtatgtacggctccatatcatatacgtacattatgctgtcctgcatgcctgcctataggatcagagagagtatctcagtaatttatcagtatatataaggcaactggggccctgcagttgcatagagtagccatgtaccactaccgtgcagcagcctgaagatatgtatgtactcctctatcaccgtgtttagttccaaactttttttttcaaactttcaacttttctatcacatcaaaactttcttacacacataaacttttaactttttcgtcacatcgttccaatttcaaccaaacttctaattttagcgtgaactaaacacaccctatatatatatgggtggtcactccactcagcactgctcattgggaatcctatgcaactttttactcatcgtcaggttcctcctccgttgtttccttcctattcctatacccaacaatcgattgccctgttagtattactgactgtgaacaatccatcgaaataatgaataaaaacacaagctacccgcacctttttcacacatttagtaatagctcattgtcagtaatattatgtaatatggactggagaacatgatacatttgcatgactgcagacacatgatagtgatactagtaaaaagctactagctgctactactatcagctcacagccaactctgcattcattcagatgcctgccttcatcatacagtcactcttatgaattatgatctagaggcatatatatagctgccctgttgttacaaaaaaatgcaaagcatcgaacacttactgctactcttatgcgggtccggaagaaactccgtttctttgttcttctcaccgcatgaatgaataattttcatctctctctctctgtgtgtccccaacccaatacatactgccgctactttagcataggatccaatgagatatcatgtctcggccgtgtgcaaccctctttatttttgggtgcatgacatttctgagtgagatagtacattcgctgcatacatatccatggctctaaaataaatgcaagtgtacactaaaaactatttctcgatatcaaacaggagatctatgtgcctttgcctttcaagtaagaagaaaaacagagagaaataaacgacagacaatagctagctaaccaaacctttacaaacttgcttctcaaatttgttgctgtatatatgtctgacgtagacatggattaaattccattatccaaaaaaaaacccttaccaattcattttttttaaccaaagatcgatccagctttataacaaaaactagagagaatgtcaattcaaatttaaccatgacaaaaaaaacctataagcccactgggtggatcgatattttgaattgcatatccatttccgccttactgtacatgtcctactcctagttaaaacgacaatgcgcatatttaagttagtgcagagagcaggaattaatcttcttttacctctttatatattaaaaaattgcattccctatcttgggagcgtatcctatacacacaggccctcgcgtgtacacaccgtgtacaccaactaaaaaatatcacaaaaaattataggaaaattcatacatatactttcaatagtattacatctacgtgcaaagtcgcatcttcaaattcattctacatagagaataacaaaaaagataaaattttaacaaaattgcaaccttaaaactgtcagattttttgtttttttttgttacggctaaaatataatgaatttgacgttaagattttaaccctaggtgtaatacaattgaaagtatgtgtatgatttttttctagattttttggtgacattttttagttggtgtgcacatgtgtacacgtgaggatctgtgtgcataggatatgttgccccctatcctagcatcattggtgcacgtaactatataaatagtcatgaaaaatcgtagagttcaaaggttagaaataattctaaagattggatccattttaacaaccacatggccacttaagtacaagagattgaaaagcagagaaaagtaaaggaaaaaattaaaaaaaagtaaagtatatatctttattatcgttgtttttcccttctttcgtccgatggtgacattgttgcggtcgatgatggatctggaatttgcatatattgttgttttttcagttgtgtgcaagtcaaactgtctgtagggacacgtagcaatataatcttgattccattacagttagg

SEQ ID NO: 1544 - DNA, 13637 bp, Oryza sativa
cttttcaccgcaacatcaaatcttttctcactttacttgcactatgataggtagcaaaaaaagttttgcatagtactattactaaataaaatactccctccatccctaaatgtttgacgccgttgacttttttaaatatgtttgactattcgtcttattcaaaaaaatttaagtaattattaattcttttcctatcatttgattcattgttaaatataattttatgtatatatatagttttacatatttcataaaattttttgaattaaacgaacggttaaacatatttaaagaagtcaactgcgtcaaacatttaggggacgagggcgtagctgacattgcatcgtattgctgaccactcttttgaagtgtagggtggttgtggtcattctattggttagacatgcatgctaaagggttaataccactttaatagtcttgtcggcaacaagagagattctcatgtcatcatagtgtcattacgttataattgttactgtgtgttaatatctctaacagcatagcgtttatatatagttgtgctgcacatactgaatatattcacaataattttcctacagtacatactgtatttctatcaacctccacaggattctctgctttttctagtcgagcaatgctccctaacatgtttcggtagcaactagtactagcaaacaagtagatcttttttttaatgaaaatacctagtaacaatacaagtatccgagttgctggattttgtttttcaccagcaaatgaaagaagatcgatcatgcagacaaatagtatataggtggtgatgtataagcaaccattcatcactaacaaaatattaatggcacacctcgaagggtgaagagagtaggagtacgcggcaacggactctatattgcaagaaaaagtgcatgccctactgttgtatctacactggtgacaccatatccctagctagctagctagctgtatctgttcccgatggatgacgacactatggattcataacaaagttgctcatgttatccctacaatcgtggtggcaatggcacacaaagaaagttgcttatggcagtccttcagattcttacatgaacatggcagtttgccactttacaaatcatggatataattagttaacaagtgatgaggcatgaaatatgcctgtatgggtggcaacagtcaccgataatgtgggcctaccttttgtaagctcacattacagtcattgttacgtgaaacatatagacaaaaattgactatattataatatattatattggtcagttcccttagcagttgcgtgggattcacgcatttgtgtgacgtattgtttttataaagaaaacaagatggtgccagtaatagccataagctgcccaatatgctcattcagttgtttatatgtaaaataaagatgtgtacttggttgcgtgatctattatacggtgcacgggagtcgggaggtgccaataagtggcgtaagctatgaccaatatgctcatccaattgtttcgtaaaataaagatatatgtacctagttgcgtgagaagattagattactgttgtctattatatagtgcacgagaatgcacgcaagtatctaacaaagcaaaagagaacgaactttgaaggatttgcatcatggctcctttggattgaagtattctcataagaattttttaaggattcaaatccttaggaatttttcctaaattgctgtttgaaacataggattaaaagttgataaattcctttggattgctttccaatagttcaattccagatgaaattttctcatgagctcaaacctcttttttttttgtctttgagaagtacaacacgccttctctcttcatctctcttttctctttctagaaagctatcaaattcatctgatattttcctatgagacgtccaaacacatcatcttttaaattcctgcattttgaattcatgtagaattcatcaatgcataacatttcagtcatgtgtttttttctattccgatacttttaaaatcccacgtttcaataggactctcacacgggaagtttttcatatacggccctttggaacaaaggatttaaccatatcaaattcctttaggtcaatccatcagaattttagaggaaaataagcatgatgtttgacattatgttttgttcttcctatgaccgaaagttcctatgttttttctctgtgtcaccaaatgatagttttggaattttcatgtgggaatttaatagacatgacgccctagtcacatggaagacacgtgagtcggtaacatagagagtttgagttgggccaactacaaaactttgtctgttttgaacttttgagtttaatttattgctattttatgttacaatagattttttgaaaaaaaaataatgttagcaattttccatgcagcaataatggatttttgaagctccaaaatagatgactatatatgccgattagtgataaacaagggattgggtaacatttcagtgtcaatatataaggaatttgtctaatgtcatactaagatactagctaatcaccggccgtacgtgatttgctactatggatgaatatgacttattatgtatgctgttattattaatttgtaacaaactaactgcaaaactcatccatgtagatgtctttgcatgattaacatgtattttagatattgcttagcataaaaccacattatattacgtagaaaggctattttacaatatgaaagtacatcgaggaacagttgattagagagaatctaaaatattttctattaatatagtaggtatgaagaagttggactaaggcaatagatgcacgaaccaaatttgaaaatatactttgttttttcatattttacatttatatacatgtctgagattaacttgcaaaaatatacctagtccgcggaacggttgtgcgggatcgagggcaaaccgcaggctggggatgcgggagcggaacccgagccggtcacgcggaaccgggatgtgcgaccgaatcggtaccgcagtaccgatgcgcgggagcgatggcgtcctcagccgcgcggcggtaccgtagaacggcggcgtgggaccgcgccgaccctatggtccactgtgttattcccccaattttttccaactcatctccttctttttccgcgcacgcttttcaaagtgctaaacggtgtattttttacaaaaaaagtttctatatgaaagatgcttaaaaaatcatattgatccatttttgaaaaaaaaatctaataattgattaatcacgtgctaatggactgctccgttttccgtacggagatgtgttcgctgtttgggaaatgacgcatggtcccgcgcatccattatgcgggagcgcgccagctccaggcatcgcccaaaaaaacccaaaaaaaccacgttgctgctaacccgtcttgcgggaccggcgcggtagcacttccctggcctgcgggaccggctcggtcccgcatcccggatccgtggtaccggcttggtttcgctcccacatccccattctgcgggtcgtcctcgctcccgcgcattcgttctgcggattgggtatatttttacaaattaatctcatgcatgtatataatcacaaaatatgaaaaaaaagtatattttcaaatttttttcatagatgcacacgtacaaaaaatcgattgtttttaatagaaaaacacgtcgacacattattagcaaatctgtttatgtattatgaggaggtaagttatatctcttcgagggtggcagaagtgttccgtaagggataaattgaaatgatccacattttcatatgtctaggctgttacacagttaattatttttcccaaaaacttatggttcatggttagggtgtgtctagttcacgtcaaaattgaaattttggttgaaattgatacgatatgacggaaaagttgaaagtttatgtgtgtaggaaagttttgatgtgatgaaaaaattcgaagtttgaagaaaaagtttggaactaaactaggccgaaatagactgcatatggacctactatgtgggacctaaaatttggatagttaataaagaaagcatgtatctgcaaaatttaagtggtgtgtttgtgaacatcagaacatgtaatattcgtcctgcctaattaaactgcataaaacaaaggcattgcaccattccctttagactttgaactagtattgtaatttcttaatttcaccaagtaaagaaggacatgtggacggaaaagaaacgagtatgaattgaaataaatattaactaggatatatagtacttacgtcatcatgtatgaaatacgtacattacattatatacacaggcatcataattagcgttggatagttgtcattgcattacctacgaccaccggcctgtagctgaaattttggggtccctttcagagataatcctctcaattgtcaatggcatatataataaatactagactcgtcagatttttttgttgtgaaactagctcgccgtgtttaagttctagacttcacacggatactcgtatttttagctaattattcttaaaatggtagacgatgtatctgtccacaatgaggcgcgcgtggtaaatctcaaaatatgtcggcccaatcttccggaggtagggataggatgtacgtgtatgttcataaggtgcgcgtgttgtgagtacctacgtttgtaccgtgttttttttaaaaagaaaaatcctctctctcttttgtttggtgttggttagtctatttttgaaaaccaacataatataaaaaggatggagagagtacatcgcaatcgtaagtacgggaacttttaccctacatatataatatatatactctatgtaagctgttcttttctacttaacaaattaataaatcggaatgttaattaactagttaggaaaaaaattaattgatttcgtcatctattgagataagatatatatgatattgtacaagatagaatactacttataacaattaaaatcactaggactggggcgggtggcatctcgatcaacttgggataggatggtagatactactacatctgtttcaaaatatttgacaccgttgactttttagcacgtgtttgatcgttcgtcttattaaaaatatttattaaatatgtaaaactatatgtgtacatgaaagtatatttaacaatgaatcaaatgatacgaaaagaataaataattacttaaaatttttgaataagataaatggtcaaacacgtacttaaaaagtcaacggtgtcaaatattttgaaacggatagagtatattttattagtattatatacactagatgtgtattaattttaatgcgctaacgtggcccgaagaatagttttaagctaacaatacatattaattaagtagtactacatgaataggctcactgacgaacaaagctgggatcaggtgttttttttgtgagatgtcaacaaatattatatctgtcttcttgatgtatcgatttcgatgcaatgatgtcaatggacaaaaaaaaaagaaaaagagagattaagaaagtgaaggtaggtattgcattgtttaaggcacaggtacatgtacgcgtgcgagcgtgtggcttgtgcgtgcacggacgtaggtgacgcgtggccagctcgatcgatctatctacgatgcaacatagtatatacggaaatgctcaacgccgggtgaccggcgcggaaggagacggatcgggcactccctcttccctaacgcacggtgtctctttctgatctcaacatatatcttcaccatatattccattgcaacaaatcacttatatattttggaaaccctctattaagaaatttggtttatttttttattccaaaaaaaatgtttcatctagtgcactcacaatatttcactatggatagatctaatgttgcagtgaactgaaatattctattgcaacaaatcaccaatatattttggaaatcctctattaagggaattcgttttattttttattccaccaaaaatatttcacctagcgtactcacaaagttttactatgtatatatctaatgttgcagtgaactgaaacattctttcgctatttgctgaaacattgtttttatataaggtgaaacaacacctgatttaaatgaatgaaacattttcgatccacttagttgaaacaattccgatatacctggtggaacatcgtgcaacatttaaaaataattcaataataagctaaaaaaaaatttcgtcggaatatatccatttgtggtcttattttgaagatttaattgcaacgaatttaaaggtgcaatcggatcatgatttggataagtaatttaagagaaaagttagtttaaaatagttttgcacgtaaatcgagcgctgacgttatgctgacatcaacgcccgattttaacctcctctcattgggcgccgagccagagtcgcttccacatatatatagcctcttctactctcaaaaaggctgcatgttagttagagtatacaaataaaatcttggaatcgtaatggaaacattgatatttgatatgtggaatcaacattagtagatttatcttttttttcgaatggtcatgctgttgccgacgttttatataaagaagaaggtgcctcatttcaaggagaaaacgagaccaaaccttccaatacactgttaattaggaaaaattgggcgaaaaccacaacactctaacctaagctaccaacaccatgaaaaaagaaaaaatagcaaagcccaaaacagccatcgataaagagcttgttgtaagcgacacaaaggcttcgacttcatgaggcaagtgctatcgttgccgagcttgtcgcctagcgacacaacagtttcgactccacagttatcacatcatcgttgccaaaggcatcgtagaaaacaagcaagacaccgactgtccactttaaacatcagcccaagccacttgagcactactacttgtacacagctaacaccaacctttctcgacaactgcaacgtgttatcgttgccaagcttcatcgcaccccaataaagcagctccaacatcagtagatttatcaataaagaaataatgtggctgataggatagcatggatatattcggctgcagcagcccactacttatacgttgtgacactgttggtgtttggtaactacagcgtagggtatcgaaaagtcctaataatatcatgcttttatacttttaatattttctaaatataaagttaaagagaaatatagttaaatatgtgcattatatatatattgaagacaatatctatatatatgtttgccccaacaaattaaagtcaaccgaaccatatcatatagtatatcgtaatgcgctagctatctattggctgtcgtatctagctctagcctcctcatttgcatacgttgtgtagtaattaatttgtctactctactaatatataatctgcaaatacccactattttaacttaaaataatataataacaaaaagtccaagtagtgatcggtgaagtgatcaagactaactgatagattgatagatagataggtgtagatagataacttttattattttttaaattttaaattttaaaaataaatctttgtaaaattcatttttaaaatatgaacctttttgttatgccagcttatttggcgtgacaaaataacacattacgtcacctgcagcggcaatgatagttttgtcctaccatgccagctatattggtgtggttacgctagctagttacacatgactaaataacgttgtcacgtcatttagacccacgtgataatattgtttcgtcacgccttcttgattggtttggtcaaaaagatactgatttaaaaataagttttgaaaagatatgtttttaaaattaaaaactaaaataattttttttaaaaaaaatcgtaggtactccgtagatagatagatgctatatctcaaaacaaaaagttagatataggggcagcttagagataggtacccgctgacacgtgggccacccatccaaaccgtcctatgctataaataatggcgcccccgcggctcaccattgcactccaatccaaaagtataatcaagcaaagcagctcgatcgagtgttcgactgatcaccagttggagctaatcgatcgagagagagagtatgacggtggaagtggaggcggtgaccatggcgaaggaggagcagccggaggaggaggaggtgatcgagaagttggttgagaagatcaccgggctggcggcggccatcggcaagctgccgtcgctgagcccgtcgccggaggtgaacgcgctgttcacggagctggtgatgacctgcatcccgcccagcagcgtggacgtggagcagctgggggcggaggcgcaggacatgcgcggccgcctcatccgcctctgcgccgacgccgagggccacctcgaggcgcactactccgacgtcctcgccgcccacgacaacccgctcgaccacctcgccctcttcccctacttcaacaactacatccagctcgcccagctcgagtacgccctcctcgcccgccacctccccgccgccccgccgccctcccgcctcgccttcctcggctccggcccgctcccgctcagctccctcgtcctcgccggccgccacctccccggcgacttcttcacaactacgacatctgcgccgacgccaaccgccgcgccagccgcctcgtccgcgccgaccgcgacctgtccgcgcgcatggccttccacacctccgacgtggcccacgtcaccaccgacctcgccgcctacgacgtcgtgttcctggcggcgctggtgggtatggccgccgaggagaaggcgcgcatggtggagcacctcgggaagcacatggcgcccggcgccgccctggtggtgcggagcgcgcacggcgcccggggattcctgtaccccgtggtggacccggaggagatccgccgcggcggcttcgacgtgctcgccgtgcaccacccggagggcgaggtgatcaactccgtcatcatcgcgcgcaagccgcccgtggcggcgccggcgttggagggaggagacgcgcacgcgcacggccatggcgccgtggtgagccgtccatgccagcgctgcgagatggaggcgagggcgcaccagaagatggaggacatgtccgccatggagaagctgccctcctcgtaggcaggcatcgatgactgcttccatcgcttgctacctcaccagctcacctgataaatcacctcagttactatcgattaatcatttaccatgcattaattaagaagaaaacatatataccataattatctaccagtaaaacaaatctaatagtagtatttaataatctcgttggtaattaactgcagtcatgcatgaatgcatgccatattgcgtcgctatctttttttcccatgatgagactgatgagagagagagagaatatatgtcgctattgagtgttactgcttgattactgtactagtagcttattacaatcaaccattgtctctgttgcgtatttatgagtgtaagtggttaattttctgttgcagcataattaagttacctgtatataatctgatgtgtacgtacgcatactgtctcgatcgatctccggggcttaaaaaggagatcgattaattgatcgaggagcaattataattatgatgcagtcatgtttatagttaatttgcatgtgatcatgaattccatcgtaacgatccgctacttcttaaaaaaacaaagtactctctccgttccaaaatccaagacactgtagacattgtagaactatttttcagatattttataatacaagacatgcatgcatatattcaattgactagcatattctcttcattaaattattatttttgaatccttcactctcatgatctatctattggatatttatatgcaatgatgcatacattgtaccatttcttaaagtgatctaaacgaggggacaataatatactccctccgtccataaatataagaaattttagttggatatgatgtattctattacaacgaatctagatatgaagattgttcagattcgttgtactaggatgtgtcacatccaattaaaatcccttatatttagagacgaaaggagtatggttttttgtcattagattaagggtggttaattatatcttatagtagtatttttgaatgaagagagtaaaaaaaacataaggatgagaatatataggcttattttccattagaatttaggggaaatggaggttacttcatatgaatctggacatcctatttctcatgtttaaatggcttcgtagaaaagaaatttctaagaatttaaatcctccacaaatcctacgaattttctttcatgcaaaggaaccatataaattaagcagccagatactagtcgacaagcctaaatgattggagcagcatccaccaggccaaaatgatttgatttgatcgctcgaaatgtgtgcctgtaactgctagggttactcgatacatgcctttccattaatatctccgttctaaaataaattaacctaggagaaaataaaacctatcccagtacaacgaatctaaacatggacagtcatttgtcgagattgtgtcctagaaaatgtcacatcctctcctaggtaacttttttttgggggagggggagggaatggagggagacaaaaggggtcgaatccattggttttgggctgtcagatgaatcagaacacacagtagtactccctccgtttcacaatgtaagttattctagcattttccacattcatattgatgttaatgaatctatatagatatatatgtctagattcattaacattaatatgaatgtaggaaatgttagaatgacttacattgtgaagtggagggagtacaaatttttcagttctcgacctaatgagcacttccgggaagtcagggttggtgcgttaaagtgttacagtttgactgcctttaatattgatcggatctcattcgtatcccttaactataaaatcaaatatatcgaacccatcagctattaagattgtgtaaaatgactttttcagcaattttaatagaggtattagctggcttggcagttcaatcaatagaaaaattaagaacaaacatagatcccacgtgtaagtgacaagaaaaaaaaactgtaaaacccacatgtcaacttataccgcagccttctctttcccactcagcatgcggggtggctgtcaagcttccttgattgctaaagatagctcccagctccaaggcagccacccatactccctgcagtggcccctcccgggtttgcccgcctcttagtgaagccacagagcaaagtgattttggcagcctctccctccgcaatcccaactcccctcttcccccaaaaacctacctcgtcagaaaccttagagaaaacccacaacttatgagatggcctatgacaagagcaagccgttaattcatttctggtttacacgacttctaacctgttgcgtcttggggttggaggggggagggaggggcgaggggagcgctcgcatgtcactgctatgcaaaagagggatgagggatgagaggagccttctagctaggggaggaagggccgaagagggaagaggaaggaggaggaggatataataagaataataggaggaataagagagggagagagaggatgacatataggcgccatgtcatgactgacatgtgggttacacggattatttcaatcttgttttaaaaaaagtgcaatgatatgtgggtctaatttttatttatttatcttgctgattgtaattccacataagtgctatgtagtataaagaccaggtcaatatttcacatgggcaccacatcagtgaaaaccaccattaaattactcttgaagtgagaaatgcccaggggtctttcggctagctccacaaggtggtgggctagacaacctgggttcaaagcctcacccctcctaattatttgatattaggtccttccctaatattctagttttttttaattactctcgaagttattttttaaccagttttaataattggaggagttgttgtatcaggtttgtgcatttgaaggatattaatcaaatccacggtatactagacggagcccaagtggacttttttctgaagagttcacctgacttcggttgggtcgtatgtagcccatctgtatggatcggccttttttcggggttggagtttaatttaccgaaccccggaggcgtcgcatttgctccctgaactgcccatcaaattcggaagccccggcgtccgtcgcgcctatcaccgccatccgccggagacacagctctccgccatcgagatcgagtcatggctgttcgatcgccgacgtcgaccaccgtggccaaggcggtagcttgctcgacgctgccatggattatgctttctgaattccgatccacccaattaaccaagaatcaatgtaagcgagagcagtgaattcatcacagcccgatctgaagaacactacaccacagatcctcctaaattcatcgatcatgatctctctctctctctctctcttgattaatcacttgggatctgcatagttttcgcttaagaaaagaagggattagagacgacgttctgctgttaattgttgttaccccagctgaatatatgtgctccttgtaattttggttttagcttgaattaatcactagtaattacaggtttgcaagatgcagatattgtgtgagagaatggctaggtattatacttgttcgagtttctgaatttaattgtttcgagtgtggtggatcgagtcgatcagtcgagtcgagagtcgagtagagtagaagagcgaattttaatacaagtaattaattaatatcgtcgttaattattgttaatcgatacagtgaagatacatgtaagcacgtgccaatgtcgatatacagtactactcgtatcatactaggggatcactatttactgcggttgtgctcctagaaaagctttcatataaaattttcgttcgaaaagaatatgagaaatactaaaataacttacattgtaaaacggaggaagtagaaacgtagttgtggtagataacatgcagaacaatcagcaacagcaactctggtctcgtgacacttgctttgctgtgctcctcaatccggtggccaagccggatgggcggtaattggtctagttcaggaaggcccagtaagcagcccaggagagggtctctagggcccatgtgccggtccatatgggccaaaagagcactgttgtccctttacggaaaaagtacaccgaaggtccctcaatttgtcatcgagttaaaaaatatccgtcatcacttaactaattaaaaacggtcaccagaggtcatcacttaactaattaaaaacggtcaccagaggtcctttggtggttttgacccggttttatccgatgttgcggctgagtcagcgtgggatccacgtagggcccacatgtcaggtgtccatgtcaccctctcggcctctctctttcccttttctctttctctgtttctccttccttcctctcgcagggcatggggatgccggcggcggccgcgtgcgggcggattgctcggtccgatccgcacggatttggggggggggggggggggggga

SEQ ID NO: 1545 - DNA, 663 bp, Oryza sativa
caagagttttttttatccatgtttaaggtgatatttgatacttatttattatccttttaggtctttcactgctttgggcagtacttctgcttgcattacgaggcctgtccaacttggagtggctccggtttacatggccttcctccgttttatgggcgacgaaaatgatgccaggaactatagttatagccttgaggttggcgcgaatggccggaagatgatatgggagggcactccccgcagcataagggacagccaccggaaggttagggacagccatgacggcctcataattcagcggaacatggctctgttcttctcaggcggagagaggaaagagttgaaattgcgggtcaccggccgaatctggaaggaacagcagaatcctgactcgggagcctgcattccaaacctattcagctgaactgaaataacaagagagaaggattcggattcggattcggtttaggtgtatattgggtgatgcgtgtggtgcacctgtgcccgcttctgtaatttgtttgtgttgcttccacttttcttccacgtagccgctgtggcctgccctaaattagttagggctgacgtgtgaggaccatgaaaaaaaaatacggcttgagctctgtgggttctgattgatcacatgataagaaatttctcgat

SEQ ID NO: 1546 - DNA, 1040 bp, Oryza sativa
ccaatagactcagtaaaaggcaagaagcaactaagaaacaccatagtagacgctaaattaccatatctttaagaaaaagacctgatccaatacacatttcaatatcttacatgcgaagattctaaaattacactgtaacttacaaaagtaacaatgtaagtttcataaattacattataacttacaagaaaagaaaatgtactgtaaatttaagtgagaaaatcgagtgagagataagaaaaaatctttcgagtgagatatagcaaaatcgattatttaattaattcaattgatgttgctcctagagttggacgaatcgacgaaggccctgactgcactattgtgctgcacacatgtacattataaaaaagaaaaggttaaatggtttgataactttatgcattgagaagaaattattggatgaaattgatattggtaccattatcaatgacttcgcagctagaaatgtcagaagaaattttcgaggtaaatgttcaatgtttcctatataaatattattgatgaatgcaatttaaatatttatgaccataattcaatatatatatctattgattattattatatcgtatgataagggcctttatatctagtttcacaccggggctctgaaaagtcaggactagccctgcctactctaggaaggccttgtcatctcccctgattcctttctctttatcacggaggcaactgatgtatgcatccatcatatgaatttgaggttagttcagttacattacaaatatagttataaaaggaaagtaggtttgttaaataggcgaacttatatcgtcattcaagtattctggttctgttagtactttcattgatttccgattaaccttcactccttcaatatgcaccatcactttgttatcctttgtctttattaatgtaggtaatgaaacggacttcttttttaatcaactcttcaaaggtcgtacaaatttttaatatgtaaacatagaatctatataatagatttatacaaaagtacaatgtttagatattacctttagaat

SEQ ID NO: 1547 - DNA, 883 bp, Oryza sativa
aaactgcgccactacttccaagcgcatcgggtttccgtcgtgatgtcttaccctctcacccaaatcttgcacaaccgagaaggtactgggcgggtccaaaagtgggccatcgagctcgctgagttcgaccttcacttcgaaccacggcacgcgataaaaagccaggttctggctgatttcatcacggagtggaccccggtggacgaccctgttgcatacaatgccccccccctcctcggagatggaggagacccaaacgccaacattcgcgccgggcactgggttatgcacttcgacggctccctcaaccttcaaggtgcaggggccggagtcacgcttacctcgccaagcggggacgtcctccagtacgtcgttcggctcgatttccgagccacgaacaatatggcggaatacaaaggactcctagcgggattgagggcggcggccggaatgggcatccgccgcctcctggtcctaggcgattcccagctggtcataaatcaagtctccaaggagtaccagtgcaccgacccgcaaatggacgcttacgtccgcgaagtgcgacgtatggaatgccacttcgacgggctcaagctccggcacgtaacccgacgcgacaacgcagtcgctgacgagttgtcacacatcgcatcagcacgagccccactctccccggggaccttcgaggaaaggctcgcacaaccgtcgttgcggttggacccccccccccccccgagggacccggcgccacggtctctgccccaatccccgacgacccatgggcctcggggcccaagggggtcggtcccgaccctcctagtcaggttgtttggatgactgacatccaggcatatctcgacgataatactcttcctgaggatcg

SEQ ID NO: 1548 - DNA, 566 bp, Oryza sativa
gggtgcttgcgctcacacctcccgccgtggcttcaaggccatgagacgtgagcttctggctgcagtcccgactcacgaggcaacacgaaaggcgcgctggttggaggtgaagctcaccttcgaccagagcgaccatccgacagtgctcgctcggggagggaagttggccctcgtggtctccccgaccatccacaacatcaagatgaagcgtgtcctggtcgacaggagggctagcctcagcatcatctccccggctgcctttgacacgctcaaggcccaagggatgaagctccagccgtcactgccgatcatcggcataacctcggggcacacgtggcctctgggtcacgttgagctcccggtaaccttcggcgactccactaacttccgcaccaagcggatcgacttcgatgtggcggacctcaatctgccctacaacgcggtcttgggcagacctgctttggtgaagttcatggccgccacccactacgcctaactccagatgaagatgccgggccccagcggccccatcaccgtcttcggcgatgtcagggtcgctctcgcct

SEQ ID NO: 1549 - DNA, 671 bp, Oryza sativa
aaaattaggagatctccctcatctccagtgtattcccatcaaccgcttgaagttaagcggcgtggtgaactggcgttctccgtcgtaaaatgcagctgctgccagcttagcggccttctccgtggggtgccccacgtcccagaaccagtactccctccggttcccacacggtgctccgaactgctcattgcagggccctatgcagcacacagcatcagtgttcgtaaaccctgtgtacatacgatgacgaactaacattaggaatgcatcatcattaagaagaaatgcatgaagtaaattgtgacggttcacgaataatctgacagattttgtcaagtaattaaataccattagccgacgggttcatgaaggtggcattggagaagccgtagaaatcggcgacagagtagcggaggccggggagggaggagctcagcccggccatgagagaccccaatccgtcgttgaactccctcgcgagggcgttcatccggtcgtcgcaaccgccgacggggctgtggctgtgcggctgctccgtcaccgccggcgcgcacccgatcggcggggcgttgacgacgccgaacctcctcgcgcccagggcgtgcagtggccggacgacgagctcgccgtaggaggcgacgaggtgcgggatgtcggtctcgttgtcgggc

SEQ ID NO: 1550 - DNA, 5023 bp, Oryza sativa
atgtgtttcattggatttgatctgtgatgtatgtgatattggatctgatctgggatgtatttgagttgtgatgcatttcttttaggatttgtgatgtatttttcgtttgagatttggtgatgtgatgtatttgtgatctgtgatgcatttctttgcaatatgtgatgtatttcttcccaaatctgtgatgcttgtggatgatttgggatatttagggagcaaatcgattgagcaatgaaacaacaacaaaaaaaaaaaaagaatcaaccgggactgctccaccatttttagtcccggttggtaataccaaccgggaataaagatggatttttagtcccggttatttcacccgggactaaagatgggtatctttagtcccggattcgtactcccggttgtataaccgggactataggggggtttctaaccgggagtaaagcccctttctctaccagtgttatataatttctggctccgccactagattttatcgagagtcatcggtccttatactatagatccgctccacgcatgcaagacaaactggccgaagtacgtaggtacttctcatcattagtactaatggctagtgtacttgtgattcagttttgcagtatctgttatctgtatactgtagatctcgatccggtccaatcattttcaagctaggttctagctgatacgccaggtcatgttgttgaattcagtaatcaatcgagacaaattaatcatcgataattatttttttatttcaccaattcgtgtggctgctagctgatgaaaccagcaaattagagaaaatggctctaaatggtcaagagatactatcactaggtatagctagcaactatcagctaccagtatgcagcagattgtgtggtcgtcgtcgtcgtcacattaagtcattaattcgaccggttttctagatcatgtaatatgcggagtaatatatacatctgcgccgccatatatccacatcgaatgacccctttaatttattctcatccatctcagcagtagcagctagcatcgattatatatatatgtatctatgtatccattttcttttgcctagctagctctctcgtcccatcatatatatatgtatggcgcggcaatcagcagcatgggcttctacctaattgactgaaaaagtgaagttatttttgttatcctcttcttcttattattattccgatcgatatatgcacagcatctctgtatacaaatacatatataaatggatgacgtttgaaaggaataaaaggctaggaaaaaaaaggcatgcaactcacatactccagcacttgatatatatcaataatggatcagataaggccacagttgctgctttgatccacttgagcttagctagcttttgctgatgatcacaattagtaattgccgtcatccacatcggtgtcaggttttggcaagctagtagatagtggagtactccgtactccaaataaaggatgagcttagctagcttaattacctagagagatcgccgtctccgtcgtcgtcgtcgagaggaggcatgacatgagcgagagctgtacacatgtgtgccagtagttgcaggtcgatgtaattaagcgatggatgagatgcatatgtacagagctacagctacaggtggcggcgcgcgcacggcgacgcgtgtggcgacgagagggacaaggcgaggcgtgctacgactaatttaaccactgcacgccgcgccaaaagtttaaaaccccagccaatgcgcgcaagggcttcttcgcgacggcgacggccattgcgttcgtgcatgcacctggctgatccgacgacctatcagagattctcgccgccccggccggacggatcgatgacgagctagctagctatagcttagtgtgtcgctgttaacttgatgcatgctgaattagttagttcagttcgcgccgtttctatcttatctatggccaaagtacaggttgttcctcgttgatgcaatctacatcatatcgatccatggtcttttgtgtacttacttggattaattaattatgtttcactcgttttgtgaacacccgctattactatacacacacacacaatagtactactatgcccttgttttcaaatcacctccgtgacttgtttcatcttcttttaatctttatcttttttgtcaactaattaattaatcgctgcatttcggggtttcgtgtgctgaatcaaatagatcttactccctccgtcacaaaatataagtatttttagaatagtgacaagtctaacatttttttaacattttttactagatttattattaaataaactatcataatattcaactctttttatttaaaacatcttttttgaatactgttggtcaaagtagcatatttagaacggagggagtaccatatattgatcgttaattggttggcttataatcctacgtttgagtctttgaaagatcgatgaatatgaacgaaagggttgccaattgtcacgtacgcgtgtttggtgttctgaagacgcagctgatctcaaactgcagtgcacgtgtctgcttgacttaaatctcagctaattttggtcagaccacgaccacgttccgattaagttcacacgtagtaccgcttgatgacaattaatattccctcaataaaatggatggcaacctaacttcaaacagttagtggagtatataccactccgttccaaaccagagctgttttgaaatgagtgcatgcacacttatttcacacacttccatctgaaagtttacatttagacgaagaaaaaaaatcatatttattttctcggtgtcatggcgatgagagaggttcaaattcgtacaagttttcttcaaaatttgatatataattattcgaacttaacaaattaacccttcttaatttcaaccaagctcaataaagtctataattgtcctaggtccaaacccaaaacatgggtaagtagtaactaacatgtaggcctaacctactaggggaacaaaatagtagagtaaggagggacatcgaaaaagatgatctaaataggatgtttcgccttttattttgactagtaacatatcttgcataccaataagcacgcacgattggtttgggcgtgttgtatgggctcatatgtggctgatgataggttgggagttcgaatcaagatccaaccgctcatggatggtgggagaacaggaaggagaacaacttcattatttaagtaatagaggaaagtcagttatggatgacagtttttccataaagttatatgacaacctcaataaccattgtggccatggccgcttccctaaagcctcttctcctgccactggtgccacaagagcatcagcattttcactattgtcttagtggatgatgtgctctgttcccacacaaaactatgagctaagcaatcctaagaactaacaacaaatcattggtaggacgaacatcgacaacaatagttggataggtgaagtgaaggataagttgtgatgacccggcggtggttgttggtggtaaaaaaaatatgatatagtgagatgccacggatttaaagtcttgtatatgacttagatgtttgtctttgacttctacgttcttccatgttaagaactttatgggaggaggaagaagaacaacaagcttatactttagtaactttgtaatatcggaataatttattagtctatgacccaagttaataagaaacaaggcgattctcatttttgtcaggtctcatgaaggtcaaagatacctagatatgggttcttggattataaataatgggaaacaaataaggttctggaaagataaatggctaggaaacttggcttttaaagacaaatatccatctttatactctattgtccgaaggaaaagttctactattgctaatgttatgagatctgttccactcaatgtttcctttaggagatcattagttggtcagaatcttgcatattggcatgaattgtgtgcttatattgtacatattcaattgaatcaatcctctgatagctttagatagaattatcatcagaatggaatattttctattaggtcgatgtatctagctttaactaataatggttatattgagataaacaagattatttggaagcttaagatgccacttaagattaagatttttatgtggtacttgtttaaaggggttgtgctaaccaaggataatttggcaagacgaaattggaatggcaatttaagattttgtttttgtatgaaaaatgagactatgcaacatctttttatagagtgtcattatgcaaaatttgtttggagagcagtacagttctctcttggtttataccttcctactaccatatctaatatgtttgatggttggctcttgggggtagacaagaagaagagtaaactcatacttgtaggagcttctgccatatgttggtctctgcggttgactaggaatgatatggtttttgacaaatcaccatctatctcatatatgcaggtgattttcagggcaacatattggctccgattttgggcacagctgcaaatgtgtgaagatgatcgagagcttatgaaggttgcatgtcgtaggcttgagacaacggtcatgcaactccttgcaaactatggatgaagattcacagatagacttgaataaatgtgctctccttatcttagtttgatcttttatttcgttgggtgtgtttaattcatttgaactacactcagtgtttgggtgttacttttataataattggctatagctctgatgagcaaaggccgggatgttttattctattattgtagcgcccgttccgtcgtggcgcctagcggaaaaattatctcttaaaaaccctaattgcgaaatttgtttctttgcttgttgtctagtgttcgtgccatctcaagatctcaatccccgatctatcgtcgagtccaattccgaatccaatccttccaaatcaaattcctccgcaaaagtctattttgcctcccccgggggtcgatgggccgatttcctcccggcccat

SEQ ID NO: 1551 - DNA, 8887 bp, Oryza sativa
aatactcaagctttataattcacacacaggccaccgccgggctaagagcgttgggagcagaaaaatcagaggagattttgcaagcggtaaattttgcttttattcacctttgattaattgttgtttgatcgatcactgaatttatattggttgtccctaatattgaatacactcacaatttttgcaggtcagggatcttcttcgcgaaaagagttcgttcaagacccaaccggattgggttacagttcttgatggacctcaggaaggcgcatatgaatgggtacaaaactggcctgatttattcatatggttcagaacattactttgtgctcctgattattagaaatgcctcacatttgtcagattgacaatataagttctttttgtttagaaaaaactattttgttcagcaacaaatctgccaattctcttagagctgacatctgccagcttcaaagatataagttttaaaggacatgataaaaaaagagaaattttcgctttcatgagtgaattaggcaaaataactattttcatttttgaaaaacaaaatttgggcaccagaaacaaatgacgaaacaaaatccaaatgacgaaagctaaacattgaaagtaagggcaccagaaacaacattttccctgaaaatagatgcagatcatctgaatccatgtggtgcactgttctgacagttaattcaccttttgagtgtttaggatctgttcacaactagtgattctatgtctagcttttagtccattaactgataacaagtgttgctcttctctatccttataggttaccatcaattatctgctggggaaattgggaaagacttacgcagacacagttggagtggttgatcttggaggtggatctgtgcagatggcatatgcaattgcagagaaggatgcagtgaaggctcctaaaccatcagagggtgaagattcatatgtgaagaaactgtttcttaaaggaacaacatattatctttatgttcacaggttagtatgaaataccgttgagcttttggctgctgctacattgtcaagaaaaaagttattcagttgtgatacgggaacaatcttcaaaatccatttaagcatctgatggcatattgtcatgcctatttctgatgtctgcctatgccaattcataggttatattctttgcaaagcagacagctgttgtaatcctctaagatactatctcgtattgataaaaatgcaagaatagcgtattaatgcaaatttgagaaacttaagtccagaccaaacgtaagggtacttttatgtgtaaagattctacctaaatatcacgtggtattctatgtaatgttctacagcaaacacttaatctgacatagccacaaacttaatactccttacttttttattatctgctgtataagatgacatcacatgacctgtttttagtctggagtctttgaaccacatatataactgtacacatttcttcacagctatttgcattatgggttgctggctgctagagcagagatcttaaaagccggcaatggcaaaggttacagctactgtacattggaggggcatcaaggtactagtaacatacttctaccatattcttctgctatcatttaactccctgccaagtagcttatgtttgttcctaaaatttcaattgttgttacccttatgcatattttggtcaagggaggaatgtaatgcgtaggctgcattcggaggtggaggttgggaacttcacctcgccacacgcaaaacaaagcgacccattagcgcatgattaattaagcatgagctaaaataaacttgaaaaaaatggattgatataattttgtaaaacaacttacatatagaattttttttgcaaaaaaaaaaaacaccgtttagcagtttggcaaacgtgtgcgtggaaaacgagaaatagaagttgggaagaggtggtaaggaacacacccttatagtggatcgtaacctggtttaaatgaggttaccctcaaattctctatgaaacaaataccttactggtttccttgatattctttccaaccatcagtctgcagttagaattatttatagtgatgtgtataaatctaaatcctcatcaacacaaatgaccaatctgtgacaatagttggagatgcaattttatcttttctatgttggtaagatagttttgttctaattgcattgtgattgtagggcaatacaaatatggcaatggcaaatttgaagcgtcggcttcaccatctggtgctagttattcaaaatgcagggatgatgtagtgaaagctcttaaagttgaccaagcatgcactcacatgaaatgttcttttggtggcatttggaatggtggtggtggcgctggacagaagaatttgtttgtggcatcatttttcttcgacagggcagctgaggtaaggttgttgaactactgaagatgtttgcttttgttgccatgatgatacaccagtaaacaattttctggtctctgctcaggctggatttgtgaatcccaaggcacctgtggctaaggttaaaccttcagattttgaaaaggctgccaagcgtgcatgtaagttaaacttgaaggacgccgaagctgcctaccctggtgtccaaaaggataacattccatatatctgcatggatctcgtttaccagtacaccttacttgtggatggatttggtatgtctcgttaaaactaaatataatcaagaccgcattacagattttgcacaaatttatcactaatttgttttgctcttgcactctcgcaggtgttggttctcaccaagagatgaccttggtaaagaaagtcccttacagcaacgcgtttgtggaagcagcatggccactgggaagtgccattgaggttgcatcttgatagacagacagcagaaagttcagcaagggagctacgatcagagggcgtcatcgccgtaaagttttggatctggagggtgttcgcttgctcggcgctgcgcacgccccaagtgaccattttgttactgaaatcgattgatttaacctgcttctatacagtagcctgataatgagtgatacacaaggacccgccagcttgcatagttgcatacttgcatgcaaggggtatatacattttttttttgtaccattgaaagtaagacgagcctgtcattcttttcttgatctatactactccagttctgtacctctgttaggggcagtacagtagagaagaagattgaccatgtgtccatgtggtgatcccacatgccagcatgactcagctgatatgtgggtcccacactttgtctctgctgccatgtcagctccttttgttgttctccggattaaattgtcgtgtaagcgtcacgtcaattccacgtaggatgaagcagcctagtcaaaagagctatgtatgaaccttatttgtataggttttgtaagttgagggattgtatttttggttaaggacgaaaatctggcgacaaattgagactttgagggaataagttcatccaaggtcccttaacttgtcaacaaatccaattttcatcccttaaccacaaaaccagatacaacgggtccctcaactatcaaaaccggtgcaatataggtcccatggcggtttggatggtggttttggcttacgtggcacctacgtgtctaaattgacctggtcttcatctgacgtggcatagatgtggcattgacgtggcaatttgatttggaaattaataaaaagagtaaccccacatgtcagctacaccaaaagaattaattaaaaatggtgtggtccacatgggccccacttgtcattcactctcctcatcttcttcctcctctctccctatctcccctctcctctctccaggagctggcggttcggtgatgcggcaggccggcggcagcggagccagggatgacctcggagacgaggacgccggggagctgcgcctggacggggacgccgacggcgagcgcctgggtgtagatgatgaggaaggcgaagaggaggttggctgcgacgccggcggagacgacgaggagccggtcggggacggggcggttgcgcaggaggtccgggtcgtcgggcgagaagccggagtccggttcgtcgtcggggaaagctgacggagaacttggagacgtggatgccgcaggaggtggcggaggcgaccgactcgacgctggcgaggaggtcagacggggggtcgccgcggcatcgttggccgccgaacctcccttgacgccgcatcgccgaaagggaaaaagaagagataaacaaaaacaccatattttaatctgatctgatatgatcaaatgcacctcaagctcgatcccattagcagcaatggcgatatcgttgattttcacgacctgctcgctgaggaatggaggtccagttgctggtgccatgggtggaggtgtacgctagcagcttggcgcgcgtcctcctccgccttccatggccccttcttcacgtttgccttgtcgcagcacggcggccgccccatctctccttctccccctctcagctcctaccacggtgagctcaacaacaacaacaccaactctgagtccagtaacaacaatcaccgccggcgtccccgtccaggcgcagctccccggcgtcctcgtctccgaggtcatctctggctccgctgccgccggccggccgcgtcgccgaaccgccagctcctggagagaggagaggggagatggggagagagaggaggaagaagattaggggagtgaatgacaagtggagcccacgtgggctccaccatttttaattaattcttttggtgtagctgacatgtggggtcactctttttattaatttccaaatcaaattgccacgtcagatgaagaccgggtcaatttagccacgtagacgccacgtaaaccaaaaccgccttccaaaccaccatgggacttatattgcaccggttttgataattgagggatccgttgtatctggttttgtggttgcaggatgaaaatcgaattcgttgacaagttaagagaccttggatgcacttattcccactttgagcgcaagttgttatggtgtatcggcccatcaaggcccaagctagtgtcgtatgggcttgagatacacctgggccatcaaacagtctgaacgggagtgagacccaagtgtttacggcccaatgggctgtatatctgactgagtgaagtatgcccttgtcagttgtcactgcagctatgctaattagtggtttggctttatcaacaatttatcattggaaggtccttttccacaaaaaagaaagcacgtttttacgtagacatagacacgcgcacacacgggtgaaagaaacatcaatcgaataataggcagtagctaagctagctagctgggtacgtacgaaaggaatacgtagatctttagtactcaccgtattggactcggaagagtggcgtatcttacggtttttaaccgtctcttccacaaccagcctacacgtgtcccgtcggcagtaactagtgtgatctgctcctcgccaatgtcgacacctgttagatcccaaatcaagaaactcaccaaattaatcttcatctctctctcttttttttaccagctgtgatcaacacgatttattacatcgatcacgttggtaattaccggagccaaccattcaaaaccatgtgtctggctggccatctttttcttaggaagccaggttgtactacactactgctagctgctgatgcttaactgaccttgcttcctgctagcttagtgcttagccttagtatctcaagatggatgcacttacagaacttccctatctaacttggaccctctagttaggttcaaaagatagttatctttaaaagaaaagttaggttcagaacatgcgttcgttatcagctgttaattcgtagaaaagttcagtttaatttgtttaccgtttccagaacaagttaatttgtcagatccgtgtaaacatgcaaacactcatcgatcatgctcgtaaattaaatcaaattgttccatatgaaaagcttgcaaaatgaatgactttcaagcatgccctagctagtaaactaaattacacaacacctgcccttatatgaaggtatttttcttgattgaaaataagaacagtaaatgggagagttggctcaagttggtttaaggatctttacaggtacattgaagcttcctctacacgacattatatatattatgcgcatatatatatgcaggccttgaattcttcatgtcacaatctaaactggacgcagcaaacagtaagggaatggctgtattcatcattgagcacaattaatctaaccgtacgtccttttaccttggaagaccataactgtactaatcgacattagcgatgcttcaacggaacgtcggactctggtgtccagctgatctatctatctcagcactattattaccaaatcaattaccagctagagattaatccgaacacgtacgtggcgcccgatctagagccgtatatatacgtacgctaataattagctggccaatgagagaaaataatatatatggtcaatatataggagaggataaacatcacgttgttatctcccatgaaagttttcttcttcttattctcgtctatcttcttgagatgaactacttattcagagtgtacagctagttcactactttgtctgcagctagctttcctaagagatcaaaagggtttccaagtgcatgtcacgataattaaaaggtggccaccatgcatggttcatctttcgatcgagatcgagttctataaattgacctgtcaatggtatgtctgccagtagctagctcgaggttaatctattcgatacatattccatccgtttctaaatatttgacacagttgattttttaaacatgtttgaccgttcatcttatttaaaaatttaagtatttattaattcttttcctatttgattcattgttaaataatataccttttatgtatacatatagttttacatattttacaaaagtttttgaataagatgaacagttaaacatgttttaaaaagtcaacggcgtcaaatatttaggaaaggggagtatatattttatttgaaacacatgttaattgttttgtcgtacgtcctctctcaacgtattactactggtcagttggtttgttcttatcgtctaattttagatcgaaccggccgggtagtctgtccttttacggcagtcatttggtcaagtcatccgtgtacatgcatatatgtcgtcgcagccgatcaaagctagaacgccacataataaaatcataatcaactatatatatggtggttaatcatatatacacgtggattttccttgtttaattgtcgtcttgtgcaaagtgcaatgggctatcagcaagttgcattttttttattggcagatgattgcaatatggcagcacatatacataaatgataagcaaaacctgcagggtgtggaagacaatcatttggagcataaacaataagtacgtatataattataaatatttaaatacatgcatattattgctggagaagagaaacggtctttatatcaacgtctactttgatgaagagactctaggattgtttaattattccatggaaaaaataaagggggaaaaagaaatggctagctagaccggtcgttccatgcatgtagagctgcatgaattgtgagatggatgatcatgatcgtggtgaccacgacaaattaagccatcaaaatcttctctttccgttgagtgcaacagcacttcacttgggagtatatagctagcgtgccgtggtcgcaagctacgatcgagtcgagtatatatgaagctaccagagctgcactgctggtggtcaaaggcacccggccgcctcgttccttaactcttgcatgcatctatatatgcatgactgcatacagaaatatggtggattaattcctgaaattctccatagaaaagagaggcagatcgatgttaataagataattaatcaacacgtacaaacttagcttgtctcgtaacttaatttgttctcttgtatatttgacggagcgtggggctcctcaccgggagaccgcgcaggcccccctttgccggttcggccggggactcagggagagattctaagctctctgtatgtggaaggctcgcgagacaggaaacacacaagacacgggcgatgtatacaggttcgggccgctgagaagcgtaataccctactcctgtgttttgggagatctgtgtatgaaggagctacaaagtatcagccagcctctcccttgttctgggtttctaatctggaaaagtccagtcccccctctcagtgggcaaggtcctccttttatatcttaaggggataccacatgcaccatttctctcttttttgtggggacttacccccccttttcataaatggacggagatttgtatagttgccgtccgagtcaccttctgatgagacggcccacaactacctccactttcgccgggagcaggtgcgacgtggaatcgtggctgtctgctgacgacatgaccggtatcagaccagtcacgtcggtcattcttgtccaccacgtgtcaacttagcaatctacatgctcgcccttcttcacacaacatcttgcctgtaatggttaggatgaagcctggcatatatctgaccaggactaacgtgccatctctgggaggtaacacgctagctccagctggggacgagcgcctagaagccctcgtcctgacgggatggggcgaggcgtgcgtcagatcgcctgtcgccacctaacccgcgatctgaccggtctgtgactggtcacagaccggataaacgagtgcactgcactgcgttacatgcggcgtgacacgctcagccaaaccgcaataaatgtgg

SEQ ID NO: 1552 - DNA, 105837 bp, Oryza sativa
aaattaaattaacagcaagtgaaaagagaaaggagtatctctcttgttacgtaccatccacggtttcatgatgtggtactaacagtagcgagtgaattaatgattgagtgatgctagtagttcattaaaaaaaagttaataagcgtacgtcagtccaatcatctgattaaattacaatatcctagaagaagagtacagtagttcaattagtagtggtgcaacaggatgagagcacgcaagtggcatgaggagatggatggatatgcagttagtagttaagctcagagatggtggtcatggcgaattggcgatggcgtatgagtaggtacataccctcatggagacgttgcggaatcgggaggaggaggagggcttgtaggtgtttgcggcggcggcgagagggtcggcggcgaggcggtactcgtgcatgatccagctggtcttggtgcccttgggagggcggccgcggtagaagacgagggccttcttgacgccgacgctctcgccggtggcgctgtcgtggatgggcttgtcggttcccgtcgccttccagtaccccgacccggcggcgcggttcggccggattccgttggggtacttgcggtctcgcgggctgaagaaataccactcactctccccgtacaccgccttcgctgcaattaattaaccagtagcaattgaccgaacgaccaactcaatcgatccatcgatatgatcgaggaagaaggcttacatggcaggtcccatggatcgaacttgtagatgtcgacgtcggcgatgatggggacggggcactgcccggcggtggcgcggctgcggaggtagtgcaggatcagctcctcgtccgtcgggtggaaccggaaccccggcggcagcgacgtcgccgccgacgacatcgtcatctccatcgacgatctaatacggttactgctttaattagcttgtaattggctacctatagctcgatcaatcgattgatcgaatcaaagcgagtgctcatcgatcgatcgatcctccggagcagcggagggaagggccacttatatgcacgagcgaccttgtcagttagcgtgacgtggcgcggagtggcaaatgtttgtaattcttcggggtcaccaggggtagaatcggaaggccaatcgggtgattcgttattcctcgcgtccggcatgactcggcatgggctcgtgcgtggtcgtctatggcgtcagcaatgttgcaacgcatatgctcatgctcatccgtctccagctgcaactaactatatctatctatctatatctaactagttaagctaagctaagctatctctagccgtcctcactgctcatcaatctcatgtgatatctcgcatacagtttcatcgatcgttatcagctacagggaatcgatcgatcatatatagggcagatatacactcctatcatatcatatacttcatctgtcccataaatataggacagatatacactactatcatatcatatactccatccgtcccataaaatacaaactaaaactaaacgtgacacatcctagtataacgaaatctgaacataagtatatctagattcgtatgactagaatgtattacatatactacatccaatactagattggtcttttataagactggagaaatatgtagatagatactcctatgtagctttttaatatataatagcattgactttttaaagatacatttaatcattcattttatttgttttaaaaaattatgaacttattatttatttattttatcgcgacttgatttatcgttatatgttcgttaagcataacttatttttttatatatttacaaaaaaaataaataagatgaatagacaaacgcttatcaaaaagtgaacggtgtcatatattaaaaaatgatgtagtagatgatacgcgtgattatgtcaaaggtaagaaacagaattttactaatctgctcttttttttggaaaaaaaaggaaaacattattcgtgtgtaagtatataatatccgtgtgcattacaatttaaatctcataggtgaattgcacacggatattgataaatcatgaatccacaatatgagatttaatcgtaccaccggtacttttcggtaaataattcatcatttcaataaatatcagtgccaattaaagcatattcttgggtgctctctaaagaaacttattgtttatttaaataggagcatgagaagaccaattatttgtggagtacgtcacatcctgcacgtggagctatttagctgcagtggccggcgctagctagttgtagacgatgaattggatcagtcggctcacatggctagtcattatcgatcgaaaggccagaaatctctgaatagtactgaagtagacattcacacatccattgattattcccagagaaattacaactgtttggctctttgctacaatactctctccgttttctaaatatttaacaccgttgactttttaacacatgttcgatcattcgttttattcaaaaacttttgtgaaatatgtaaaactatatgtatatatataagtatatttaacaataaatcaaatgataggaaaagaattaataattacttaaattttttgaataagatgaatgagtaaatatattttaaaaagtcagcggcgtcaaatatttagaaacggaaggagtactatattgtgtgtggggctccatttcaactataattgaaccatacacagtttcggtgtacgttattattggatcatcatatctaacagattaacatccattattcatgcaccgaaactgcaatctttgtctcttcaagaggtttgcctcggcggtacaccgaagcaagctagctatatatataaaatcaggattatcctcgctcaattatgccttggaaaaactcagaaatgacactacagtaagtatgttaattgggatgatttccacttcacctgtttaactggaatggccaccaatgcacatgtttggagcatacttttatgatcggagaaaatttaattaataccatcgctaatatgtgtgagttgtaaatcaccgcaaaggatactattagctacacaagtcataggagagccactgtagaaggaaaaaaatatgatgagaaactaattccttttttttaagataattgtcgcgccccgaactagtcccgaccggaactagtccgtgacgctccaaattaacctgttaatcgataccagtcctaggaaacagtgctggtatcacagggagacagaatatcacagcaacagaggtctctttattatagagtagatgtacagtcatgctgggctgcggacagatcccgagctcacaactgcattacaaaaggaaagcggaagccaagacttggaccaaacatcacaggcgcgacttgggaactaggccgaaaccctaaaactcatcgtagccggcttgctcctggaagaactcctcgtcagcgggatccgcttcatcttcttcaacaactgggggggattatttatatagagcaagtgtgagtacgggagtactcagcaagccatgggaaataagtgtttaatgcaggcttcaaggaaaggctgttgtttttgcaattgattttatttgaactcttttctgaaatcaactaagtgagtgcttctcaaacgacacggatgagacagtgcgtctcgtccggtcggagtatgtgcaatgtatcagtcttttgaattgattcaaagttggcacccggccaacaactttcaaacggccacccgggccaacaacttttaaacggccacccgggccaacaaccttcaaacggccacccaggcctagctgatccatcagctgcagatttttcaaacatcgatcccctttcgacaacagcaaattcacaaggcagtagttaaacaaaactacgctaggaatcacctcacatccgcccatgaccgtgggcacggctgttcgaacagttttaatcacctctgcagagggggtacactttacccacacgacattactaacccggatcacccagcccgtggggatcagccacgtcgggagacctccaagatttcatgacaaggcatttcgaaagccgacacaggtttaccatatgccgacgagaggggtcccagaccaacaacaggttaggtcccagaccatactgtgccaggaagcccagggatcctccccgacaccaccccggcgaatccacatgtctctcggcatcaaggctcccctgataagctagttactcagccaggggtgtcccattccacccatgtggtcgtacttgtcttatgttcggatgaaattccaaggaaacggtccttaagtgtaagagcgggaaaccgtacacccggtacgttccccggtccgcggttttggaaattcatttagttcacaagcaccgacccaggtgtcgggttttccaagtcttttgtaaaacccaagttttacccaagaagttactcagattttaagtttgaaggcgaccgtcgatactcgtgcagagtgcacgattttcgaggcgcgactaggtggttacaaggaaacatggtataacaattaacagaggaaggatcaaatgcaacaaataggtaggtccgccaatctgccttgcagacgggacaagcagattaagtgtgatcctatcaatgcataatatttttcaagcaacataattaagttcaaatataggctcaagatgttcaaaggtggcttgcctcgctcgagatcttgagcttgatcctcgaaatcctcgcactacgggtcttcgggctccgaaactacacgcaaaacgggacaactcaacaaacggcgaaaataaagccctattaatgacctctaagcgtgccattagatagatctcgagatttgaggaattttggaagttgaacggagtcaaacggatttacggtcgggaagatattgaatttctaagattattggatttttggtctaaaggaaaaaggatttatttaaatcctttttgaaaaagaaaaagaaaagaaaagaaggagggagggaaatcagactttcctcgggcggctagggcgcggcccgagaggaaggggcggctcggccgagctaaatggggccggccggcccaagaaggcggcccaaagcgcgcgcgcgggcggagaggagagggggagccggtgggccgggtccaccttgcgtggtcccgggtgggacccgcttgtcggcggcacggttcaccgtgcggagggagcacgcgacgcggcgctagggtttgggcggggcgcggcgcacgcgcgcggttcgcgggggacgcgggtgcggcgggcccacgcgtagcctcacggctcgcggtggaccgcgcgcacggggagggtggaacggagggagcggctgaccgggtcagccgactcggttgtgccgaggtggcaccgacgtggcgcctacgtggctgcctcgcgggccggctggaggaagacgaagacgccggccgcgaatggacggcgggcggcggcgacgagcggcggagcgaatcacggcgatacaggcgaaagcgagcacaccgggtggttgcacgagacgaggggagacgagccaacggctcggattcgccagagggagctcgacggcggcggattgcggcggcggccaccggcggagagaaaaagggaaaacggcgacgaggtcacgaggggccgattcccggcggcgagagcatctacgcggctacgggaatccgtcccttgcaccggattaggaggaaacgcatcgagggaggccggcgacgagagacgtttccgagctcgggcggcgacagcagcgagcacacggcgagcgacggcaaaggtcggggcggcaccagctagctatggggaggctactcgtgctactacccgagtctaaggggaggagatggaacgaggagggagaacggagggatgcactaccgtgcgggcgggcgcagtgacgagagccgacggcgcgaaacgtgatcgtttcggcctcgggccgaggaagaggagggggagggcacgcccggagtccccttccgcgtccttgctcgtgccgactcctccgacacgcgcaacgatgatcggcgacggcgaacaggggtgacagtggcgtggcggcgagagacgaaaacgagggagattagaggagggaggagcttgggtttataggggcgacaatgtcggtttgggagaggggaaccgacattggacggtcaagccggcgagctggcgcctggctagcggccaaaacgacgacaggaggtgacgccggcgatgggaggaaaaagaagaaaggaagagggaaagggggcttgcctccttgcttctttgggaaaaggaggagggagagaaggcgatgaggaggagccctgcctcctttccttggaagcacgcgcagggagaggcggggccgagtcgatgacgacggcgatgacggcggggcggtttggagcggagcgacgacacgggcggcaggcgcggcaggcgctgacggcggcggcgaccaggcggtcggccaccatagcacgcgcgcgtgggaagcaacggcggcgcggcgatttgagcggcacggctcgggcacgcgtgctggcttgcggggccgagcggctgcgtggcagggcagcggggccgggcggcgtaaacggcgcaggcgcggcacgggcggcgaccacgcgggcgcgcgcgcgcgaacaacggcgcgcgggggccgattctgtgggcggggagctcgctagggatggaggcggggagagagagcgagggagggagatgggccgagagggattcggcccatcgaacccgggggaggcgaaatagacttttgcggagggattgatttggaaggatttggattcgggattgaattcgacgatagatcggggatttgagatctgagatggcatggacactagacgacaagcaaaggaacagatttcgcaaatagggtttttaagagatagttttcccgctaggcgccacgacggaacgggcgctacacaaactcttgtctacttcgtcgcaggggatctcgagaccaacccatggcttgtttgggtccttccattcatgccacagccagcatagacgcagggctctcgtgaatttttctaggttcaggaccccgaggcctccttgcctagttggcagacacgtctttgtccaattgactttgtattttccacccgtgatgtcccccgtgccagcccagagaaaacgtcgccgctgcttgtctaggcactccaaggcttcctttgaagttttcagagcagtcagtaagtagattggctgcgccgtcagcattgattttacaagtgtggacctcccggcaagtcccatgtttttgcctctccatcctgttatacgccctgtgatcttatcaaagatgtgttgcatgtccgcctttcgcatccgcccgaggatcagggggagtcccaggtatttgatcgggaagtatgctctcactgctgggactccctctaggacgtcgtccaaatcaatgttattgtatttgatggccgcgacttgagatttttggaagttggtaacgagtccagtggccgtgccgaaacgttgcaggatttccgtgagcgcttggacatcccctcttgtgggattgacgaaaatggcagtgtcatctgcatacatagatgttctcaggcgatgcattctgcctcgaagcttagagagcgaacctaggtctgttgcctttgtaaagagacgttggagagggtcgattgctaggacaaaaaggagcggagacaacgggtctccctgccgaagtcctttcccatgcgtgattctttgactagggatgccgttgagaagaacttgcgaggtagatgtgtagaggagggcacctagccagtctctccattttacagggaagcctaggcgttgcaaaagggccatcaagtagtcccaacgtatagaatcaaatgctttcgtgatgtcgagcttgaagaggagcatcggccgattcgtacggtgaaatcttctggccatgttcctcacaaagaggaagttgtcatgaatgcttcttcccttgatgaaggcgctttggttgatggagaccaaggagcgcatgtggggcctcagccgcaacgccagctaattaagctactgtttgaactacattgggcatgttatctaaactcaacccatcacaataaaacacacacaacctaattaagctactgtttgaactacattgggcttcggatttatcatgtgattcctcagtaaaatattcatcatgtgatagagctgaatggctgacacttcggtccggcacgaatcatgaaggccttttacaaaaaattgaaattggaaactgaaagtacactacgtggccactcttttttctctctttggaatgggcctagatctttttcgggaaaggacaagagctgagtggatgcacacggatatttttaattttttttcccttgccacttgtagtacaattgtaaagtgcatgttgccatgttggtaagtgcacgagtattttctatttagggggtgtttgagagagagtgactaaactttagtctctcttcccttaagttccaacgaaaatactacccctctctccgatctcgaataagtgtatacactgttaggtacgacactttagttttaaataattataccaacacataaaatttttaaggttatatttataactatatgaaaccattgtttgcagctttcagcctttaacctgctattaaaatttaaattttttaagttgatttagagagtttcttcgtcgtagttattttctatgattaacttttaaatcatgaataacatacatatataaaagttctaccaacaattttcttttttatacactgttttacgatttatcaatggtaggcgaaacaattagcctgctatacactttgataatataacatttatttagtatttatttttttataaaataagaggttaaagtgtaattttaacagtgtcagtgtcaattattcaataactaacaaagggagtacttcctccgtcccataaaaaactaaactagtactggataagacataacctattactataaatgtctattcgtagtattagaatatgtcacatccggtcctagatttattttttatgggtaaagtagtattttggagtaaggactggcggtaggcaggaagcccctccttcgtcagccagataaaaatatccaacagtacttaactgttactcgttattgttttgttttgtggtgccaatgttttcttcttggccttattccctccactactctctctctctccgaagcacatttatttttgggttatgtttgtttatgactgattgaccagcccatctaatcttggtttataggagatactaataacatatatttagcatcaagcagtactagctaggagtagttgtctgagttgatgtatataaaaaaaagagagagctagttttctgaattttgttgtgcaagaggagcaaggaaagaccagatagtcttcatcatgtggccactgcataagttcagttgtttaggtacccaagggttaactatagagggaccagcatcatgcatggtccatcatgtgatcttgcaagttgcaaaagccagatgcaaactgtatgaacattatttcgtattattaattaattatatatattgcccaagaaatggcagcacaggaaaagatctttatcatgtggctgcaaggaagccagggtggatgtgtggatatgtgcaacactactatacatttgtgccaaaaaggtcctaaatagattttgcttgcattttgcatgcgtggatcagtggaggcagaaagaaactgaagaaaagaaataaaataataagagatgtgagatcaccagcgtatgcatcatgtcggccagcatgcatggtgctgctgctaagctaaggtagctggaaatacttacggagtacctttttttttttttctcttcagccattcatttgttcattcatagcgttatccatgaaagacctggcactatctatctgtccatggtttccctaacatgggccaattttgccgcgatatccactcttgcagctttgatttgttatactgtattttacttttacttgtttttcacgaaagtgaggcagaagttctgtaaatatattttcttagaaagaaagtctttttttttcagaggtaaagaaagaaagttttattccagagagaaatattttttttcttcggagaaacacaattcaaatgcaaaaggtcacttgcatgtatgcacactcatctctaggataagatcttgttattaagggttacgttggctacggctaaaataatacatggataaggataaggataatatatgttgcacaattttttttaaaagaaagactgagcataacgatttcttttatgcagtatgaatactagctatatgcacatgcttcttaaaatacaatttgttagtaacaggtcaggtttgtgtagcaaaaacagatcatcattctcccttaaaagaaaaacaccctcaaaagaggaaaaacaaaaaaaaagaaatggagaggggccgtgggccatgtggagctcctccaataaaaccaaaagcactaaaaaaaaagccgaaagcgccttttgccgtcctccattacttttccccctcatcaaaaaaacccaagctacctcatcaccccaccatcaaaggcactgacatgtgggccatagtatgcaccctggcccacctgtcattgaccctcgttctccaagtggcacgagacggaataaactaaggcgggcgcgtgtatccggtacgggcacccgggtggttgtacacgaccgggtgatctggcggcggtgggccccacgggagggggattcgtggcccaggatcgctctccgcgcgctgactaggactccgaccgggcacgccggtcaccggtcaccggcctgacccggtaaagtaaaccccagctgcctctttgttgaatcaaccccttcactatctcttaactacaaaaacattctgttcttcaagtggatgctggttggtaacttggtacctattcccatgatccaatctggtttatagctttggcacacgttgaaaggtagagtcttgtatgggttttaagcaatatacttgtcatttataatactatcactttataatagttgggattatatagaccctaaatattaatccaccaaaatattttttttactctactattattttctccgtctcatgaaagaaaaaagttattttgtttctatatgactaaactaagaaatgatgtttagcttaatatcgatgacttttcttttcctttattacatacgcagtattagcaaatttgttagttgtctggatggcaagtctaagagcccactgttagtaaacattgtacatgtttaatgttgttttgctgaagtgttaaactaaacaccgcttgaatttaggtgctagatgaaaagaaatccaactttctaagaggctacaaatttattatttgtgtttgttacgcatatgaagaaaaactctcgttcatttatagctaggagtataaaaatacagcatgtcttgctacaattgtttttctatgaaagcatgtgaataactcatgtgaggctaatggaggcatcatgggccaagcatggctaacacccacgcggctataactataagcaatgcaagtgagagacccatttagagaggaggactaaaatgaaatttgattaatagtacaggggtgtttgtgcaagaaggaaagaggaaatctttttcccctttgtggtagcgttgccaatggcaaactccacttgtcggatctctctctctctctctctctccctctctctctcgcccatgtaccatctccatggacgacctcgccgccgcctcccctcctcacccgccgccgccgccgccggaatcccacgtgcctccgcccccgcagacgccggagaaggtgagctcgcctcgacccccctgtttctttttttcttttctgtttttcgtaatctcctctgttttcccccctttcagttcgtgaaaatttctgttttttatagttctttttggcgacttgattcgaggaaaaaggtgcggttttttttttatattccgagctgattttgcagtgttttgttcttgcgtgcgcgtgcgactgtttgtaattggtaaagttgtttggaacaacatccatccgtgtgttagctgcttcagttcttggtcagtaaggtatagataaaattgttcgattaatactgcaatatatggtcgaattgcatagtaatatcagctaattcgtagtataatcatgtgcttgatcttaattttgtactcgttacactccaatccttcacgtaatttgcatctttctgtggtgattgattagttaggcaccgtgacaacctttttggattaagcgagataattacaaaaaaaaccgattttttgatcgggtcttatggatagtaatagcacgctcattagctcaatttctacatgaagtttgggtagccagagcaagagagaagtccaattgtttactcaactctctaaaagttcttctgctcttgtgtactagtactattttgcaagcagctttcgagtactaggtaataggttggtgctgattctaagtagaaatctctcatggggttttctgaagttgctctctggtgctactctgtagacagaaatggcttgtgtagtttgctaccgtgatgttgcttgatttgtgctcttgcttctgcacagaagcacaaatacatttcaaatgggaatgcttatcctctagattctaactcagcttggactgatctcaaacatgaagtctgacacttgcacccacagagcagctactaggtctgagaaccatatgctgtaacactgttgggattaccaaacttcgttgctgtactgtagtcatgggaaactgatgtatgcaaatgatgtgctataaaaaggatccgtcgcttgcaacaaaaacaatagtcatgcccttaatcatccttgcaatcacccagatcaacatggagaatttatgccaccactgaaatccagccatgccttcctttgaaacaaattaatcaattcttttaggccatttgaactatagcaagctccttatgctaaccaactcttaccaaataagatgatccacgagagattgcatgcttagttgccaagaatttttgcccatatgcaagtaaggcatctattatagtattctgaagagaaggccaaaagtagccatcatttttgcttcgaggcctcaaaattacgacattattcaggggggggggaagagaaatatctatgttagtaatcacgacgagtccatattataactgcaattgatcaatataattgtatacaaaatacaattgcatttatggtaatataagcaatagctgtatattaaatgcagtcacttccaaatcttatcttatcttatatagtggaagtaacaagctttcttacacgagaacacgccacatcatcaaaaacatatcaaccattgaataaagagtttagataaataatagccattggatcaaaaagttacatatgcactaaaaaatcaacaatttgataaacatatgggaatttctggaggtttctagtgcctcctcttagacacatggtacaaagagagagagggcaaagataatgaagaaaacaaaaaccaagaagcttatagtgatttctcatatagtacgatttagttaaatctatagttagctagaccaagggatactttgtaaataaattaactcatgctaagaccttctgtaactaatagatcttatacagaatcaaaagtagcgcaacgcgcgactacgtggcttgtaagcattaatgtagctttgcgcaaaaaaacgtgggaagttcagctagttcaagataaaaattgcttgtagtgaatacggtgtcgtaaattcatattaagtgctgtttttcccaatgtgtagataaagtgcttgaatttgtataccatattgtttgatctagttttctaaaaaaaaatgcttgttgcttctgcaatgcaacttgttttactgagtcattatgtgatcgtcaggattcatgtgaggatacaggagacatgaggatcagtgaagaaaagccatgcacagatcaggagttagatgctgatcagatgaatagttctagctttaatagttccagcgagtgtgagaatcaaacacctagcaatgatgaaatgactggatcagagtccaaatctgaggcagctcaaacagagggtggtggatcgagtgaagagaaggtcctgaagaagccagacaagatcctgccttgtcctcgttgcaacagcatggatacaaagttctgctactacaacaactacaacattaaccagccaagacatttttgcaagagttgtcagagatattggacggcaggtggaagcatgaggaacctccctgttggtgctggtaggcgcaagagtaagagctccactgcaaattaccgcagtatattaatcacgggcagcaatctagctgctcctgctggagatgctcccctctatcaactctctataaaaggagatcaaacagcaacggcagttaaatttgcacctgattccccactctgtaattccatggcctctgtgctgaaaattggagagcagagtaagaatgccaagcctacctcaacagcacaacccagaaatggagaaacccagacctgcccggcttcaggaacaacttcagatagtccccggaatgaaccagttaatggagcagttagtgggcatcaaaatggaattgttgggcatagtggagtccctcccatgcatcccataccatgcttccctggtcctccttttgtgtacccatggagtccagcatggaatggcattcctgccatggcaccaccggtatgcacagcaccagctgaaccagcaaattcttcagacaatggaagcacagctagtgttcagtggagcatgccaccagtgatgccggtaccaggatactttccggtaattccatcttcagtttggcccttcatttctccctggccaaatggtgcatggagctcgccatggattcaacctaattgcagcgtgtcagcttcatctcctacaagcactagtacatgttcagacaacggctctcctgtcctaggaaagcactccagggactccaaaccgcaaggagatgacaaggcagagaaaaacttgtggattccgaaaacgcttcggatcgatgatcctgacgaagctgcaaagagctcaatctggacaacccttggcattgaacctggtgaccgtagcatgttcagatcattccagtcgaaacctgaaagcagggagcagatatccggtgctgcacgagtcctgcaggcgaatccagcagctctatctcgatctcaatctttccaggagacaacgtgatgtatattgaagaaatcgtgtgacaattgtagaacatgttactactataatttaagcaagtgctacagcctgaaggatgattggcgatgtaggcgctgctgcaaacatggaggcagcgtgatctgtactattgaaacctgaagagtactattcttgacatttttctataatttgcctgtggagcatgcaccagtctactgggttcatgatcaggctgtcagcatatgttttgttgtacaataataataattgttaatagctttgcctaaaggatactgatagtattctgctgatccttcagctctgtgatcaatggcccatatatttacctgacaagtttcagaaaggaaaaaaaaaaagatctgctgcctgacaagaggttcaactccgaagaaatggttagcatttttgtactgcgtctgcgtgatgtttacttgttgctttctttggttctctaatgatcccttagttacctctatgatgacctgcattagttgaagtacctctgtccttttgttcggctgtgttgcctttatactagcatctgtgtagaatgtagaccgaagtctgaagctttcctttttgattcagtacgcttattgtggatgtgacaactgaccagttttcatttccattgattgctttgttactgaatgttaattgggcacccttgagcttagactagcatgcattcatcagtcatcagtgcactcaaaaagtttaacctacttgttggaaaacagagtactcctagtagaaaggaatctgatatgataacttgataattgtatatttaatcctgtgatatatactaactttgggggtggtgttaacacaactaacgcaagggaataacaaattaaatagtctatgatccatgtgtgggcaggcaggggatgcatcatatgcatgggtcaagctcactgttttcttggtggctgcagtcgcaagccgatgttaggcaggcagcaggtatgcatcctaacctagtcgcagaagcaagcatccattcatgattcattcaaagtatgctccaattaaactggttaaaagattgtaatagcattctgtaagtaggatacttaaaagtgtagtggtttgactgatgcttgctgctgccagagttgggcatagaaaacacatactagtacattcgatcgatgaatttttggtactaggctagtagctaagctgggctagaattaagaaaagagagggagagttttaagtggagtggagtacttggtagtagaaaaacgaatgacacgcggtagcctccttttggttggtagaggtggtgagctcgccacttgcgaccagatcgaccgaccgatcaaccgctttagttttttttatacatatatataaaagctaatttctctctcacacacggttatatatacgacgcatgagttaccacatgaaatgattttatcaatatatagctatgcttggtaattcaggttcatgcatatctgtacattaatatattcaaacggccgggtgttattcttcagtgaataaaacacaaatattaggaaatggtaaggtttcgaacccagatcggttaatctatcatctgtgaagctagctggaagacctttgttttttacagcttcaacttttgttttgttttttctctcttcccttagcatagactagtctggctgattgcgtcgtgtaacgaaatattttttttcttctaatatattgacgtgcaatattttgcgtgtttgtgaaaaaaaagctggaagacatttggacgcttctcactttagtgaataatgatctacattactaatcgtactagtagtgcattcatgcatgcgtgcgtcaaacaaaaattacatgcatgagggcgcacgcaaattaatttgcttggcgatcgagacggctatatatataattgtaaaatatacatatataaaatattctgatataaagatcgagaacgggatacatacaagtacacacagagatcgaccagctagatgaaaaacgaatatagtaattaatcccctctctctctatatatatatgtatggccacagaagtacacatgcattatctgtattataattaactagttcgtcgctgcaattgcattgtatagtatatacttgtactatcgtgctgcttggtcgctagaatgacgatcaatggatcgttcatatatatgcaggctcgtcgcagtgacaattgccatgcgtacgtgcagcattcatcatctgctagctcgatcgatcgcgtaattaaccggccggcacctgcaaagcatgcgttgcttgcatatcgatctgatccaacggacaaggggtacctaaatcttgctgacacaatacgtacgttgccatcgatcaatcaatcgacgaatcgctcaactcgatcaagacgacctcgtgacctgtcatatatacatagatgatgcaacgccttgttaattaattgactatagatcgattaattaattgttctgtaagtaagtaattaattgacagggtatatagctagttagcttagtgacgtgcattgtgatgacagaatcgaattagaggagttggagctagctagcgatcgatcagggctgagactgaccaggaagtagctctcgcccatctggagagaatggaggaggatgccgtactcgttggctggaagaagagcacccgttgaatgcaccagcatcacgtcctgcccaaacattgatctcagatcgatcggtccccttggcacctccgtcgccactccgttgatgaacaccgtcatcgtcgctgcacatatcatattcatccatcatttttctttcccaattcacattacctacatatctaatgtcacttcggacaaggactacttctcaattattgcaaaagtactactcctactacaactggagtgatatatacagtgtacatatatatgatcgatcgatcaataggtggctttacttgatgattaaccaataataagtagtactaccattgatcggctggccggtggttagaaattcagtgtcctagctagtatcagccctatgtctaaattatatgtatactcatgcatatctacaaatccatgacaaaaacatgcatgcatctgcataattaagtacatatattgtattgcgccattcacgcatgcaacaattcaactactagtattaattgcattatatatactccatatgcatataatgtagtacgattatatatgcatgcatggataaattggcagtattagtttatttagtatgcatgcatgaagcatatttgctactactaagataaaagaacaagacaaagctttgcccttaattctcttatttcagtgtagtacactagctagtactgcgtaattgatcgttcccaatctcaattaccgcaaaaatacaagtgcaaagtctcaaagacattcaacgcggaagatcaaaataaggacaaattaaaattaaggaagacaaaatatgagtttctggaagatgaaacgatcgatcaagtgtatatatgcagtaatatgatcgtatgtacatgtcccttaatactctagaagagatcgatcgaagcaaagagagactgaaaggaattttctttctctgaatttgtactaggagagcaagaattattagcaccaaacggaacaactaattcccctcatcactgcatctgcatgcgtaattaaacatgtatatatatgctaaaaactagctatatatgtgcatgtttagttagagagaaattaaaggcaaattaatcaaagcaccgacgaatggaaattggggggacatgcatcatgtatgaagggctcaccaggttgacacgagtagtagagctgctgctgctgatgctgaccggcggccgccgacgacgacgagccgccgccgccgtccatgtaccccatctgcctcgagatggcgaacaggtcgtcgccgccgcccccgtagtccacgtcccccatcatcatccccaccgacggcggcgaggacggccacgatgaggacgacgaggagctgtacccggcggcgccgtgcgcgaacatcccgagcgacgaagccggcgagccggcgtggccaggcgcgaggccaccggacgaagcagtcggaggagatcccgacgaggcggcggccgcggccgcctgcgcctgcgcctgcagctggcgctggcggcggcgggagcgcgagcggcggttctggaaccagtagaagacgttggcgtcgccgacggcgccgaagcgctcgagcagcttgcggatgcggacggtctcgtccttgggcgggttcaccatgccgctgttgaagatggactccaggatgagtatctgctccggcttcggcgtccaccgcgacctcaccggctcccccgccgccgccgccgcatgcctgtccgggctgtggccgccgtccatcgccactagctagctgccttgttcggtgtcgaacacctagagctcgctagctcgagagagatagagagataggtttggtcaattgatgtgtgcttaattcgcttaattggcttgctgcgagagagtgagatcgccctacttataggagaagaagcagctagtagcttagctaagctttgatagttgtgatgagtgagatggaatctaagtaaatttcactagtgatgagaatatgaatgaacgaatggcacacatgcaaggacgacactagtgctgctagagaatctttaccgccgctcttagtattatatttgcctccgaggctctccgatcaacttgtgttggttaaacatgcatgcattgctgtataaatttatatattattaacatgttctagcttgtcactctttactttttggatggaactgaaaatggtgcctgtcattttcaggagagtccatggaagtgacaattaatatgcatgagaagtgtgttgttgttaattattagttggagtacatgatgtactgtatatgtcattttcaggatagtcctccatatgggactataagaatatgaagagtgtgtgttgctgctaattattatttgttggaatacaaatatacttagttgaactccatatatatacacatgtaccatgaattgtgacttgtgagtatgaaagcaatgtatgcccttaatcatgcgtgtggctgcagagatatatttaggatgtgtgtgatgtgttgatttggctttggtatcggatatataattgaaggcacgtgtacattaatcggaatatccctagtatttggacctaagggatatgagtgagtccgtacatgtacggtgagtatttgttgactcgctagtttaaccacatcctttcaatttttgtgaaaaggtgcattttttgttctgaaatggagttgtggaacagtctgaaacccgcttcatgtcgctagttcattatgtgatagcactttagtccctccgctttctttttaggtgaaattgaaaccgtttgatggactctagcttcagaaaagatgaagctggagctgaagttttaccaatcagacataaatgaaaccgcccccagagtagtacttggtgatggagcggtgtttaaaacctgccgttgtctggtatgtatatcttatgtggcatgtgcaggcacatattgataaagatatgatatgtacaatgccttttttttctaagataatagaggttttattaagactcagtcaattacactaagatgatacaaccgcactgaatcctcccctggtctctgcatatgatgcatacagccaaatgaaccaaaacaccctttccaagcataaaagaacatgtagattaatgactatcaattatccgtaaactagatcgccacccatattcatatgtataaaatctcttgtgccacctgatccaactatcatgatgccaccataatagtattgaaatcccggtttatagaggatagccacgtagtcagcggataaacaatgtaataacatgtaaatgagaagacatcatcttgttatatataaaaaaacacaccaggtacaatggcgcttttgtgttttagtagcaggcagctagttagatcatccctgcttccgtgaggagagtgagggggagctacagacaatggcaaggcgaaagaagaaggagaagggagcgtggtggaaacaaaaagcggctaaggcacatgcatgtggccttggaacggggaacacatgtgccccacggtttggccccctgcattgaccctttctttcctctctccctcccctgccggccgccggcatctaccttaccccttacccttagctgcattgatctcgacgtccgggtttgcttcggtccgcgtgtgatggatcaggcgagcccggagaaatttctcctgcatatatatgctgccgctttaattttctcctgccagctcgatatatcgatcgatctcagcttggttgcttgctgctgctcatcatcggcacggcagagcatttgattgggccatggatcggttttgcttggctgtttgtgacccaagctaatctatagctgcaatatttctccatcagctgcatgactgccctgcggccgcgagcatcacctgccctgcccttggcgccttccgccggccggccgtcgtgtctgctttgcggtgcggtgaacagacagcctccactgcatatgctcctcgatcaaggaatcactccactccgatccccacttcatgtcttcatgcatgcatccatccatccatccatcagagacacacacacacaccatagctatagccgcctgcggcctagctacatccatcgtcttggcttgcttgctccctgacacctcctctcgacccttccttccttccattctttactctacttaattctttcatccatgtaatcggataccctgccctgcccatgtcgatcctcaccacgtacgtgtcttcaccaagacacctacataataatatgagtaattctacggttctcgaagaggtaccaaaaatttaatgtaaaatttggtatctcattgtacctcatagtacttaggtgtaaagaggtatcgaatttacaatagaaaaatggtacctcctcaagaacgataaaattgctctaataatatacttatcatatactatgaaaacgtacgatagatagatagatgcaccttaagcaagtgtcaacctaaaccatgaccattaaattaaatactaatatacacattgataggcagtctaaagttagcagctgctgcccgctgccacatcacatccatccggatcgatttcggcgctggacaaaccgtcagtggccggccgaaaaaaggaattcccatctccttcacctccagcttcttcagctactactcatgttaccaaaccgaactaaaaccaatcaggggaacctgcctaacacctccactttaatctgcctccctccctccagtccccagtccttgtttcttaattactgaaaactaacactgcaacttactgcttccgctcttcgtaaatatatacacaatataaacatttttaattcatggaaatctatgcatttccagccaatcatgtgcttaattataagagaaattcaaacaattcagaaattaaggtttgaccatcaagttaactaaaaggaaattgttttccccaatttaaaaactttgctaaataacatagaatattgtatttatgaatggagggagtattcatttactacatgcacagcttcattaggagatattttttttagaaacacaatacaatcgcatacgctcacaacgtactcacactgcactagtagttaaaaaggccacacatttcattttggatggtttaggccaaacttatgacaacttttgagaaaaaatgtagtgcaaatctcatatatagtggaaatctggaaactatcattggatcttaaaaatgaacgcataggatttgtccatgtcacccagagcccaaaaaaaattttactcatggttaaattcaggagttaaatttttactctgggtaatgtgggcaaatcttttacaagcaatagtgcaatagaaaatcaattagaacctgaagaagctgtccattttgatatccaatggtaatttttaggtttttactacatatgtagtttgcactacatattttcctcttttggtatgataatacattagaatttttttaataataaaaactatatgcaccttctgcttctactgttagacacagggtcaatatatatattggcatttgcatacatcgtttatacaataaaaatattgtgtgcacagaaacgttatgtcgctagcgccaacttgtttctttaaaaaaaaatctcttgagacgggctaataaatttagcaatatatcgtataccaggttcatccgtgcaaagaaacccacaatgtttttctaaaaagaaatcaagatgtgacatgcagtgccatatttaatgtctaataattgttgtatcgcaagaggctactctaatttctgatatattttgagcttgtcttcctggctagttgctgacagagagaaccgttacacatcacctctgcttttctgccgtgcaaaagcccgccacggttgctattaatcaactagctaggctttaatttgggcaaatgcatcgcaccatctctatacaatttgtcggcttaatatttaacaaactagcccaagaacccgctctgctagatttgacaatataacgaatgtttcttgaattatttagaatacgttcacagtacatgtacatcagttgtacccacccatgaatatgtcttggtaacacgagcttaatagattgatactcacaaaatacctattgagagtgtgatcgtcactaactgtataattatattgtctcgaggtccatcttgttccctgtcgttaccagctagctaaaaacagagcaagaggataacattgtttggaaattgcacttgcaggacatgcctatacatgtagagtaaaattggtcacagctattacaatcattgcccattttcgtaataaaatttgtgaacaaaaacagattgcaaacaccgttgcaaaaatgaaataaatatatatataatcaccgccctctctttttgtccattacaagagtgtgaaatgactggactgcctcatttattctaggaagagagcaataattctggcccatggtaggccgattttaacaaattagtctgtgttcttccccttctttctcaactcaagctcttccgttttcagtgtgcatgtttttcaaagtactaaacggtatatttttttcttttttacaaaagcattctattggaaagttgctttaaaaaaatcatattaatccattttaagttttttagctaatacttaattaatcttgctctaattgtttgctttgtttttcgtgtcaagagacaaggttggaaaccttacctcccgaacttagccttaagctgcaaggacattcctggtgaagagttttattttttggttttcaagaattccacacaatctaaagaggtttgaaatggtgaatgaaacaaacgtcttcaatgtacggtttcatttgctagcatttaaatattaaatggtgtgaaactatttggttacaataagttttttttttcgttttcaagattatgataaaatgatttagtcccaatgaagtttcattctattactaaggcataggtaagtgtgtaaaccgagtttcatctttcttctctctcttcataagtttcttaatatgttactcctccgtcccaaaatataatagtaacttgtaggttgctatattttcactagtacaataacgatttttccatgcggtcgaagagtttgcgaaaatccgattttttcgtgcggtgacacacccgcacgaggaaataaaaaatcgaaacaaaaaaaagaaaatcaaacgccaccctggaaccctaatccagccgccaccgctggcctgccgccatcgtccttgtggtcgccggtgacggatctagacgcccgaggctaggagaccgctgccgccaccaccgtcgtcaccgccctgcccgagacccgccgccgtcgtccctgcggtggtcggcgacggatccgccctccccacggtggctggcgacggatccgctccgcccgccaccaccttagccgatgccgccgccgctctcaccaatgccaccgccaccaccgccctagccgaggccgccgccgtcaccgggagtgggtagagggggagggggagatgggaggagtgggaggagagatgggaggatgagagggaaagggatagggagagagagtgggagtcagggtttacgttaccgccggtaaccgcacggttaccgggcttaccgcaggggtacggtaatagaaataccgcgataacctccttaaattcaaataaatttaaaaaataatttaaatttttgataaattttgtacggttttgtactgtttttctcggctaccgcagttactgtgcttaccgccggggcgctgtaaccccgggcccggcggtttgggaaaccttggtgggagtggccaagtgggaggatgggaggagattgagtggcgccgggagataaaagggtgggtgagctatttttgtgtgcgggtcactttataggtccgcacgcaaaaataagtctattttcacgtgcaaatctgttaagaggtcctcctatgaaaatttatttttctatacggtcattttaaagagccgcatgcgaaaatggagcatgatttttgcagacgcgaccatttacggtccgtctgcaatctaaagtgagttctgtacaggaaaatcgtttctgtactagtgtttggatggaggtggtattaatttagcctatgtggtattttatttaatgagattgaaattcttgtgaaacctgcattgggaatgatttaacctggcctagctagagaaatgcattccctctgtacttaaatatataaaattgttagattttattcaatctttggtgtgcactgggaatgaaaattttcagaataaaacgataatatctaacaaaatgatataattttttactttctctgttttttacgatacaatattacaactcttaataattgtttaactgtgacgtggtaccgaccaaaatcgctcgacgccacaagtgcataactgttggagtgttggacttgcgccttacatgaccgagatgaaataattcacgagtgcaggaggccggagcattaaaccacatgtgtgtgtacacttagctttaattgtcggtgtgttaggtaatggagtatcctttaagctgccacttgcattcttaatgaactttaggaggcatgatgatgcttaactttaatccaggataatattttggtggctagcggattaatgagtgtctcgtactaaacttaactgcacacatgcagtgtcacatcgtgtatatacacagttacgcacacactcctaatcctaaatattgcggtggaaaatgaccggtgcaagtatatcaaacaatgatctatctcgatcgtgtgcactgtgtatatagctagctaattattagggaaactattttaatcacttgaggagatatccactcgttgtttgcatgtcacttaaatggtcatgaaaaaattgaaaaaatttgagaagaagtattaccatgtgatatattactctacaaatatacaagttcaaatttaacttctatatctcgtaaaaaaacaattttgactatgagaatacgttaactagctatagtttaattttttttcgatgcgagatgtagaagttaaatttgaacttgcatgtttgtagagtgatatatcacatgttaatatattttcttaaatttttttgagtttttttataaccatttgagtaacattcaaacaatgagggggcatctcctcgagggatcaaaatccactcccctaataattatggtgtagctgagttgctggaacgaataatccgtactggcacacagtggcagatcaagaatttgatcacgttgggctttaggccctgtttggttcacatggactaaaatttagtccctgtcacatcggatgtttgaacgctaatttagagtattaaacatagagaaaccattgacagatagatagtgcctggaccttcttttatacctcaagggttaccacatgggcccaacaacctaacttagtggagaagtatgacaatcttttcattcaatgcatgtcttattccttgactcggaagccatatccacgagcgtcacagcatgggtcccatcaaatcacgctacctgacacgggggatgcccgtgtcgctcgccatttaacgggtgaagacttctgggctgatgttacatcagaaaacgggaaccttgctttgatcagagaggacggaccgactctggctgggatgagaggatgagaacctctcaccatcatgatttgatgggacatggcaggctgcacgccacctgatacacgcggtcagtgagcaggcacactaacccggtcccatccgtcattcgaccggtcacacaccggttaggcgtgcagcacatcacattaaatgcggcatggcacgcccgctcaatccgccttaaatgctgttaggtgggcgttggggctgcccacctaatcccgtacgcgtggcgtgctgtggagggggtcggggcagcccgacctccagccatggagggggcggccgaccctaccctgggcccgacccccttcaggagagtgccacgtgagtatagggggcagcctcctcatccattaagtcttcataccctcgggcgaggagggggcagctgccactccaccctaggcccgaccctcatcgagggagtgccacgtgggtatagggggcagcctcctcccttaagtcttaataccctcgggcgaggagagggcagccgccactccaccctaggcccgaccctcctcgagggagtgccacgtgggtttggggcggcctcctccctccaaacatgatatccctgggcctatatcaccgatacaactctatttaaattcgtagtactagaattaaaaaaacacaaatattaaaagatctaatatcaaataaatagaatagatgagagacttcaaacccaggccggctagcccaccatccagtggagctagccggaagacccctgagcgtttctcgtagaatatgtcacatctcatattagatttatttattttgggatatagtgaatatttaacaatacatattcaagtgagtttcattaggccttgtttagttcccaaaacaaagacttttcacccatcacatcgaatatttgaagacatgcatggagtattaaatgtgtaaaaaaaccaattacacagtttgcgtgtaaattgcgagacgaatcttttaagcctaattgcgccatgatttgacaatgtggtgctacaataaacatttgctaatgatggattaattaggtttaatgaatttgtcttatagtttcctggcggaatctgcaatttgttttgttattagaatacgtctaatactttaaatgtatgtctgtctgatgtgataaacaaaccctaatttttttccccaactaaacaaggccttatttggaagacgttgcaaacacagaatctgtcgtggtacagaaatctggatcaggagatggaagtagtagtccctctgtcccattttaagttttaactgtaactaactataagtttctgtatccaacgtttgacctttcgccttatttaaaaagtttatgaaagaactttaaaaattaagtcacgcataaagtactattcatattttatcatccaatagcaataaaaatagtaatcataaaaaataaataaataagacggatggtcaaacgttagcactgaaacccatagcagcgtttattatgggacagagggaatagaagtgtagaacagttggacagcaatgggtaacggtaaataggggttaattagttggcgacatatatgatgctgcagcctcaactaacagacgacagatatagattcccatggatggatagatggatggacagttccctgtacacacttgtgcagtagtagagttgatttgtgtaggaggtgatggcgcgaagacaacgggaagtcgcgggcggatcgatcagatggagctagtgataagcactggacaagcatgcttgctggatccaggatccatggatatggcaacgggccaacacagcacgagctcgctgtcgcgtccagatgtgcacagacgacgccacacccttgtatccataatgcgtgcgtgaccctgatctctctccggaccatggattttcaagccgttaacacaacggaaggcactagcgtgttcaggtaagttaggcagagcagaggacgctctcgtgtcgctcggccccagagtggcacggccagcgatcagcttgttgtacgggtaaatggtagaaacgttaaaaatgaaaaaaaaaaaatggatcagatgaagtcggtctgatcgatcggattgagcacgtcggtctaaccgtctcctgttgctagtccaatctactacaagtcatcaaaagcaccaccgaccgaactgatagcccgatacacatcggtctgaacgttttcgggtctcagaaaaacacaaattgaagagatcgtgctgagatatcttaccatgacctgcaacaaaacagcttgagtcaatctataataaattaaatgcgatggacaagccccaaagctggtacaccgcaccaaaagatgtgggccgcatagagtacaacgacagcccttctcagatagtcgaggagttcccggagcaaaccacgtggaatgtgggtgcatcttcctccccggataaggacacacgtctagcccaagaaaggatgatccacttgattcagccaactataccgtaaatacagaacatgtggttgttcctggatagactatactttggagctattctcgcaaaaagcaccgtgttagttttcggatcgtcaaccgaccacttccacaccccatgaacaagccacatccgaacatccctggctcaccgtctaggttctcgggtgttttagccctatcgtggttccgtggttatggtagcgaggaggcgtgtggaccttcccgctacgtggtaggttagtgcctttcccgggaagacgttggcccactgactgcacaatacgacacccttccttcggaacaaacaaaactggtcaaataagtttctccttggctaggatgctgacaactatggctctagacaacaagatctacattacgtatattgaggcggcacgatccgacaaactctacgggcatcgcctctccacctctctccccctctccctctccacgcgctacaatgataagttgtactacggattggacgagggggcttagtataacaaagatctagtgacaaggagcttgtggcttagatgaagcatggcggtgagcgaggatggggcaaggagctcaatgatagagtcgtgctagctgcgagctaattagatctgtctagatttgttgatctttctagtcattgtttgtggttataacgatgacaatataatccccagcgccacttcatcacgtcggctaccgtttcttcgtgtctctcctaaatccaagacatatgcgagatgatgtccttcccaaccaacgcggctcgctgccatggcttcacccacggatggtctcatcctgacaagacacccgtgctctctgaaggacacgaggagccttgtaagggaaaaaaaactcagttgaattggagccataggtctggtttagtttccaacttttcgatcacatcaaaacttttctacacgcacaaacttctaactttttcgtcacatcgttctaatttcaatcaaacattcaattttagcgtgaactaaacacacctataatccgatatggcgagctagagccacttgctacttcggtgcactaatgcactatggatagcctcaggatggatgcgttgaggagtaaatcaggcggaactagaggacgaaatgacaatatatagctagcaaggaagcaaggtagggaatcaaatcaaaccatcaatctcagtggaaatctcctagcagaagcggtctaatggcagaggaggaggtacgtacaacaccctggtggccagggcaccggttgctccccaaaaggccagcacactagctgctcctggtgacccagctgctactgaaaatttatttatttgttagcgagagagatctaacgccggaggtgagacaaggaacctgagggccgacttggtttttgttttgctccctgcgagacgacgcagcaagaaatgctcatcagtgtagagagcagagacaaaacaaggtgacccctcattgtttttgctagtgtacgcgcgtggcggggcatcctatccttcgtcctgtgcactgcttttgcgtgtgactatgaacagtctagacttgtactcattgataatgtacagcttatcatcatatctgcatgctcaggtagtcagcaaatgctgcttggcctaatccgtgttgtgcccatatgctatcagctggagtagctccccctttttggccattaaaacgtaggtacgtgagccctatatacctacttaggcctctttgaattggagaaaaaacataaaaattttggaggatttcaatcctatagaaaaatttcctatgaagccctttgaaacaaaggatcaaatcctatccaatcctttgaaattcctatggaatggacaatcctatagagatttttgaggaaatttagcaagagcttcaacctcttgataactttcctttgagtctatctctctcatccaattcctacgtttttcctgttgttcaatcaaacggttattcatgtgtttttcctacgttttgcaatcatctgttttacacttacattcctatcaaaatcctacgtttttcttattcctacgttttctcaatcttgcgattcaaaggggcccttactatctactagtactcactctatcctttaaaccatagtgcaaaaaaccggaccggtgagtaacccggacgatgcctcggttcaccggtccgacggtctgaccggtgaaccgccggttgaaccgcggctcaataagttattatatacaacatgtatatctctaaaacaaaacgaagcaaaggtgagatggttactcactctcaatgcgcagacccaggttcgaatccccatcccaacacccttttctatccattttgtcaaaaaaaaaaaaaacagccacgtgggcctgtagggcatggactgggccttaacgtggcccattaaactcctttgtccggtccaaccgactcctttgtccggtccaactgagccggtttaatggccggttaagtcaaaaaccgcccggttcagccggttcaatccgggtcgaatgcatgtccggtctttcagttgaaccaagccgtggagacctctggttccggtttttttgatcgaaccgtcggcccggtccggttttttccactatgctttaaatacaaaattcaacttatagagttttaaaatttattctaaaataaatcaatttctactaacttactacctaccaccaatctgcaaatcaaaaaaaattattaattcaatatcttttacctatccattaacaaatataatttcttcattaattaagggcattgtgatattttatttctctctttaaatttttcttgggaagttaggatttaagtgtttatgagacggagggggcacttcttttttttttgtggtagcaggtgtacaatcgatcattgttcctcagaaattcaatgcatgtttgtaagttaaacaatatagtgacaatggtacagacagacagagagacaacgtccagccgggtgtttggaacaaggatagatatgtggcaagcatgcaatgcattagctcacaagctgtccatgttattcctggaacgatcaaattcatgcatgcatatgcagcagcgctttacatctcatgaaaaagaagagagaaaagagagatgcttcagcatcagacagagagagacaggtttgtgagatgaacatactcctatatggagtagctagcttgccgtgagctagctaccgatcgaggccgatcgagatagatagatagctgtgtcgcggtgtcgcttggccgcttcatcatccactcctgacgccacgcacccatccatgtgctctgcttctctcttgccgtcggcgcggatacctatcgctgttaaacacttgcattgacatcgatcgatcttaattcgttggtttcctgcataattatattaaaagtgagcaaatgaagaacaagcttagctaggcagggtgcagttcagctgtgttgcagggccggaagttaagatctaaaagcaggaaaagaatggactgcttgtcttgtctgctttctcgctgcctgtgagcttgtgaccacagtccacaggtagcaagcggtaccgttcattctcgtcgtagaaaataataaaaaaatgtcagttttgatcggttgtcctacgtaaaggattagccgctattcaaaatttaaatttaaaaacataatattggagttgattttaagatatactcatcctatttttattagcatttaagttgctaaagatctatgcataaaaattatactcataaattattttttaataactaataaactatttcgtttataattgacccatagtcaaccgatgaacccttagacctccgttgaactagtacaattttaatcactagttttgatgaggatatcactcttttggatacacatgttactcctcaagttgttttgcaatgtccaatcagtagagctcacgcctgacaattaatttacaggtgagcctgttcctaagtacttctttatgtacttttgagaatagattgctatctaatgatttaataatggttagaaactatgaagaaaaccatagaacacttggagagaggttaggagatggataaggtcatcatggacgttcaagacaagatggaaatccaactcatataaagttcgagtccacttcgggctccaggagcagtccacgataaattcgttgcccatgttgcattcggactccgatttcgacgttctacatatgtatgtaaagctaacgaggccacatttccaatagatctagtcccatgttaaaactccatccaagtcaacggaatcttcgaaacaagaaagcgttcagaatctgtccgggtgttgcgtcaccatctttgggtccattgggccatgtatcgtgtcggagtctaataaggacgcattcagggctctaaggtgaccctagaatctatatattcagtagccgtcattgagttagggttgtgttttgcttaaattatttctgccttcgtagtttcgtcaatagatcagtttgtgaaaccccaactttgagttcttgaataatcattcatctacaattgattcacacacagggattagccttctcgatgagatcaatcgagtttcgccatggttgataataagaggagacgtggtgctgcaattgtagggttcggatcgtgtgtgtcaaattttcaccaaatcaatatttatcttcacctgatcaaagatcgggcatcccgttgttatcaagttttatgtttttaagaacccaataaaattatggcactttttcaaatgagcaattttacggtactttaggatgtaccattttttctattataaaatttagtacatcttggtatctaggtattaaatttttagtacctcctcaacaattgtaaatttgctcttttcaatatgatatacttataatggcataaatcaaatttaccttattgcgttggctttggtatgatttcttttcagccttcgatttggcagagtagcaaggagctggataagaaaggaacgaacagacggtgagaggggaaaaaaaagcactgaagcagaagcatggagcagaccgccaccggcagagggtagtaaggctaaagctatttagattaggctctcctctcctctcctcttcttctttcttggcatgtctccaaactgaggaacagcccgaggtccacaaccacctgcatgcgatgcgcacgacgtcgtttccttgttttgtttttcttcgattctctcacacactattagtattatagctagccctaggtctcatggagaattttttgttcttaattaagcaaaagcaaattctttacgagtatctgtcactcgcacgagtcgaatcgatctccccttgccaattattcgttcgacctcacctttacctgtttttgttttcagccgtcttgttatatactccctccgtttcaaaaatgtttgacaccgttaatttttagtacgtgtttgaccattcgtcttatttaaaaaaattaaataattatttattcttttcatatcatttgattcattgttaaatatactttcatgtacacatatagttttacatatttcataattttttaataagacaaacagtcaaacgtgtactaaaaagtcaatgttgtcaaacattttgaaacggagggagtatattctactactccctccatcccaaaatgtttgatgctgttgacttcttttaaaatgtttgaccgttcatcttattcaaaaaatttaagtaattattaattcttttcctattatttgatttattgttaaatatacttttatgtatacatatagttttacacatttcacaaaatttgttgaataagacaaatggtcaaatatgttaaaaaaagtcaacggcgttaaatatttagagaaggagggagtatatgtatgtatattgctcctcaagcatgcagcagctaatgcgtcggtaacacgacaattcaaaataaattattgtttgtggataaaaagtggtgccggggaaaagcataattgtcgggcagcgtggctcatctcatactagttactccctccttgcacaaatgtataatgttggttagttcgtttttgagctaaccaatgtcaaataaaaaaatatggagggagtactttgcaagtttggagtttcatcctgtgtctggccgtatgtgcgcgtggcgtagtcagcgggggcttaatttggccgatgtaattttcaactgcgggttggttaatttcaactttgtatacttggccatttttatttagccttgagggcaccggtaaaaatgttaaattatgtattgtacacttttaattatgtagccacttaattgaaacaggtcatcgatcaattaggtactgggcctcgaatagttaacgggcctgttttcgtctgaaactgggccgtgacgtcattccactccgggattaagtccacttggtgtcccttatttttccgtcgagtttaaatcgcattcctaaattgcaatacgagaaatcttgagccaccaacttataaaaccacgttgaattagatcccatagcaatatggatggctagtttcgttgatgtacatcctaatcaacaagaaaaaaaaaaaagaaatatgtgtgggcccacatgtaagtagccaccaccccaccttcttcttccaccatctcgtccatcaatctcagccttgtggtgagctccgagtgttggacctcagcctcgtgagcgagctggagcagcgcgacctggcaaccattgcaactaactcatctcatacgtacggagacaagcgaatgaaaacacgaacccgaaaatctgttgcaaggcctagcactgggccgtaagatgctacagtctgctgccgcaagccatttctccaatgggccaatacattgtacaatcccatgatgggccgaaattatgccaggattaggacgaaccgttcatgggcctttggtgggccgtcgtaacatgtcctattgggctgtggaaaggatttgcttcaaatccgtcggtgccccacatcagcaacactacaagctagtagctagcacaggttctgttattcgttttttacgaaacgcggtggtgattgcgtcggtggcacatgcatatgcatacgaattatcttctcttctcccacaaatcgtgcatacaaaggtccagctgctagctagcgatctgaccaaaaattcttccatattggtcttgctttttggatccacagatactagtagatactccagtatgagtatgggtcaaagattgaaacaaatctagcaatggcgtccaatttgtctgcagctggcacacgcacacgcacgagcccaaccgtccaaaccgcacaagtgacggtcaaacgcacgcacaaatccacgatattacgggcattatattgctttccaggacgcgcgcacgaccgcaccattctccaatccacgtacctacctgctgcttttacgactacatactttgggaatctcatgatacccatattcccggcagattactactctttcagactgtcacagtttcatacactttatacaatctgatgtaagtatataatagtaatatatactagtatactactcctactactgctaatttctgtcagtgtagcacgcagaattgcaaaccacaactatacaataatcctgcctgaaaacgcgacactcatttataggccggtcaccaactaacatcaatcctagcctatactactttattagttattaactgcatcagtgtgtgccacggataaaataacatcactcagatgtggagtactagagtcatcaggtagaaaattccagccccaggacaaaatgtgtagtactaacaaatataattaagggaaataaaattccgaacaatcttatcaaagatgacacgagcgtaccggtggccaacttccttttattgacctgtgccatatatgtgccggcccattcaggttcactcaagtcatatcaatatatatttgacaaattttgttaggtagcataaataatatatgggcaagttgattaacaaaatgacgacattatgatcaatttttatatgttccgactaaactaattatactatagcgcgatgcgtattgtggcgacaatgacgcactggtttgagagaaatgtcgtgtcaatgcctcaatgccacgtaacttcaatcaagcgtacaaccaacctaccaacacgatcacgcctataccttagtaattaaaaaatgtgatggagataatggcaaagagcaaacatgtcattgccacatgtatacactggtattactatataaagaaactaagtgtccatctgcaaaccagcagctataatatgatgcaaatcaagtgctttaattttactaatttatcttggagtatatatattgtattcctttttggaaattgcagttaaagggtcgtcatgtttaattatgggcagcttcaggcataggttgttttcagttaactattccatctttctaataagttgttgcggtagcatacatattgaaagatttgaacattgttgctatctgccaaaaaaaatatattgttgtaagctccccaatgatgcactgtttttgggcattataacacatatataatatttttcatacaaattgtggtacgtggaaaaatatagaccacacacgtacatatgcatgtttctgtagttagctgttgcgttcatctcaaagcataggtatggaattgtacgctgattgcaactgtattcatttaatttgagctactgttgtgatgacagaaaaagaaatctctgaatactgctgcccaattatgcgtttgatgcagacattatcgtccactttgtttaattccttcatccagaacattcattttgtagactattaatttgtcacgcgccgttttttagtaggacgcattatatatacatgcatacacgggacggattgaggcgtacaagtttggacacaggataatatcccttcttatgggtgacgttaagtatagtatatacatatttgtgtccagatcagccatatcatccacaaagttcgaggcgctgaaacatgaataaatttgcatttgtgtgaaacaagatatggcaaagaaatatcatcagtacatgcaaataaattaaaagcattttttgtaaggtccagaaacgtataatatctagctaatgttcagaaacttcagagatagtgtgacacacaacaaacagatatattagatgctcgctagcctgttacgcagatagaaacaaagtcgagtacagctcgatcgacacgacgcacattatattgtggcctagctaattaagctttgcaacgacacatgaatttgcatatagctagccggccaaggcagcgtttggatgtgatatataagaattaaagaaaaggtgtgtacaagagatcaatagcttggtgcgtcatggcgttagctaagctagcttagctagcttctcttgttggcaacgagttgcttcagtgtgttggtgaagcacgtagatcagctagcccatttgccaatttcttttcatactaattagcatctactacatatataatagtagcagtgttaataatgtccatgactacgacatgcacaccatgttgtgtatatggtaattagctatagaggatcaattaattgtttaaacagaaaggggttaattaattgatactacgagtttagcagagaattagggcggagacttatgcgtgtttgcagcgcgtcacatataatttgggcgcattatgcagctatcgagctgaatgtctgatcggacgagatgatctggaccgttggatttattcccacgcaacgtactggatctgatctgatctctatatgggacgatcaatcatatcgcttgaattattgctggtggctagctctcatatatatccatccaaaatattgaaagcgaactaatgttgtgttgatgtgagtgtagtaataattaagaaatttatatatatgtatttacagatgcaaaagtaattaatggttactagctagctaggtgatgagtccatagatcgaaatgcagctggctgaattaacaagctacgcgcaataattcttttttgaacagagaagggaagatggaattggaccatgcattattatcgttgaatatatactgtttgagtgtcagagtgtagcagtatgaactatacgtgagatgagcatgcaagcgagagtgaattatacatgcgtggatcaaggaggactaatacttctctgggagagaagtggcaaattaaaacccaacacgtgtgtcataatcatacacatgtgcatgcttagcttgcacatagccggcagatacgacgacgccactgcgagtccttcttagttagccctctttaatttggaacaaacgaaaaataaaagaattttaaaagatttaaatcttgtaaaaaaaattctacaagactctttgaaaaaaaaaagatcacatcactaaaattccttaaaaattcttatgttcaatgggaatttcggtggctttatatctaccgcgtacctctctcttctaaatattggtttttctatgctgcgttcgaacggtttcttatatagttttccttttatttattatacttaagaattcaatgtttaatgacatttgaattctgtgttttgagaatcctatgtttttatacatttcatcggtccttgcctgcatgcacacatcaaactagagctagctagctggccgcagcaaaaaccactacttgcatgatctcttgtgccacctgtatgcaggccgaccgtcagtaatattttttaggccatgtgataaatgttaaagaaaaccttatatttagaaaatactaattgtataatatatcagggctatatatatattgagatgggactctactaccagtgccattttctttatatgtattgcagccggtggccttctaaccatattaaaaaaatgctaccatatattaacctaatgcttctttcttttatgtcatgctaaaaaacaggaattatttgtaaccaataacaactagagccatgattaaaaaaaatactaacacctacatatgtagtggcaatcgggctaagtagaagaaaaatcgttgcaacaattcagttttttcttactaaatgaaaaaaaaggggaatccttgttataagtaaaaagtaagttcacaccatcatcatgaaataaaattatttgatctagtaatgattatcatctaatactgaaataatatatagctcgttttagctgattcagtaaaacagaaagagtgatttttttatagaataatagaatccagagattctatatatatcggaacatattgctctagatcgaaacacaacgttgctgctcgatcgatcgatcaccggcaggcatgaggctagctataggttttggttttctgtgtgctgcatatacgcatactgctagtctgctactagcctactattactgtaataaacggtctaaccgtctaaatcggtttgtttggatgcatatggatatccatcctacatacagtacagctaactgcaaaagacacatgcatgcatgtagatattttgttggtttggcgattcaacacaagctgcatgtctcaacggcgaacctttcaatcgtcgtcacgcttggaccaaattttggagctgtgtttttagtgcaattattgccatggttccttcgatgataaatgctactagtaccatgcactagctaccctccaaattcaattcaattcatccatgcatggtagtatatatatggctgtatatgtatgcaaaagagaatgttgtatatatattcggaattgatctgcttgtttatgatctgcttgccgatcgacatattccttttgcagtgtgtatatatatggatggccatgtatacagtaccgaataaatctattcaatgaaccaacatatacttattgatttgatgcagcagagcacactaaatgtatagtactactatacatatgcatgtacatttgcctgtgaaatgtgacaagcgtgcttggcatgtgacgttgcgtactagtagtaatataataaaataatccatctactataccactgtgtagaatgcaggtacgcatgcatgcaaatggctgcatgtttaactcagaattttttagaggagtaaaatcaacaaatgcggggaagatgccgtgacttgattgacacgtgttgagctctggcgtgcccgcgtactactactgtttattaattgcgtgtgccattccattctctggctaattaagctaaccttaattagactgccttaaaccgcagggttaaaatgaaaacagcgagtccgcgcgccatcggttttaatttgatgcatgacttgtttactttgttatcgaaattaatcttaagattaataaaatatggtaatgtcaaattttagcatgttatgttttggtggtatcaaatcttagtagcgttagacgcgtttagttaaataaattgatgccttttcaaattagtagtgcatcaaaaaatgtgcttttcttttgccatgtaattcttttacacgtttgcgaaaaaatagtagagcatcaaaaatatcaatttttgataaaactataaaattggtaagattatgtttagtttgttattctaccaaatgttagtaacaccactaaagtttgatacggtattaaaagtgacagtatatggtgacatggcccacgcgcgtatatatgtacagaaatccaatgcaaaatgtattagtacgactagtagttgtagtagacaataacagcagggtaaaagtaaattaggcctgagcacgcagttagggcacgtcggtcataatcacgcatgcatacttaatgatatccttaagaagagtccctgacgagccaaccactagttagtggagtagtatatatattaattgtgttagataaacaaatgggtacaaacatgcctctttgatcccatcagcgatgatgattagtcccggattaataatctacctatccaccgaagcaaattattgaccgtcatctcacttaaatttgtttaagcaagtacgattatcgaggttgatcgattgtcaactttttgttcctgtacgtccgtataagttatactactacctacttaaaaaaaatactccgtcccaaaatactacttttgagtttttttaaacgtttgaccattcatcttatttaaaagattaaaaaattattatttattttatttgagacttgttttattattaaaagtattttaagtgtgacttactatttttatatttgtattatttttaaataaaacgaatagtcaaacgttggaagtaaaaaattaaaacaacatctaatttaggacggatgtagtacgtgttaggccactcccaacacaagacactagatatggtttctataaactccatattatcaagaaactaatactagacactatctttcaatgcaaacatcaatgttacatacttaaatttaatgctacttatctcacatgatgtcttgcatgttgtttagaaactatgtctcaatgcaagacccggttttcttctctttccttatttatttacttgacacatcattctagatgggagcttatttaatgttatagacaccatcctagtcattgggttgaaactggccttagagcatgtacaatagcaagctataagccggctgcaaacttattttaagaagttaaatagggagagaggagcagcgggatacagatttgcagccagctgtagcacggactctaagacacagtgtgaatgacaggtgggaccagatattaatagtgtagtatgtaagtattgtatgaatgagctattagattggctatagatgaattagagctagtagttggctatactattaaacttgctcttagtaggatgaaagatgatgtggcaagtgaataaatgaggaaagagaagaaacctggtcttgcatgagacatgatttctacataatatccgagacatcatgtgagataagtagcattattaaatttaagtataaaaaatgatgtttgcattaaatatgtagtgtctagttaatgatgtagagtttatgaaaaccatgtatagtgtcttgggttgggactgtttctcttccagccaggccacaagcacaatagtactaatgtagaatcaatatactactacagtgtcatgcatgtggcatgtgcacgccgatgtattcgtgtcacgaggcggcgttgcatgcctatgccgggcatcgcgagaccgccgcgcggcgcggaacgcgcgttcggtggagactaattaattaccgccacgcaccggattaactatgggctggcatgcagttgaattaaccctgccaccccgtacgattttcacctaaccgatcgaacagcggttagtctagctattgcagctgatcgatgatggtaattattggtgcacaggcagcggcatgcgacacgtactacatactccatggaaaagttggatgatccatcgagtcggtgcgcatgcatggaccttaattacctttcggacacgatcgagattatttttgggttaatcagtcgagcctcgttacttgctcctgcatatatatagataatcaggtcgattaatgccatgtgttgaattactagtgctactactagtagataaagttaattagctattattggtagtaggccaaggggatgaattcactgatgatgagctagtcatgtctcatcgatcgaattcttttttgctactactagaagcatgcatgcagatgctatggagaaaattgcgaaaagttactggatgaagctagggttcttcgttttattcagacacaatacgcatgcgtgatgcttgaccttgaattactagctactagctactagctagttagttcccgtaggtcacctaaaaccattgactcgatgcacttaaaatgtacttactatgtcccaaaatataagcaattttagctataagtatagacaactatatatccagattcatagccaaaagttattatattttgggacgaaagtagtatacatcaagggtgtgtttagttatttgggtgtaaagtttttaaagtatacggacgcacattttaagtattaaacgtatactaatatcaaaacaaattatatattccggctgtaaactgcgagacgaatttattaaacctaattaacctgtcattagcaaatgtttactgtagcatcatattgttaaatcatggcgtaattaggctcaaaagattcgtctcgcaatttacatgtaaactgtacgattggtttttttctccatatttaatgccctatgcatgtgtctaaacatttgatgtgatgtttttggccaaattttttttatctaaacaagaaccaagatgcatgagatgtcttgggtcagactaggaattaatctggttaacatcagggtagagctgcttgcagtaccatctatcttaacataaatatctagacagtgtacatgttagtagtgtgttactataagatcaaagctggtcagaagtactggtacctaaactactatagtatgtatttttaaattaaaatagaaagatgagtctggctaattagaaacaaataataaatgtcactcgcgtggaattaattaaatgacgaaaggattaattgggtgtttgtactttaatttgttgatgagccagctttgcagcagccgtgacacagtgacactagagtagctactaggagcacggggagaatttactatttgccactctctcaaaataccagtgctcaaatgccactctcccaaattttcattcccaaataccacccgggcccacatgtcagcctcactcagtggcaaaaagaaggagaattgtgtggtgcgagtaaattcaacggatgagataagagggagctaggcgcacgcacggttggttgggtccgttgcaacggaagctatatacagggctagctaatcgattgattagttgatggacgcatcctaattatctcacctagctgcgtcatccatcgtccactcccgcgcgcgaagaagaaatgaaaaacaaaattaggccccgttaagttccaaaaacatcacatcgaatatttaaacacatgcatgaaacattaaatatagataaatgaaaaactaattggacagttagggaggaaatcgcgagacaaatcttttgagtctaattagtccataattagccataagtactacagtaacccacatatactaatgacggattaattagtctcaaaagattcgtctcgcagtttccatacaaattatgaaattatttttttcattcgtgtccgaaaaacctttccgacatctggtcaaacatccgatgtgatattcgaaaattttcttttcatgaactaaactagtccttaatccaagctactagcaaacctaacctaactgaatcgaattgaattgaagcttcttccgttccgtgtcagggttggtgggcctatctaagagagctcaagattttaaaaaaaaaacagccgcttgataaccagtttttaaatataaaaaaactgagttttctagtttctgactcctaatttattttctaaattctataactatagtttttgagaatctaaactaaaagccggccggttagctactgctcatccctaccaactccagctagctcctgatatctctcgtgtctccactctccacaccagattgatgcttgtaatcgtatatgccggtcgccaggttcaacgtaacgtacgtgtagctagcaacgccaggttcaatgtacgtccatggaatggatatatatatactgtactacatatgcctgcaaccagttgaagctacgttgaggctaccaccagagaaacatccagggttttttaactagcttcacaagatgatgggctagacgatctgggttcgaagcccctcaccccttataatttgatattagatacttttctaatattcattttttttaggctacaaccataaggtaattaattttccatgcttactcactgaatgaggtaatttcatttctggagatctatcgagcttatccagctacagcccaaccgacggcgatagctactgcctctgcttgaccacccctgttatcacctaaacaaaccaacacgttggagtgagctggaagcttgccgcctcctgtcctgtgcactacaatgcacttcactaccagagcacaagaggccggagggaggaaaatatataatctcctcgcatgcatgcgacatcaccacactttaattcttcctcccttcgcttttagccgaacctttaactgaccacatgacaagggtattacactctaacctactccctccgtcccaaaaaaaaagacaaaccatggttttcgtgcccaacgtttgaccgtccgtcttatttaaaaaaaatatgaaaaaaattaaaaagacaagtcacgcataaaaatattaattatgttttatcatatgacaataacgaaaatacgaattataaaaaaattttatataagacggacaatcaaagttggacacgaaaatccagagtttgcctttttttagaacggagggagtagatagctctgcgcttttaatttgcatccgtccaaatatacacacttcatgcatataactgaaattatactctgctgctacttcaagagatcaacatattctgatcccaactgcacctgtactgtattaatttgcggcaaaaagtactttaaactggaacttacggtagaatgactttcattgtgaaacggagggagtaattgccatctgaatcgagatagtgatcgatcatcatgctttttttttagaattattacacacacaacgcacgtacgcacgcaaacccgctgtaaccactaggctacaagccctttcgcgatcatcatgctttgggtgtgtttaatttacgtcaaaattggaagtttggttgaaattagaacgatgtgacggaaaagttgaaagtttatgtgtgtaggaaagttttgatgtgatgaaaaagttgaaagtttgaagaaatagtttgaaactaaacacggccttttggcgatgctagaaatgtgaagaattaatgtcacgtaaggattaatggccgttatcgctctgctcatatccttaggggacaaggctttttcatctgccatgtatatatatataatttacatatattccctgtttgtttctgccctttgggatcaagcaaattaaacgcacttccttttgtctggccggccggccggtgttcaagccaaaccacagaaagcatattgtgtactattaaattgcccgggctttggagtaaaacatttccagagaatattctgccgatcgattggattttaaatgtcacattgcaaattttaatacccctgcactgccccctgaaacttccatttcaattcatccgtgatctttgagcagctataggacttgtttttaatgaggggaggaaggtacagtgttgctgtcaaagaatgataaggaagacttctctgctgcttccaaactgataatgttgtggtggtggtgacagagactctctcatcaggtccaccaaaaaccaccattcatttgcagattattgtctcttcattgcagttgcaggcacaggcaggcagcttcttctggtactactagcaaattaggccacgataattgttgtctacaatcaccaattgtagatgcatgattactattcttaatttgtccatatatgttatagtttgtactagagtagactagtagtaaataaatcttcaattctgtttctgattaatattacaacatgcatatcgatccaccgttttctgaattgtggtgtggcaggaagctgctaggttgcatcatgctattggatggaaaatgtcggtactaatttagctattttactctaaacaatggacttttttctattttgtcgtagtactcaagattcatcaaaacacggaatatttctgttctaaacttctaattaacaagtggctcgtttggggagaaattacctacagctacaggtcattgcttatatgtgtcaaactgtgatagtgagttgccttagtcatcacaaaatttgttgagcgagctaatgtcacaaaattctcattacagtcttaaatatatgagataatgctctgtatgtaacaaattaagttctgactgctggagctgacaaggcaggaattcgttagccaaatgcatgacgaaagactgaattttttcctgcgtcatataacagaattgatgactgaattttccgtagagctcactgcatcgatctgaaaataaaaaaatcagataagaatgttttcgttcgtggatgacattttcctctagatttggtctttgcgtgctaaaaaatggacgcgtcgggtaatcaacagatatactaatctcctcaatgattagattagcttgcaattgattaattatttacttcacccggttatccttttcccatttggagatctacctagtgctacttgatgattaagtattaggcaacaacttgacgcgaatgcagtggccgtattctccactgttgaatatttcgggttttaaatgcgagctgatttccattttattgccaccattaattttcgtaattaatctagtggaaacaggagtactagtagctaacttggtatgataaaaacaaagaaattaattaaattaagtcgtcgactctgcagctaacgtttcagtcgccttctttctgtatagcaccacttgtagctgataggacagagctagctaggaagcttaattggtgagaaaacgatatgtagaatttggatttattaaccttgatatatcgatcgatgcctcatcataaagcttaatagtagcaggcggcagacagccacagcctttggtttggcttcatgcatacatctcccatcgcatattacactgaaaatctacagtggccattaattggccgttgaaattttctcgccgcgaacgaagataagcattggagacggaaatttagaaagggatgaagaaatcaacgcggaacaaagtaataaactcttttagttagaaaactaattaaaagagcagcatccatgttcgtttaatttggcaggcatgttcgagtgaagaatattctaaaaagaagccctttcaaagctagacctcctccactccaacccgatggatgaggaagtgtcaaacaatgggaaaaggagaatgggatcggattagtagattagattggtttagcgccaataatttaacctagttagtcgtatcaggatgagtagcatcattggcgcgttaattaattatagcaacaatattaggacatgaaggcaaaataattaccaggcagctattactgcagtagtaacaagtgagagatggatggaggaggcgatcgaggttaattagcaggaggcttatgcagcaagttggcttctccatcacggcactcgatgggagagaggaggtcgagtcctcttctatataagagccacctctcctccatttccttcttcctaaacccatctcgatccctacctagctaagctatttcattcacacctcgatcaatctcgatcgtctctctcgtctactactagtactagcttcttctcctccatttctgacctgagctagctcagaacagagagctgagaatcatcagctagctagctaggcgtctggggagagagcaggagccatgtcggagtcggaggtgtcggtgatcaaccagctggaggaggaggagactcggctggagctgccgccggggttccggttccaccccaccgacgaggaggtggtgacccactacctcacccgcaaggcccaggaccggagcttctcctgcgtcgtcatcgccgacgtgaacctcaacaactgcgagccatgggacctcccaagtaagtagtagtctctcgttcatggcggcctagcttcctcatcgtctgctagctattcgatccgattcgacgatggagctgcatgcatgtattgcaggcaaggcgaagatgggggagaaggagtggttcttcttctgccacaaggaccgcaagtacccgacggggatgaggacgaaccgggcgacggccagcgggtactggaaggccaccgggaaggacaaggagatcttccgcggccgcggcctcctcgtcggcatgaagaagacgctcgtcttctacatgggccgcgccccccgcggcgagaagaccccctgggtcatgcacgaataccgcctcgacggcaagcttccccccaacctcccccgctccgcaaaggtattctctactcgccgccggccatggcgatggctagctcacatgtcgcgtcgttcctctttctcttttattgaatactagtatatggttgcgtgcgcgcaggaggaatgggcggtttgccgggtgttcaacaaagacttggcggcaaagattgcccaaatgccgccgcctcccttcccgcgcaacgactccttcgacctcgacctcgacgacttcctccacctcgacgccgacctgccgccgctcatcgacgaccccttcgcctccacctccacgctcaagacggagccacctccgccggccaacctgatgcacaaccactacggctacttctccctcccggcgtcagcgaccaattataaccacagctccggcgccatggcggaccaggcgattcggaggttctgcaaggcggaggcgtcgacggcgtgcttctccggcgccgacgctgacgtggatccggtggtggacgagctgctctccttcccggactccatcacggactactcctacatatggaaggcctgaccagattaatttcgtggttaatttgccatatgatcgatcagattaatcctgtttaattagttggtttattaacttgattactgtcaaaggtttgggttaactaggagatgatgatgatggagtttgtggtgatgcgagagagagagagattaggtcgcgctgatctggtctgatcaaggtgtgcagagcagatggagcggactaattcattaattagcttaatcaaattagttatataggtttgtttgtcttaattctgtatgtatatagttatctgattggggataatacatagagattactagctagctagctagtttggtgattaggggggtgatgagctagctagagagagatatctcatcaaaattaaggtctcggttggttgattaatctgcagattatatattgccttgtgtgtgataggccatgtggcctctttctgtgtatgtgtgtgtgtggatggaaggagtaaattaactaaaccccttgtacatgtaccatcagttgtgctttacttacatgatcaattcaaccattgatcgattaaccaaaccgagatttgcatccatctgtcgcttaattcttttcgctcagtgcatgtgtgctgttgatccagaataagcagctgttgcgcagaaaaatatattgatggagaagagaattgaattaaatgggtttgtatgtatgttttgtttggaggcaatgattggaacggcaggcaggtccttgtcgtggaatccacttggggaattgaatggaatgggattgagcatgcatcaggtaaggtaaattaccaaggcatacccttaattgctcccttgcctcttaccttaaccggctgagagagtggagtaatccctccgtctctcaaaataataatctagaattttttttataaacacaacacaaacacagacgctcgtaacatacgtgcactcacccctgtaaattcatacacacaccctatccttatgaacacctccttcgaatgactggaccaacatatcaccacgggcgtcttgttgtcgacggatatgttgtctaccacagaaagaataattaacagtaaatacgagcaaccgtgtcaagtataaaacttgaacctggatggattgattccatcatatcataagaacttaactagttaagttacgttcactttgcctaatatacctatttatacttgataatatttttttgttataatttaatttattttaggacggataatttattttaggacggatggagtataacaagtctattgtgacgatgaatccaagtccaagatttggaggggtttttttttaacaagcggcttgtgaatttgcttgtgggcgtgcggtgttgcatgcgatgcgatgcgcctcgctgtcgctaatatctggatggatggatggatggatggatggatggctttgccttgctttccattcgacgcaacaaacacaattaaaggctagttgcatttggcacaacacaacacaaggagaggctgaccgggttttgcgctcggccgcctcgcttcacttctcacctcgcctattgtcatccaaattaaaccccaacaaaatacactgcacttgttaatttgcgagtagctaatctgaagaaaaataaaagaacggaagtcaggagatcaggatacgtaaaactttagctggtcgcccgggactgtgtttttttaaaaaaaaaacacgaacgcgcaaaaggattgcacgtcaatagagtttttattacacaacgcaatcagccagatcggttctggagctctgtgttttcatgtgcttggccttgtacatatgtgcaattggactaactgcctgccggtcagtaacattctactgctggatttttaattactctcctcactctaaaataagtgtagttttgcactgttcatgtttaagtttgaccgctcgtcttatctagatatgaggttatctacatatattgttttaggagtggtcacaggttaatttttttttgatggaaggagtactctgcactagaagctagaatatgaatgtgcgccaggtgcatgcattggcgcttccacgttagttgctttcagatggatgatcatccatgatcatatacatacatcgatcgatcatcatcaatggggcccggccggcctgcatgcatgggagaaatctagctagctggctagcttaattagcttactcctaatcctagctagctagctactcatcacgagttggatttcgtcaggtctacctcgtgattatacaatgataatctgcatcatatcatgcatgtggggtacatcatataggagtagtatgtactagtaatatacggcatcgatcgatcgactttcgttgtgcttagatccaaagtgtgtatccaaacttcagtccttttctattatatcaacctatcatatatacataacttttcagtcacatcatctctaattttaactaaaatccaaactttgagctgaacacagccttctttgattactcaatagtgacaacctttttgtcgtcgttgacagcatttaaattcccgcactactgttcgtacgtacgaaggcatgcatatcaatcgatccatccatcattctggaagaatcaatgcatatatatcatcattcgatcgatcgatcccatgcatacatcacaaatctttatatatgatcatgcatatgcatgtctatctaggctaacggctgcagtagtagtacgattgttgattgatcatcacaaggggaccaatctatacatatgtacatttatcggaacaattatcaaagagctagttactataggatgtgtgccacgatttgagttggcagctgatatatactgatagtactcctacttaaaatgccacgcatgcagctacagcccatccttttgttcaagatacaatgtgcttaattactctgtctcaaaatataaggatttttaggttgacagggttattaagaaaatacgtgtgaatgattaaagaatgattaaagaaagtttatcattggttgagaaaagaaaacatgtgaagtagaatggttgtgattagttaagagaaggtatgtagagaaatactagctttattttagcacaaggtactatgttagaaataactatatattttgagacaatataatgtacttaaaaatagctatattttgatacagacgtagtagtatgcatggcaaattgttctaattaatcacttaggggatgatgtacactcacttttgcacccatcaaatggttaaaaaaatgaaataataaaaaatgacatatcactataagatatatatgtcacatcacaaacaaataagtttaaatttgaccattctagtttaaataaaaagaacaaactaaacctctaaaaatattaatttttagtaatttgtgtaagttgaatttaaacttgcctgtggagtttctaaacttttttttaacttcaaaagttatttagggaatgaaaaaaaatcacaatactggtattattgcacaagtgcagcaagacaacaagaccagttgcagtctagctgccatgcatgattactagatagcttggtccgtcctctcagatgctacaattttgcatgtgtgtcgacggctacgccttcatatatggctatgagcctgacatgactcgctaacgaccacaccaaattcgccaaacttatcacaagacaagagcatatgccttacatatgttatgtcacgtttcagtatcgctccatgtcgcgctgaaatttcagagctatatagcacaacgtttattaattactcctagttgatgtatgatcgaccgacatccatgcgtatgcatactctctccgtactcataaagaaaatcatttaggataatgtttaagtcaaaccttgggaatataaatcatgaataactctcaaattgttaagtttaaaaatgtaaaaattatatgtatagatttgtcttgaaaaatactttcataaaagtgtgtgtgtatatatatatatatcacttttcaataaatatttttaataagaagtcaaagttgtgttttagagaccgtgtcgttgttctaaatgacttcatttacgagtatggagggagtatatacagatgaatatgaacgtagtacgaaatagcacgacccactgacccaaacctagctagcttgtaattaactcctcctaaatcacaatggtttttaatcaggttttcagctatttaagttactcatgtcataagtaagtaatactagctactagataattaagtttgcgtattgggcaatttgcagacagctaagagttgatgtcttgaagcagaggactctcgatcccgttaatctcggtactaggtatgtatctactataacaactcatacatgataacagtaatactacttaaacacgttaatttgattcgcaatctagtagtacttgttattttttcctgttgcattgtttgatttggctaaccgatcgatatatacggaatactagtacgtaccagtctcgtacaaatatacctgtagatcgatcgatccgtatatttatcccaggacaggagggagaaattaaaggggaaaaagaaacgcgcgtgctcccaattaatcgcgtaataaacacgagatcgatcgatgcatgatgatcagggtgtaatagtatcttccaggttaatctacgcgtttcttctctattccagctgaggctaatgatgaatgaattggaggagtaagctaagtgtcaattagtaatattcctgggatatttatgtctgtccgtaggcaaactgtaccccagtacaagctatagatcgatactgctcttttgatcgtagtacttaattaattacctgtaatccttgtccgagaagacaaatccatccaacaacgactttactttgatgttgctttaatttcgagattcttaataatgtgtaatataaatcttcaatgatacgaatttcctccgatatatagtatcctctcgttctagtctagaggccacaaacgcacaatttgttaattacgtggttagtgctgaattcaaaagtttaaggcttaaggttttagaccatctaatcagatcacacataaaatataataaaacaaagtactatgaatgtaaccagagaggtaggtgtgtgtgtaaaaaataaatcaaacttatttgttactactcgatcgaaagacttgtggttttgattagccttgatgtaattttcacgctgtcgtcagcgtagcaacggttttaatttgacgaagagggctaaacgagtagggtacatatatactacaggcagcaaaacgcatggaggattttggtagctaggcgacggcacgggaaagttgaagcctggacgtatcgctcatgggccagccaggcccaggcgtgtcgacgtgtccaggcctaaaaccacaaaccacgtggagcccagggtcccacgtgtcaccacttattggtcgttgttgtctcgaagaaaaaaattgcagtgatcgatgtggacgccatctggacgcatgcatgcgtagtatataattgcatatgaatgcctccatctccatctgtatatatcggattaatagaagacgacgacgacatcgagggaatgtacgtactacatacggatagggatctgtcgtctgtgtggagccccgtcattcccatactctagaacggaagattcatctcagtcaattatttttctttttagtaataaaaatgtattacatcacatcggtcctctgtcatacggccaattagttcttactaaaataaattaaaagagtggtaggataaattcctagttacccttaagaaataaaaaaaataacatgctaaaagaaccacacatattttaataattaagccaatatatgttacatcatccataatgaaataaaattctcttggcaactgattccaacagtgtggtgtcatatagttaaataattaattagtcctcgtaatatataatgctgaaaactttatggtataacttgtagccgtcatacacggggaactaggatatttgcagaaacttatgtgaaacaactcccttatatatgtatccatctgcccaataatgtgggagattaaattgatcaacattaattgaaagcagagcagttgcttggttaacaaaaaaggagctgagatagatagatcagataggtgtgagttgtacagtactccacatttgcaggaccgcaagcgcaagtaccatgttggtgatgtactagctccatcgatcatactgcaggtacattccatgatctttttgcaatcaatgcagggctagcaaaaagtgcaagataggaaaagtgcaaagcatatatctatatctccaagatatttctagtttcaagcttattgtacactttactaggaattcaatcaccaaacacacacatgctagctattatatcttggcttccatggaacatctaactaaccataaagcatgcattcttcacatgccttattacattgtaccaatctcatttttatatgatgacctggatagctaactagcttgcacatcaggaccaaccatttatttatttatatttattagggaagatcgtatatagtggacaaagcctttactatgtattagagtataccccaagtccatgtactgctagtatttgtccttcaaacctacgtactattgcttatctacggcatgcttcactcacctttattcctggcttttttaaaaaaaatttgccaggactaccaatttagctagctcatgttttcccattttcagataatactgtagttaatatacaggttatggtacattagttggagaattatgtgaacaaactgatcgatcctcagctaccgacctgatatatgtcgtccagtaattttccatgctgtttggtttgcatttttgtcactgtcggccggtttaattgggagaaagaagcctacctagtgaattgatatttttgtccatgtaccgatgagaattgaatgacggctaatttcagttctcgagtcctagtcaaatgctgctcaagtaaaagatcttgaaagcaattgacgagggcttctgaaaagaaagaaagaaaagatcaagtgcacttgtgaaaagtactcgctagctagctaagctagtggctcatgagctaaatactgatattttttcgcaattactactcgtagttctctattgactgcattccccagcgtatttaaacagagtttcagagatctgaaatgctactgcttcatcattaattggcagtatattgggagaagaaacatgtgccgttttgctgtgccacgtcagctgttttggcttggtatagtatccattccatccacatgttccattgccaaatcaaatgggaatcaaaaattaaattaataaatgatttgtttctttccccgagctgtagctagcagccatgcatgtatgcatattatgaggataaatattcccagtcctatgatatgatccaatcctgataaacagtccaggtgcatgggatctctgatgatgcatgattcatcatcagtcatccaaagagttggggggttgatcgatcgatcgatcgatgtgttgcaggcatgaatgccacgtgtgatgcttcttgagtgtgccacttgggcacttcgatccctgacagctccctttcgtggccatccggttaacaggtggctcacatttgggacgttgcagataacatcagcagcagtagtattcgagagtttgacaagcaaaggttttaatttttctgaatttgttttttctctatccaaaagcaggcgtgcagtgttcttctgtaaacacgggcaagcaaagcatactggatgtttccaatattttttttaaggcagttgtttgcttctgtgctgtgctattagagtgcgttgctgtgataaatccctttcgattacgaagtgttttgatccaggagtttaagattagccagacacagatgcaatgggttttgatgggtgcctggcttgagagaggtgttcagttcagccaaggcactcaaaattttacttacagaaatggacaacaccaacctttcccagtttccggttcccattaattcaaacaaaaagaatatgcatgcggaggatcgaatatccttgacacaagtcaagaactgatgattatttataagtagtgtgattaaatcaagttgcagtactagtttttaggtaattaaggagatagatataaaattgttggaggtgcaagttcaatcaacagcgaaagaacaatttgtatgtggaagcagcaccagttttagtagcagcatatatataaagctgctgcagttgaggaagacgcatgatatataagtgcaggccagacagaagattacaagagaaggctttcctttggagatagatctatcttgctttattagtttagtactgtggagtagtgctagactttgtataatacagttcgcacttgtgaaaccggatatcgggatatgatcgatatgcagtgacggtgatgcatgcatacatatgggccggttagtagggtcagtgatagatatatatgcaaggatttggatttggtggtggctgcaacgcggagatgatgcgtgcagtgcgtccagaaccggaatattggatcgatgatgatgatgatgatgccaaattgccaatgccacccgtatgcagatagatggatattatggatcatggataaaggagacgtactagtattaatttggagtcaaaagagtgagcaatctccatgcggattgcagtgcagcagctagctagctatttgcgttgaatggaatcattttaagtaagcgtaaagtgagcttcaattcattagctatttgctcgtcctgtctgtttgtctctctgttgaagtatgtactgatactggatattgtagttgtaaaggaggctaggctagctaggtatggaacgagaaatactccacatgagagatcaagggtggccatgcatcactgccggtgtctggtctagcagaaagcaatcgagatcaatgtatctctttcgatcttagcttgatcgatgttcagttcggttgggtggtgagccgctcaaaagtatttctgcctgcctgattgataaaagcagtcgacgcaagaaacaaatcgcaagtagaaaagaaagagagagagagagaggaggaattaggccaaggaatattaattgggcagaccaataatacaccataattagattaggttagatggaacaagaatcatttcttcatcgtcgtcgtgcagacggactgcaaagaaaatactgtataaaaagaagaaagtggcaacagggtaataaggcctattttgaggaagcccaaatagtacgaggcccagctcatctcgttggactgaagcccaagaaagcaagagagacgaggcgaggcgggggcctgcaggcgaaggcgaggcccaagcatcaggaggaggccactttgggcattgaggtcaggcccaaagacgatgaactcgctctccgagagcttcgtgctgtggtcgtcccgcacggacccggagccacagatgagagagtagacatacggttgttgggcaccggcgtagtataaactcatcagcagtagtacgtagtgcctagagatggcaatggggcccattcaccgtttccacgcggtgaattcacctattaggtgacggggataattaatatctattcaccaaggggaataaaatggttaaaaacctctcaccatcggggatgacaggcccctaacccgactgactgtactgtaccatggctttttagatgttttggtccataatactaaagcccatttaacaggcatatctatatctatattaatataaaaaggaggagttgcccccctccaatgctactggccaaatcattcggattaatctgaaccatccatccgcgcgcaacttatttccaccatacgatttcgcacccgaggattgcacaccgattggccgaagacatcgctcatccgtcctcatccacccgctactgcgaagacatcgctcctcgactcctcctcactcgctcctcttactccccgctgccaccgctcctccgcggccacgccggagccactgccgggtccttttcttccccaccgccgggtcctgcttcttccccatccccaccgacgcggccggcctcttcgctcgcgcctcctcctccccgctgccgccgctccgccgcatcctagacggagctctgccggagctccgccggactcttactcggagccgccgccggagcaggcctcggcccctcatcaagtaagttccttaaatcctgtctctttccctaatccctaatcttctccgtacgaacacgatctgaaaacaagtgaccataagtttccttttttgttgaagtttgatatgtttatatgcgctcagacctcaatcgcgatctccctcgctcaatgcaaagcatcggacttcagcgatcaacgcttgattgccaaatggtctgatccggccgctccgctgccaaggccaccaccccgagatcgcgtggatctggctgctccgccgccgaggccttcaaccctgagcccttctgccatgagtccgcagcaggctccattgttgtgttcaccgcccgggcccctcaccgccagatcgcagtccactccaccgtgtagtcgctgcactgtgccccttcgcagctttgctgccgaggccaacgcccaggttgctagaccaccaccttcttcaacaccatattgtggcccttgacttctgcctgattgccgtcacatagacgttcatcaaccctaggtatttaccctaacaatctcttggtttagtgtcaattttgattgcaaatcttctacaaatttgccacgatgttgctcataattgctgtcacccacaggtggccatggtaccacgatgctgcggtgactgctgatacgattcctgttatgtcatgtttgatgctgaatcacgaggattctccaagagttggaagctatcaaacagcaccaggcagtcaagttgtacagatggtgaaaagtatggagaagctgcagtcaagttgcttgctgctacattaggagtaacaagtgatttttcatctgaagaccaatccagaaatattgggacaatctgactgaataactgctaattataaccaatgttttgctctaagtgttattggatgttttcattactggtacaggttgtttatataatctatgtgagttttctctaggtgatttctttgtatttctttcaaacttgatattttcctttactgtttaatattgcttgccactaatcatgatgtgaaaaataattgaggcaaagaatcatgcctttctgctatgcaaaaatgtaagcctttattctgcgcaagggcgcaagcatggttcatgcataatggtcaagagccgaagagctagaaaatataatatgcagctagctaatttgttattgtcagctgtatttgagtagtacttaattttgttttctaatgcatgaattgcaggatcaatgggtgcttgctgataaaagaatgcatataaataacaattggtggaggcggataaggaggctggtcaagtcagcctcctgcaattactagtgaacatgcacgtgcaaggcacgttttcgtaatatatattattgcaaataaaaacatattaaattgccagtttatttccactctccattgaatgatagttacaaaataactttcccttcttaaagaaaatgttattatagaacaatgccatcgccttagcaatcagcaagcagcaaattagtatctccatgaccctattgccaacatgtgagacccctagttagatttgtgaactaaaaacacctcattactgtaacaacaggaatgtatctctcatggcaacataatctctagtactaacaaatagaacatacaaagattaaatctattaaccatttgatcaaactggatgatgtaggatttctttcataaacatcacaaggaaaataaaattggatttgatccttatgggctttcaccttgtcaaatagcagtgtgcattaaaagtatcttattgttgctgctagcaaatcctgatgcacactccatttcttgagaatgtcagaaatatatgcaacttgatttactaaacaagcaaataattatgggtttgcaccttgtcaaattcaatatctcttcatcagctttgtaactcagcaaataaaatcagaaagtgtagttcttaccaaacattcccttttaagaaaataatcgacttggcttttatgaaccctcgaataaattaccagagacttgaattttaatttaagatatataaccagagcccagaggcaacttttctcaaccatgtgaataataattctcagtccaggttaaggaccagatgaataataggttgggggtttgttgaaattttgtataggtgagaaggcatattagaatagagctttagacatattcccaagtcccaacattcaattaagtgagtgtgcagagagaagttcacaggaaacataagacgcagactacttagtagtgctatgagtcaatgataaattactttactaagaatataatattgacataatcaaacttatatcagtttaaaggcatcaactttccaggtaatcaatgagcatcaagaataccttaacaacaggatgttatacacctgtactaatctggagtagtatggtcaatatgcctaaaaatgatccaatgagcatactaaaattatactattttttttgcttcaagcaagaccagtgaaaaaaaaagtcagtgcagacatgtaaatgaacatatctagaggtgcagtgtggaggcggatgatggcggacttgaggtgcggaggaactattattaggagatactaaatcaagttataacatatatactcagaatacgatagaaccttacgaacattttgttgagcagttcatgagcagaaaaaatggttactttgagtaaaatgtcttgtaccagtttagttcaacaaaagcagcaagctaagatttcccagcaaactcacgtgtatagctaaaaagatttggaacaaacatacctatatggaatcgatcaatcgctcaagcttcaatgcttaaaataagcattgagtgtaggtaagagaataagtagctaagaattatagaggctggatttagatgaatcatatctccgaagcgcaaatgcctgccagattccttatgaaccacaaggtaaccaatacaaaagcaaactggaaaaaatatagcgaaacataaaattggggctaaagtgctgcactgtcagtgtctattgctattccatatggcatcctgcaggtattgaacaaattgggcaatttctcaaacttgggaagcacacataagagagcagattaatatgctttttagtgcatgtacaattcatacatcagaagttaaacaccactatatttatcaatgtattcttgagaagttaaataccatttcttttgtatggaatcccaacttcgcctaagcatttgcagctagaagtgctcatctcatccctttcttatgtggtctttctcaaaaaaaaaaagaagaagaaaaactcaccagagatggttgcagtagcgattaactctatgaactcatgtcatatcttaccagcaagctcattttgccacatcattcctcagagctccctttggtgcgtctgcttgttgccctccaaatcttgtggctagaggtgctgccatcccaagtaggttgcctcctcttgcatgcaaagaatttttttttaaaaaagggtctattaagaactcgttgaccaaagagtaatgcatataaaaaaaatctatattttaattatactgatagcactcattgtgccaccagttaaagaacacagaaagtaagtgggagaatctctaaatctgtgatgttgaacttgatcatcacataattctcttatatttatactgccaattagattctccttgactgtccaataggatgagactgccttcctaatccaaagcacgccaatatactcgtgaattgacagaggagttatcttggccgactctatcacttgctatggtgtcattcgagggcaccggcctcattggggtgcccggactggcagcagtggtgtcaggtgttagagacctaggggcatggaagtgaggaatcatgtgcatatatgtaaatcgaaagcaatatcattttaatgacaatgtgagaataaaaataaaataaatagaagatctagattatttgacaaagtagagatgattgttctttccttaacaaccttgttgtaggttgtcttcagtagcgaataatcattccgaagctgcattgttttaaagctaaacatgttaagcagagacaattgaaaagcataagaagtcctaatgctttcaattacaaaaaatatcgttgatcatggactgaacatacaggaagcaaaacacattctataaaacccaaaaattgtcgcaaatgaaaaggataactgattcaaagacaaagcagtaactctttttgaaagttgggttgacatgaatctatattgaagaactgattgcccatgggcgcatagtattgtctaagtgaaggcctttatagttttacattgcctaggtgaagcagactctgaattttaactaagttgctaaattcaatttgatctcaggctacaaatcgcaaaaactctcattgactttcagcattcaaatcataaaaactctaattgatttcagcaattcgagtttttaattgtttcaatcaatctttggatcttgatggtgctgatcatggaggcacagctagcagaccatggttgtaactaacacatatgcttgactgtactgattaatcaatgagagttttttggttgaactaatgaaatttctactgtagtcgagagaaatgacagctaaaagaacaaagtgaaatgaagaacgggctgctgctcaccgagtcgaggaggatgttagatgccttgaagttgctagatgaccagcgggtgagtgtagtggaggaagtcaagccccttcgccgtgccgcgggcggtctgaatcatccttatccatggcatgggaccatcgagacctgcagaccattacagcgcagatcagcttccccaagtctttctagaattgacacagaggtggcggcaacgaactggtggctagggtgaagcaatcatcaatttctgttggtgaaccttactgtttgtgtagtgctttagctgaaaccatctgaaggtggtcatgaagtcctttcaaatgatcggtgctcattttgtgaatttcatgattgcttcacaagcatgaacatacactttcccttcaataataattcttttgagtgacaagagatgaactgaaagtcgtgcattcatacagaatcatcaacagaaattgaaaacatataagcatttaggcttccattcaatcatttcgcaatacaactacgtagagtactaaattaggtaaagcattgcacacggttacctacccattgaatcatttcatcgagcagtaggggagcatgggcacaaagcaatgtacctaacagctgtcttcctcaatgctgccacgtgctccggcctcatcttcatgcttttagtggtggtgactccggcgctggcttcctgcttttagtggtggcggcttggaggctgcagatgacggcaacagaggcagggtcgtgagctaaattctaggggttaggccgcagtagcggagaggaggacgatggcggagtagagaaggacaacgacagcgcgaggaccctcccacagatcgaagcctcacctcgtgcagtcgtagaagtctcggtctccggcggatgcaaggggattgagggctggcgcccggcagcggtgatggcgtgcgaacatgaggctaggtggggaggcatggatgcgaggttgagtgcactcggcggattggagtgcgaccgacggcagtgggtgaggcgaggggcgggtagaacgtggggtggagtgcggccggtggcgtgggtgaaccggcggtttggaccgcggcgaagctgggggtgcggtatgagggattgaggggggcgtcggggagaaggtttggcgaggcaaggcgcggcagcgagggcgctggtccggcagtggagtgcggcgacggcgtcgggcatcggcggtggagcattagctgatcggcagcgtcgggtgagttcgagacagaggagggcagaggcagcatcgggggattggggaccgcggcgatgggcgatgggcgagggggtgcgtgagaatattcgcaagagaaggggcgcgtgagtgtggcggcaccggcggagcagatcgtggcgatgagcgaggggcaagggcgtaccggcggcggtagcggggatttgggcggagccgcggagcgaggaggagtgaggaggcggagggattcgagcggcggagtcatcgcgcgggcggaaagcgcggtggagaggaatcaggtgggattggtgatgatgatttcctacagcgaggaggataggggatagcgatggacggatgagattagatgagatggcggatggacgaatgagatgagatggatgatttgtccggtaggattgctagaggtgaactcctttttatattagtatagatgtcactggtaatatgctttcctatagctgatcttttccctcttcggtcatgttctgttctgcttaccacacctctcctccacccaaaaaaaaaaggtatggaacatcatcatgtagaaactaaaatttaagttgactcaaattaagtagaaaacatgctagaaagaagtatccctccctcactgctgacaaaaggaatgagggcttcaaaagaattgagagtacaggtagcggtcctagcggaagaaaggaagcatatggagcaatgaattggtctgcctctactactattagaggtaatctgaaaatgatttataatctcatttggatacagttatcataaatatgtaactcataaactcccagtggtgcagtataaatttttttatatgaattttgaatagcaactagatatgacacccatgcacattacatttacagagagcatatgacatgcttgcaatgatcaaacttccgaagaaatgtgcggttgttgttgttatgagctgtgaggcccagcaagcagagcagattagtgtgatttattgattctatatgttaaaattgatatactacatcatgtttctattttttgtagtgcagaatttttctagagataatttgtgtatccattcaataatattttttttctacaactaattcaggcaaacaacaatgctgggatgatttttataagcaggacatgaacgctagaaagctaaattgacaccctggtgcctcccgtttatagatgtcaccaacaagtaagagtgttcctctcgtgtttatattggaatattgttattgcttctatctgtaaaacctgaaaaatctgaaaccattcctatactgaataatagaagatataaaatgaatatgtgttgccattgcatccttatatttatttcttcaatccacaattaactatctaaaccacttttttttattttaattcacataaattattttcgttgctggttttagtatgaatattttgatatatctccgtgcaaaaaaggattttgatatagctatatgcatgtgcattgccattcgattccttttccaatatgtaacagtagtcattgtaaatatactttcatattgtttctctctgttggggcaagaactctgaaaaatgatatttggggtggttgataggctcaccaggtaaaaaggtacttcatactatatatgtctagattcattgacatctatatgaatgcgggtaatgctaaaaagtcttataatatgaaacggaggtagtagaaactatgtaaagaaaacttccttcaatttagtttgtatgggcattattaagttacctaaaacaaatactaagaattttgggtcaaaaggtatgttttctccacataattttgatgtaagagtgatatggttcaacccataactctttaattttgatatgggtgttcagttgctacttttcttctttttgcgggaaatttatttgcaaagcactcaatttactgctctgcaattgcttcacaggtaacattcatgctttcaaatctgtactgttcattcatctatgaacatataaatgtgaattttatactgcaaaaatagctcaccattcagtttcaatagtttatgttaatgtttccgtataacattggaaccatgccccatgcatccttttattagcaatattaactgctcagatcgggctgggggtgttatcttcagagggaggaaagtgtgaggaaaaagttttcatggcatcattagttgttcccctaagaaaaacatatgtattcacctggatatttacaattttttgtttatcagaaagtaaatgatgagtataaccctaatcctctcattttagtcctcattttagatcagtattccttattgaatgtaaaactgaagttacactgatgcatgatcacagaattattctatgggattggttgttatttgtactactgagtactgaccattctctcatgatatatgaacagagcatatgctcctagcaagaaatgtggcatgggtgagtttatagtcttgctttcaccatgtatgaaatgtggcatgtgagtttatactctttctttcaccatgttgactttttgcacatttatagaatcttttggtataatgctttgtgtcgattcacatgttttattaattattaacgaccagctgcataggaaaactgaggatgtacatggttgaaaagcctataacattattactatgttcatttatctacaatcgtttggatttaagagtttaaaggataatttactaaggtggttatctctggtaattagtttcttgtcttcatctactccttttgtaccagaaaaaataatttttggatgatgataatatactaaggccaactgcagatgttgtgactaatattgcacatcttcagtgcatgcttatctagggtggacactatgtttattcccgacagttcttaatcacttagaaatagggttatgaaattcagcaacatatgtgatttgatctgaaagaatcatcaaagagttcatctttgtgtaagcttatattataaaagattttatgccaacattttatctttccaacacgtgtcttgcacgtgcacgattactagtatataatctaaccctaagtcaacaggtcaaactccaaatcctctacccatccagatctgcaccagccaccaaccaccacccgagtcagtccgccggctccgggagcccgggagccacgcgcgccgccgttcgccagtccaccgggagcccgggagccgcgcgcgccgccttttgccagccaccaccgacgccgttcaccagtctgccagccaccacgcgcgccgccactcactgccttctctcgccgggatactaaagctgtcatcgccggccgtcgccatggactgaagtcgccgtcgccggccgcctttcatcaatgcgccgccgggccggcgcggcgcctgcagccatcttcaccgggagccgctatctgccgaccatggcttcggcctcccccccccccccataagctacgacagcgacgatgcaaggagcatttttggagcattgtgatctataatttgctgatttgttgaatggagcattttggatatatatgatataatgtgactgtgaatatgttgtttaaccgaggataggttcaccacgaggaaaatttcactgtgtggtgatcggggctgaaataattatagccccgtcgtggttgacgggggcgaggacggtgaaatattttcactgcggtgacggggacgcgaacatgacccccgacggtgaattcaccgttgccatctcagtagtgcctgtgcctatgctgtgaatcagctggggcaaggcaaacagttgattgatttacagtgctgcatccatttttaccggccgatggagtagtactgcaggtacaggagcaagcgaagcaaatgagagctaaatggtgctgactaggctccgagtcagagccaggctgcagctgacgtggtggggtcgaggggaggagggccggcgcggcgggtgcagccagtggccgacggggaaggagtgcggcgaaggctccctgccgctgaacctccagcgccaccgcagccttggccacctcgcgccgctattgaggttacccacagccaccggagtcgcacaccctcctctgcccttcctcctaagaaagagagaaaaggaagaaggggatcttcaagtgggtccaccattttttttccagatcaaactgttatgtaagtgccacgtggaatgaagacctagtcaaagaagtcacgtaggtgtcacgtcaaccaaaatagcggacaaataccactgagggacctcgtttgcatcgtttctgtaaattgagggatgtgttatatttggtattttggtttagggacgatttttgtaattcggtgaaaagataaggaacctcggtgtactttgtccatcgtataagaattagacggtccgattaaactaaggtgaagcccaataaagcaagaaaggcaaaggtggccctgcaggcatgacacacgacagcaggcgaaggcgaaggcgaaggcgaagcccaagcatccatcatgagagagaaaaagaataatatgccactccattcgttgggtttagacaaaatgtcacccactaaaatgcaaaggataaaatgccactgaatatattaccttcaggatattttgccacattaaaggatttgattttaagacaaaaataccctcgactgtggaaagaaatggaggaagaaagggaacggctctactcgctagtgacggaggcgagcacacgagcacgcgggggacgcgctacgatgggggaggacggtggtgacgctgacaagagggagggggacaccggatggtggcgatggggggagaaggatgatagcgctaacgggagggagggggatggcggtgttgacgggatggctttgcgcgctcgtggcttgtctcctccggcgccgcccgtacctggcactcactgctcgccgcctccggcgtcacccgcacgccggcgagcacgaacgccgttcagcttgaccttcttcggtgctgctctctcccctcttttttcatttctctccccagtcaaggatattttgatcttaaattctttcaaagtgataaataattatgaagatatcatattgagtgatattttatcctttgtattttagtgggtgttattttctgtaaagccgatgaatggagtggcacgttgtcactttttgtagcgcccattccgtcgtagcgcctagcgagaaaactatctcttaaaaaccctatttgcgaaatccgtttctttgcttgttgtctagtgtccgtgccaactcagatctcaaatccccgatctattgtcgagttcaatcccgaatccaaatccttcccaaatcaaatccctccgcaaaagtctatttagcctccctcgagttcgatgggtcgaatccctctcggcccatctcccccccccctctctctctctctctctctccctctcccccgctctgcccgtgcgctgctcacgcgtgcgcgtgagccgcgccgagccgagcgccctccgccctcgctgccgcttcccgtcgacgccgccgaaatcgccgcgccgcccgttgcttcccgcgcgcgcgcgccttggtggctgaccgcctggtcgctgccgccgtcagcatctcccgcgcctgcccgcgcctgccgcccgtgtcgccgctccgctccacaccggccccgccgtcatcgccatcgtcacgacccggcccccgccactccacgcgctagcctccaagggatggaggcagagctcctcctccctctgccgcgtcgcccccgctccctcctccttttcccaaagtggcaaggggcaaactccctttctcccttcctttttccttttcccctccccgccggcgtcatccgcctctgtcgccgttttggccgcgagcgccgagcgccagctcgcgccttgaccgcccaaggtcggtttccaaaccgacatcgtcgtcctataaaccaaggcgccctcccatcgattcctcctcccgtttcgcttgccgccaccgcgccattgccgcccctctgtctcgcctccgccgttcatcgccaagcaccgggagagccggtgcgttcgtggacgcggaaggggactccgggcgctcgccttcttcctcttccccggcccgaggccggagagatcactcccgtgccgtcggcctctcgtcactgcgccccgtcccgcacggtagtgcatccctccgttctccctcctcgttccatctcctccccttagactcgggtagtagcatgtgtagcctccccgtagctagccggcgctgccccgactgctgccgtcgctcgccgtgtgctcgtcgctgtcgccgcccgtgctccgtagcgcccgctcgtcgccggcctcgctcggcgtagctccgcccaatccgacgctagcaatgggttcccgtagccgcgtagatgctctcgccgccgggaatcggcccctcgtgacctcatcgccgtttcccccttccctcgccgccggttgccgccgctgcaatccgccgccgtcgagctccctccggcgaatccgagccgttggctcgtctcccctcgtcctgtgcaacatcccggtgtgctcgccttcgcctgtatcgccatggttcgctccgccgctcgccgccgtcgtccgccgtccgttccggccggcgtcgtcgtctacctcccgccggcccgcgtggcagccacataggcgccacgtcggcgccacctcggccgcgaccggatcggctgacccggccagccgctccctccattttccccccgtgcgcatggtccgcggtgagccgtgaggttgcgcgtgggcccgtcgcaccgcgtcctccgcgaaccgcgcgcatgcgctgcgcctccctccccaaaccctagcacgacccgcgtgcacctcgctcacggtgagccgagtcaccgacaagcgggtcccacccgggaccacgtgggatggacccggcccaccggctctctctctcctccccgcccgcgcgcgcgccctgggccgccttcttgggccggccggcccattaagcccggccgagccgcccctttcgctcgggccgcaccctagccgcccgagggaagtctaatttccctccctccttcttttcttttcttttctttttcaaaaaggatttaaataaatccttttcatttagaccaaaaatccaataatcttagaaattcaatatcttcccaaccgtaagtccgtttgactccgttcaacttccaaaattcctcaaatctcgagatctatctaatggcacgcttagaggtcaataatagggctttattttcgccgtttgctgagttgtcccgtttcgcgtgtagtttcggagcccgaagacccacagtgcgaggatttcgaggatcaagctcaagatctcgagcaaggcaagccacctttgaacatcttgagcctatatttgaactaagttatatttcttgcaaaatattatgcattgctaggattgcacttaatatgtttgccccaactacgaggcagaacggtgagcatacctaatttgttgcatttgatccttcctttgttaattgttataccatgttcccttgtacccacctagttgcgcctcagcaatcgtgcactctgcacgggtatcaacggtcgccttcaaacttaaaatctgagaaacatcttgggtaaaacttgggttttacaaaagacttggaaaacccgacacctgggtcggtgcttgcgaactaaatgaatttccaaaaccgcggaccggggaacgtaccgggtgtacggtttcccgctcttgcacttaaggaccgtttccttggaatttcatccgagcatatgatagtgcaaccacatgggtggaatgggacacccctggctgagtaattagctaatcaggggagccttgatgctgagagacaagtggatttgccggggtggtgtcggggaggacccctgggcttcctggcacagtatggtctgggacctaacctgttgttggtctgggacccctctcgtcagcatatggtaaacctgtgtcggctttggaaatgccttgtcatgaaagcttggaggtctcccgacgtggctgatcaccacgagctgggtgatccgggttagtaatgtcgtgtgggtaaagtgtacccctctgcagaggttattaaaactgttcgaacagccgtgcccacggtcatgggcggatgtgaggtgattcctagcgtagttttgtttactgccttgtgaaattgctgttgtggaatgggtttgatgtttggaaaatctgcggctgatgggatcagccaggcccgggtggccgtttgaaagctgttggccgggtgccaatcttgatcaattcaaaagactgatacattgcacatactccgaccggacgagacacactgtctcatccgtgtcgtttgagaagcactcacttagttgtttcagaaaagagttcaaataaaatcaattgcaaaaacaacagcctttccttgaagccggcattaaacacttatttcccatggcttgctgagtactcatgtactcacccttgctctatataaataatccccccagttgctgaagaagatgaagcggatcccgctgacaaggagttcttccaggagcaagccggctacgatgagttctagggtttcggcctagttcccaagtcgcgcctttgatgtttggtccaagtcttggcttccgcttcccttttgtaatgcagttgtgagctcgggatctgtccgcagcccaacatgacagtactcctactctataataaagagacctctgttgctgtaatattctgtcttcctgtgataccagcactattttctgggactggtatcgattaacaagttaatttggagcgtcacgggctagttccggttgggactagttcggggcgtgacacttttctgcgtcaggaggagcccagtttgggggccaaagacgctgaagcggcggtcgctctgcgctgtggttgtcgcagggttgttgggcaccggcgcaagatgcaaccccctacccatcatactgtacagtacagcgctgtgattgtgctgtgaatcagccggcgcaaacagagaaacagttgattgatgttttacagcgctgcatccatttttaccggcaaatgaaatagtagtactactactgctagtccagccagacgtccggtagagatgaaaatgaggtacaggagccagcgaagagaagggatgaatggtgctgactaggctccgagtcagagccaggctgcatctgcgcagcagcctatccaatctaatccacacgcagacgcaatactggtagtactgtgcacaaggacgggagaagcagcatgcctgtacaagagttttgtcccttgcgcggcggtccatctcgtcgcgcggtgcggtctctgggtgccgcgcgcggttttgcgaaatcggtttcttggctttgcgtcactcacatgagatgagatgagttgcccatgtgcaccctgctgattctctgattcgccctacgcgatggccggtgctgccggctcctgctccgtaaacagcgcttgcatttttccctttaaacaaaacataggtatctcttccgctccgttccattttctgttactcctactgtagctactctaatctcattctgcgtgccgcccaactgaatgagtaattaatcctcctcttccctaggtgattctgctctctcgtcttccaacttgcatcacgctcgtctcagacatcccgcaactgaccaccataccatacgtcttcctatacacatgtctcggatgattcaatacattagggcaagtgctataatgtttcatatgttgcttctacaagtgccacattatattgggtgatgaggtggaggagaaaagtaaagagagagatgatgagccacccctaaatcaagagacaacctccacacaaattttaaaaaggatgtgagagtattagatatattggtatttgtgaaataagatggtaaattgtatgggttgcctcttgctttatgagtgaataaaatagataaatttagagatagtagtcacatctaccatagcatttgccttatacacgcacaactgtggcctgctcttaatcaaacgaaaaaaagaaaaaaaatacagtactccagtagaaagagagcgatataaacaatacggtacgctgttcctgtgaaatctgcttcaccagcaccatcaccgcgatcaccttcccagacaggacagcttaactactgcagtactagtagcttatggctggcaaaaccgtgctatcaatagcaactggtgtactgtacaccctttttctgcagataagtttgctatcaatagggaaaaatcagtcgtacatatccacttattttgtccaacaataggctcgccgcgcttaagctggatacaaaacacaaagtgatcttgtttgttactccatactccgaaatcgtctccagatagataacccgaatagtaaaatgcgcagctacaccatgtttcccaggctaattgatctgtcccagcaatttccaaagcacacgaaaatccgtggagctaattgacattaaaaataccctacagctaggttctcgaacagaaaatcaaagcaccgactgcacctattccaaacaaacccactgaaaattgtgcgaatagtcaatcagttttaaattataagtcgttttagcttttatcaaaatcaaactacttcaaatttaattaagtttatagatgaatatagtaatattcacaacactaaattagttttattaaatctataattaaatacattttcataatatatttgacttgagataaaaatatccttttttttctacagatttaattaaacttataatcgagacggatagattatattataggatgaagtatgtaggagtagtttattaagggcatgttcactttaattttattttcaatcttaccaagttttgataaagttgtcaaaaaagtggctacatttagtttgctgtcaatttttagtaactataattgccaaaattttggtaactatactaaaattttgataattttaatgttttttttggcatcaaactgaacatgacatcaagcttaatgcagcttgactgttaatgtggtatgataactcgtactgtcgtacaacccgtttaatactcgatgtcactatcaagtcttttacagtggtaaagtacatttattacgaaggcagattgggggtggtgggtcacccatcaacgctccctttcgctgtaacgtggtccccaccgagacttgaccaaaaagcacatttgccacacgtcccccgagcgtgcaccaatacacgtggcatctcaacccaccaatacctatatacccaaccaccgctcgtgaggcccccagcttttaatcttatccactcacccccccaaccctttttacccacgccaaaaaaaccgacgcgcggcaaccgctttcctccacgtgtcccccatccgcaacgtccagtgagcatcggacggtctccaggatttaccccatgtgaaagccgttgcggtgaaaaggtgaaaggggtaaaaggagtgcgcttttttttcctttctgtttctccctcctctcgtgggcattaaaaaggcgcctcttttctccttcgccgcatctccccatccgccattgttgtgttctcatcctcttcttccatctctctctctgtgcgtgctctccgacgtctctcctctccctctcgcgtgcttggtcgctgtaggagggggttcaattgatttgaggtagccatggctgaggcactgtgcagcggcagcgtcgcgtccccgtgcggggaggtgggtgtggggttcgccgccggccttgtgaggggcgccgcggcggcggcggcgctcgcggagtctgtgccgattggtgggtacagcagcaagagcacgttcccgagtgggagggtggcgctcacggagaggaaggcgaggcccctgccacggaatctcgaagcggcgcatgggcaggtctgttcgtcagttcttcaggagatttttcagcacataatttcatatttttagttctaggcttttggataatactgcaagcatgctatttttaactctttttggggttgggatttagttcgagcagttggagaagttagctgagttcgcgtcggatgcatgctaacgttttcaagttttgttgctttttacagatgaacctgacgattgggaaggccatgaggtggtgggagaagtgcctgcagcccaacatgagggagatcgagtcggcgcaagacctcgccgactccctcctcaacgccggcgacaagctcgtcgtcgtcgacttcttctccccgggctgcggtggctgccgcgccctacaccccaaggtagaatccacgcccaaatcctcttcagtttccaataactgcaagtgttctttttcctttttttggttgctgatgagaatctgtttgattgtgccgtgcagattgctcaactagccgagaagaacccggaggtgctgttcttgcaagtgaactacgagaagcacaagtcaatgtgctacagcctccatgttcatgttctgccattcttcaggttctacaggggagctcagggccgtgtcagcagcttcagctgcacaaacgcaactgtaagctcctccccaaattatgtttctgcaaccaaaacaccaatccatagtagtgggttaatgtgctaacatgcattgctgcaaatgtgattgcagatcaagaagttcaaggatgcacttgccaagcatggtccggacaggtgtggcctcggcccggcgaaggggctcgaggagtcggagctcatggcgttggccataaacagggacctgaacttcacctacacaccaaaccaagaccttgtcccaattgcagacgccctcctgaaggaagctgctgcacctggaggtccatggctgccattgcccgcaacggcgacgcagctgttcattcagggatctgagaattcgctgttgtcatctggaagatagccggtggttcgacggcaagattggcttcaatttgtacatatttttccgcttgttctagcctgatgttatgacatgctgatgcgcaggctcatgatttttgtttatgagcctgctgagtgctggaggcatgaaattccttgcctgacggacctgtatgcgtgatgcacgtctgcatcgaaaattgaacatgctagattcattcatgattgaatcccgtaatccctgtagtattcaggtcttgaaagctttgagttctgaatgagtgtacttggttgtgtcgaaaatgtcggtacttggatctggatgctgctttacaccatgtcatgattcaggaagaaggttactgctgcctaatcaaaatgagagcaatacgaattgcattgttgattgttctgttccatcaattgggtacagcggtgccaatttgtagtattattgagagatcatgggtaaggtagagcatgattcttttgtcatggaagagtaggcaacggcgtagtgggctcaatattgcgagttggaaggtaacgcatggctgtagtaggtccttgtcactgcactcacatgagggtgtcatctttgtcttgtacagacggatagagtcgttacggatattgttacgcaggaatcagctatacacttgtttaccatcagaacaaaacggtaaaatcctgatagggttgaatttggaagtgaattgcagaactggacaattcggattggtaaagaaaagccatgtcttgacagagagtttggaaactcaactacagaacttgacacgtcaggttgggaaaagaacagcgattgaaaagagtagttcagcatcgaaaaaaatatctagacacaacagaaggggagcaacctggatgaagatgaagatgaagaagagctatccaattcgcaagggcattgtcaatttctgatgcagtcatgcagctgacgcttttggccgtctttaacttgtggcacaatcgtcgtcgtctttttcctcaaagtgtctggatcatccatgaactgacttgaaaaatatctgaggtgtgataactaccagaagaatggataaatcacaagtacataacacaaaaaataagatcgataaattgggtgggaagcacaaaatttgcagattttcatggatcttaccagttaccactaacctcacacggttggaaatgatgaaaagatggaaggacaagatgagaggagggagggcctgaatttcaattgggatggacggaactggtggcgaacttgtgccgcgtcgaagtcgaaccggccggccttctctccggcgggcggcggcgatcgtgtcttgaggagaggagagacgctgaacagaaggacactccgcttctttcctcggatgcgatttgtcccagttacagcccaatatcgaacagagataacaactgacggcccaaagtggggcctgttactaggtgatggcccaacagaggaccatgaatgttctatcgtagagcttggcgggcccattaacaatcagcaaccccgggctggtcttggaccacacatcctccaagaatagcccgttaacacaacacgagtaattcggaaggaataagtaaccccggcggcgagtgaccggagaaggcgggtgagcacgcggccggcggagcggagtggcgacagccgtgccatctgctgccggctgtgcatcgagaagattggagaggaaaggagaagagaagagaagaaagataagaaaagagaaaaaaaatagaagaaataaggtatgtgggacggtaagtgaacttattccaatatggaacggtccgacgtcacagcccatatggcctgttaaagcctgcttgccatccattaacatttctttagttgaaatccggaatttctatctagcgctgtttttgaaattaatgtttctaaaaatagtgtgcgtagtccgatgacctgaaaaattcgtgcgcatatgcccagcatatatgcaagttgaatcaagccccaactgtatgtgtttatatatgtgtcgcccagcgagaggagctcttattgccaggtaattaattaacttgtacaagatacaagcacaccacacgataatcatacggtacggacgagcataagttactcttagctacgtatataggtgggtagctagcagagaataattattctgcaccagattcgttgatatcaacttgagccttgatagagagctggatcgatgtatcgatcagctcagtagtagggctggatcttccagcgctggttgtcgccctcgcaccacttccagagcacgatgtcggtgccgtcgcggacgccgccgtggtacttgtcgccgtggaaggcgtcgaagttgaggtagatgttgttcaccatgcggatgcacctgaacccgttccccacgtcgcggctctccgtccacagcaccgactcgtccatcacctccgggttgtacggcaccagcctcacctgcacgcaagagcatcgtcgtcgatcgccatcaatggccggcggattcagattcagagaaagaacgctgagactagcttacagggtgtgactggccgagggagtgcttgatggcctggccggtggccttgttgacgagggcgaaggcagggtagccctcctcgtccttgatgctggtgctccacctcatgtccttgatccaatgctggtactcgtccttggggttcgccggcgccagcaccaccgcgccgttccgcgccgtcatcgcgtagttcgggttcgcccggcagtacaccttcaccgtcggctgcggcggcagcgtcctgccacacccgttcccctcgatgttcacctgcgacatcccgtacggcgccgccggcgcgtaccccggcgtcgccagggcgccgccgccaccgtacccgccatacccgccgtactgctcgcgccgcccgtaaaagtccatggcttcttgatttatgactcgctagctacctagctaattaaacagagattgtatagctagctgcagagtgcgttgttcgttcgatcgttgatgtgctgcctctatgcatggcaatgggatgggggatttataggggatgatcgattgatcagtagcactgatcgagatgctatctatctctctctctctctctctctctctctctagatagctgatcgatgtgcattattcgtgcactgcatggtcaggggcttaggaacttggtaggatagatgatgccattccacacttgcgctttcctggggaaaaggtgattccatccatccatggtgctttacgtgattccgtttctagtcgttttgggaaccatctcgatctggctgccgtattattgcaggcgagcgcgacgcgagacgatagcaaagcacacggtgcagctccatcgcccggagaatctcacgtattctcatgtccttgctgcgttgtgatcaagcagagaaaaagtgctgcaattccgcacaagaaaagattaaaaaggaataacgggatcgatcgagaagaaaaggaatcagccaagcacatttagaaatttattagggattacctatacaatttttcgacagaaaattccccgggcgtgcagtgtatccaccagaaatttgaaaatttggccaaaaaggaagaaaagaaaagggagttgggggtgggactaatgggtctaaattcttaacgggccgatcatgaacggaagttacacttattctccctcaactacaataataccgagcataacactaatcatgtcgtaaagtgaccattgagcagcttgaaaaaactaaaattttgattacgaaagtcgataaagataagagtttcatcaagatactcttagataggacaagaaagagcaaatttgattgatgccacctctattagtttggaacaattagaaaagtctaaaaaggaaaccctttagtttgaaataaaaagagtgatgaattaggtccaacaatgagttttccaacgaggtcgtacaaggagctctagaaggaagctaacctagttctcaaaaaaaaaaaagaaagaagaaggaagctaccttattggcaagttgtacggtggttttctacaacatggcgttaattgcatagtggaaaaaaaactggaacggactgacagtttaaccggaaaaaaatcggaaccagaggttggcggccggttttgtgatgaaccgggcaataaaccgcctttggtccagccggactaaggcaagtcaatgaatgaatgggccacacgatggccggttcatccctggtcaatgggatgcatggcaactcccgtggccatcctaccaatcggatgtactctctccgtttcaaaatgtttgacaccgttgactttttagtacgtgtttgatcattcgtcttatttaaaaaaattaagtaattatttattcttttcatatcatttgatttattgttaaatatactctcatgtacacatatagttttacatatttcataatttttttgaataagacgaacggtcaaacatgtgctaaaaagtcaacggtgtcaaacattttgaaacggatggagtatgtgttagcattgaaatacatacgttacatgcatgcacttagtaaactgcggttcgatcggctggttcatggtcaaactgtccgagaccggtgaaccagaagggtgactgggtcatctaccggtccggttttttccactatggttaagttgcatccggtaaggaaaaaaaaggtgggactcatcttctcccttcacacctccacctctcctctcctctcctctccctatccccccgctctctctctctctctctctcggacgggcactatggctcgtttgtgggcatgtgggcatgctttagcgtaacactatggttcattggctaggttggggtctctgcgacccatcgaccaaaggcgtaaggtggagagtgaggaatgaggaaggaggagggacatgtttagattgtagccaaaataaacgttaccaagttttggcagtgccaaaatattggcaagatgacaatattgctacaattttagcaggatttgtgatcaaatttggcaacaaactaaacatagacatattttttggcaactttaccaaaaatggtatgatattaaagtgaacagacccgagattataacatctgggaccaatgattttttttaaatcagacatgtggatcctattcttcatatgtttttttgtttttttccgctgattgtaattacatgtaagtgacttatcaggtgaagactaggtcaatattttttccacatatgatacaactgccgtctaaaccaccgcgggactcgatatacaatgttttgatagtaggggacgctctatacccattacttgaggtatctaatgtgaactcttttctttttgtggctacctgcactgtttgtacgtatgggccatgatgcagcccagtgcactaaagcccaaccaggactgccttgccggcctcctgcgcttggtgctcttcgatcgtgtgtcctcctccgtggcctagccctagccgcccgttccaatccaacggttcgcgacggccagaaggggttcgtccgggtgaataaaaatccgaaccccttcacgagatcgacgccttggacgcctctctgcttttcgagttcgacgaaatcgggtttcgtcctacccaaattcaaagcattttgtttcatcattatgacttggagaacgtgttccagtaccacgccttttttttcagcaaaattacacgtcacaaacagaagaaggggaaacaacagggtcgagacaaatgagccattcataattcattcattaggcatacgaaaagtagagagtacaggggaaagcaagatgagttgcatcagatttctgaatcatatggcccctcctcctgcacttacatcacccactgtttcatctcatagcaatcactggctcgcaaaaggacacacactgacacaaactcgaggacggacggacaccattgactgccatactccgatcgatcgaacgaacgaacacggtcttatttcggtagcagatcgatcaaattattagctagagtagaagcagagcagacgcgacgacgatggcaatgcaatgcagctccccctccccggaatctctgcagatgcaaagaagcagcaatccaagtgtcagaatctctgatttcttcagaggatccgaaggaaattaatcgatcagcgatggcattgtgcattgttagcggtggaacttacaccaggggaggatcttccagcgctggttgtcaccctcgcaccacttccacagcacgatctcggtgccatcgtggatgccgccgtgatccttgtcgccatggaaggcgtcgaagttgaggtagatgttgttcaccatgcggatgcagcggaagcccttgcccacatccttgctctccgtccacagcacagactcgtcctggtactctgggttgtagggaaccagcttcacctgcatgcgcagagaaaatcgttcgttgtgattcagagattcgttgcatatgtaagaaaatatttattttgtaagaaaagatttgctcaccgggtggccctgtccggtggagtgcttgatggcttcgccggtgaccttgttgaccagcgcgaacgccgggtagccttcctcgtccctgatcttgttgctgtgcctcatgtccttgatccagtgctacaaaccacaaccacaaatctctcaaggtttttctctatctgaatagtagtatataattaagaggagaatacgtacctggtagtcgtccctggggttcttgggggcgaggcaggcggtgccgttgcggacggtgaggcagtagtcctcgcctgcggcggagaagacgcggacggtgtggacggggacgccgccgatggtgcaggcggtggcggcgccgggggaggaggagtgagcctcggggccccaggggaggatcttccagctctggttgtcgcccttgcaccactcccagagcacgacggtggtgccgtcgcggacgccgccgtggtccttgtcgccgtggaaggcgtccaagttgaggcgggtgttgttgaccatgcggatgcagcggaagcccttgccgacgtccttgctctccgtccacagcaccgacgcgtcctcgtactccgggttgaacggcacaagcttcacctgcacacccatcacccgccatgagtccatgacatcgaagtcaacgttcttcgatcttccatggcagcacgcacaaagctagcagcaaaatagaaatatagtattacggggtgggactggccgagggagtgcttgacggcgagtccggtggccttgttgacgagggcgaacgccggcatgccctccccgtccttcaccttggtgctgaacctcatgtccttgaaccagtgctgcatttcaattcattccatttcagtatacatcaaaatccgatcgaatatagaaacaaaagaaaaggcatatataagaagggggacctgacctggtgctcgtccttggggttgacgggggcgaggacgacggcgctgtcgcggacggtgaggcagtagttctcgttggcgcggcagaagatcttgaagatctggttcgggtccgacggcgccgccggtgcctggttgtggtggtgcccgaacccaaacatcttcgacccttaattcgatcggtgcaactcgcgactcgcgagagaaatgtttttgtgctgcgactgcgagcgatgatgcgaggaggagcgagaggtgccacgttttatagaaggccaaggccggccactctcaccctcacccactgatcgatcggctcggctcgatgacgcgctctcctgtgccaactcccacgttcgctgacagctgggcccaccggtggtcctcgactggctcaaacgcgtgacatgcgtgcgtgtatgttttgcattctagccgtttgatttgaatatttgatatgatatgatatatctttggtgtttaatgtactctcagattcggttccatgaacttgacttggatgctagtaccagtaattcattgtgctgagatttgcattactaaatgtgcgagtaaatgcaaagatttgattactggtgcacagttaattgctctacttactcagtggaagactagagcagtacaccaacttcattgagtatttttggagcagcctgatttcttacaaccggataacataatatcactaccattaccgtgacaggtatgtgggtcatatactcctattgttccacacgtcagtgcttgtaatggtagtgctgccattatgatagagaatgtggatcccttccaacttgtaaaacaacactttctttttcagaaaagcataaactctttcacccgaaataaaaattaaggggaaaaaaacaatctttgcttaagaaaagaacaaagagagatgctgcttgctcgctttccattgtccgggaatttcgaccattgttttccccaaaatcgaaaggtatgtcgccacgaaggacgaggtgatcgaaatgcatgccgtggcccaggattgaagcgtgcacctgacgcaaatccataaaacaagctaagagatgtgattccagctagagatgacccttgtgacggtcgttttgtacgtttgcatccctgtgctacacaagaaacaaaggcagttttacttttctgaatcaccatggatcgcccatggatggatggttcgatcatccctgtccgtttccaatgagcacatctaatctgacctgaatgatgcatgatgcatgaaaggtggtaaaaaagttgttaactgataagagaataatctttttacccggcaagctgctctatatcacggccacgcagcgcctgtatggccaagaacgttccagatttcaacacctaattaatcgacgcgtcgcctgccttttgcaatgcttttacaggcttaagctttgttgttgtgcttaacaacaatgcagcaggcagaaaacgggttagctacatgcatctccctttgatttttgttgtcacgtactactctctcaacttgtcaggatgaaaagtttcgactctttaactttctcaaacgaaaacaagtcaagttttcgcgaacatttggagtgctgtgcagatagcaacgcgttgctggtttgtagtagtatagtaccgttgtttcaaccgttctacccttatagctcccgcaatggtaaaataaggtactctctataaaacatatacatctcagcaatagactcgattaatagtaaaccaccttaatagtatgtctacatttgtatctatagctctctcatgcattgcctcgtttttctctatagattatctctaagttagtagatagctttactctctctcttcatttaataccttctaagtaggaaaatatactgacatagatcttttgtagagagcttataaataaccagtgataactttagaggagtaggtgaagcctgtccttaaactcaccttacaattaggagtagtaattgctatgtgtaggttgtcctgtggagtttgtggacgttggagcagatgatgttgcatttgctaaattggtaatggtgaatttattattgtcttggtgtgattaggtgaacacttttgtcctgtctagctagtatagtactccacaaaccaaccttgacgatttcaacagaaaataaaaaggctaatctaatctgttagctaagcttggctgggtttatctggactggatggatcatgggtgtgtgggtttagctcaggtaggcacacgttttgccaccctgctcgtatactccctccacccttaaaaaaaactcaacctactgatctcttctagttcagatttattgtcttaggatgtaacctcttctaggttaagttttttagacgagaaaagtattactctatgatatctccctcgtcataatcgaaaacaagggtgcttatctcatgaagtgccatgtggatgtggatcaacaatccctagctcaaaagcattttagcaggggctcggtttaagaaaaaatgttgttttcgcaaagggttactaatatatattactccctccttcccatattgtttatcatataataaaatttaaaatttcttaaattaatcatcatataaccgtgcgcatggacacgaatttcatcggaatacaactaatgtagcaagagagaatgtgtgcatgctaaaaatgtaattggcatggtattttaatcgatgcatgtattgtgaaagaatatgtgtatggtgtctttattgatgcgatttaaattattcttgttcttggtgtataaacatactatttatggttaatctatttgggatgaagggagtactatttatggttaattatttttaaaattagaacggaaatggataccttgacctttccattcgcatggcaccgtgttgccttgtgttttaaagttttgaactcaattacatactaccttcttttcaaaatgtatagcgcctttgatttttttataacatttaatcttattaaaaaataatatgtaaaagtataaggtaagattatattttatttgatgataaaacaaatcacaataaacaataatatttatataatcattttgaataagatgaacgatcaaatgttatgaaaagtcaacgacgtcatacattataaatggaggaagtactacttatagtgtagtcacagtataactaggctgtaattacacccgagttacatcgatagtttttttgtttaaaatcgatcgatagcgctacaggtagactctttttttttttttgtagacgacgtattcatcaacaaggagaccgtgagtgcttttttatattggcacaatctttgggtgtgctttatattggcacagtctgtaaaggtaggatgtttgtgggtgcacggaggctgtgagcatgtgtttagcaaagaaaaaaaaagcagcttcaatgatgccttcattttctcttgaggaaggatgttttgggctggtgaaattcacgtactgaatgtttggatcatcgtcgtcatgtacagctaataggtgggccattcatattacgaagtggaggtccaataacaaaacttgggccatatttgttcggaaaaaatggatgtatttaggggtaagcaagaaaaaactgaaaccaaagaccaagctaaactgaccataccaagaccgagaatttcggtatctatactgaactaaccaaattttgttcggtcatgggcttcggttgaccgaatcaaccgaaataccttctaagccctataagcccactaagcccgatagagaaactctaattttccacccctccaagtcccaacaaaccccacatccacaccacccaccctgccaccccggccttttggttgttgcgtcgccgtcacccgcttcttcttgccttcgcgtgttgaccaagccagcgcccccctccccctccgcccaacaagaatcgcctcagcaccatcgcgttgtgctcgcgcctcctcctcgcaccacaccgccattgtatagcctacctccgactcccctccagtcctctactcagacctcctttcttgctcatgctggcagtggcgcctcgactccaacgatggcgacatacagctggcctcccctcaacctctctgtccactcctgcacgtaccggcggctactcctcgactccaacaaagacgatacatcaagccgtcatccccttccctctagcagttttcttgatttgggcacaaggtggagatggcggcggagcaggagggcacatgcaatagtcggtggttggttgaggggctatcgacgaagattgcaacctggcctccccagcccccatccactctgattttttttattttggataattttcttgtgattttcttaatttatctcctgattattttaatcatgatcaagatcgagaccaaatttggtggtcttgataaatttctactattgtccagtctcttttcaataaccgaactaaccgaaaaaagacaggatatcaagatatcaagatcaaaattttcaatctgaccaaatgcccaccccttgatacatatgggccctattacacttttcactaattttggcccgtttggaaccttgcttcttgtctccgtctatactctagtactagtctactcttccaaagagaagatgcagattgttcgtctgtacttgatacatcagcttctcaatccaaactgtttgcttagtttggacggtttttggtgcacatatggagataattaacgtaggtttgctcaactgctctttgactaaatctgattgtgttgcgtgtgcatctcacacccaaaagtgcattgccaatcctatatataagaggacgagcagttcatcattttttttcttcatgtttagctgttcggccttgttgaaaaaacagcactacattgttaatttcgtccgtgatgtaagacttggacgcttgggagttaagagttagaccaatctgcatttttccaagataagaattgaattggacccatcggcatgcgaacaaacggtagtgtacctgcagagtactgacgatgggctgacttgatggcaacctagaagtctctagtccttaggagtagtagttcttaacaacaacattagactcggacttttgcaagcccttaatctgaaatctcgattctgttataaaattttagttagctgattttacgatttttacaatttttatgtatatatacaattttatgattatggccttacacggaaatttttttgcgaacgcgcaaaaggattgcacgtcagtatattagcaggaaaagagtttttgttacacaaaacaatcagccagactggcttatgcctaaaaggggggggggacttgaagctaggaactactacgacggttaaaaacacaactccaaacagcgggagggggcagagccacgctacatttccaagaaaaccccaaaaaaagtaacactagctaaagaccacagctggccctccgagcggatggactccagaaccactgcaaccgaagcgagcacagagtcgaaaaccctggagtttcgttccttccacagctgccaggagactaggagtaccaaggagtcgaagccgctgcggaggtgctcaggtaaatataccctggaggatgaccaccaatcctggagccaactgccacgagggggagagagggcagcccagccaggaggggacaacacacggagccagacctgccgagcgaacacgcaatcaatgaggatgtggttcgctgtctcaagctcctgagcacaaaaggggcaagcagagtggctatcgataccacgcttttggagaagatcggcagtccaacagcgctgctgaaatgcaaaccaaaggaagaacttgcatttagcagggcccttcgcgtgccagagtaagtcggcacaggcaaaagagtgttggccaaggaagaacgcctgatacgccgatcgcgctgagtagcactggtcacccgtccaacgccagacgaggtgatcctcaacacccggcgagagctgggtaggaagcaccgcgtcccagactaacaggaactgagagatgactgggacagtgagggcgccacgtatgtcaccaacccaggagttgttcgctaacccagcagtaactgtgcgcgatccccggaagcgtggaggcacggcgtggaggaggtcaggagctatagaagctatcgagcgaccatcgatccaccgatcagtccagaagagcgtggactgaccatctcccaggatagagaaggtggatgctgcgaacatgtcggagacactccactcaataggggccttcagatcagaccagtaggggtgtcccgagcgctgaagccagagccagcgaactctcaaggcaaagccagccaccctgagatccggaatgcccagtccaccgagatccctaggacgacaaaccctcgtccaggacacccggcactgtcccccattggccgagtctgtacccatccacaagaaggcgcgacgcttcttgtcaatggctttgataacccagcttggcaagccgatcgccatagaaacggagaaccgactagactagaaccgagcgacccgccagagtggttagacggcccttccagggggggagccgatgggagactttatccacaagcagttgcagggccgcttttggcagcttgcgaactgacagtggaatgccgaggtaggtgcagggaaactccgagatcgagcaaggaaaagaggactgaaccagctccaggtcaagaaccgagcagcggatcggagtaaccgagcacttggtgaagttggtccgaagcccggaagcggcaccgaagacagagaggatgccttggatgaactcaaggtcttgccgaacgggggaaaggaagagaactagatcatcggcgtagagggatgcacgatgtcgaatagcacggtcattgaggggaagaaaaccacccgaatcagaggctttgcggagcatcgcattgagcacatccatgactagaatgaaaagcatgggggaaagaggatctccttggcaaagacctctccgatgggggaaccatggacctggcaccccattaaccagtacccgggaagaggaggcactgagaatgagggagatccaatcacgccaacgttgactgaagccaagctgggctagcacctcaagcaagaaaggctagctgaccatgtcaaaggccttcgcgatatccaccttgagaagaagtcggggaacgcgtttggcgtggagcgcccttgcctcaatctggacatagcggaagttgtcatggagagagcggcccttgatgaaagcgctctggttaggcgccacaagctcgtccaggcgaggggagagacgagaggccaagatcttggagaacagcttcccaaagctgtgaataatgctaatcggcctgaaatccttaacatcaacagcctcgtccttcttcggcaagagggagattagggcgtcgttgagggaagcaaaaccttggccgttggtcaggaacaaggagttaagggccgccagaatttcgaccttgatcaccggccagcaagacttgtagaaacggcccgtaaaaccgtcaggactgggcgccttatcagagggcaaggacttgatcaccgcccagacctcatcctctgtgaagggacagtccagcccctcaagctgcgcagggcggaggccaagagagtggaggtctagggcgagttcacgctcgaagctcgtccccaagatggcgcaaaagtgagaggaggcaagctcttgcagcgcatcatgggagacgacaagctggtcaccatcacgaaggcgcgtgatgaagttcttccgcctacgagctctggcgtgcaggtggaagaacttggtattggcgtcaccctccttaagccagaccaaacgtgaacgttgacgcgcgatagtacgctcaagcgaggcaagaccaagacacttcaactttaaatctcgccacagccaggtctccaagggggaaagagaccgactctcctgcgcaacatcaagccggaagacaagttccttcgccatctgaagctgcagacgaacactgccaatgtgatgttcactccagctctgtaagcgcttggccgtggtagagaagcaccagggaagagcagcaagagggggtaggttggtagggggatgccaggcgtcctgcacgacttgaagaaagccgtcgaacttgggccaaaaggcctcaaaacgaaaacgatgcgctttcggggaggtgacgcaggtatgaaggagaagagcacagtgatcagaggtgatagaagaggccgcttggaggaggcaagaggggaaaagctcctcccaatccgcagagaagaggacgcggtcgagcttaacaagcgtaggcgactcgcgctcattgctccaagtgaagcgacgtccgtgaagcagcagctcctggagttccaactcgtcgacgagtcgacgaaaacgacccatcatacgacgattgagattaaggttgtttttatcccgagcttcgagaatgaggttgaaatcgcctacgacggcccacggccccgtgcgagaggagcgcagcgaacgaagctcatctaagaaacgaagtttgtaaggctcctcctgtggcccatagacgatggagagccaccagggggcgacatcagaagagtgtcgaaccaacgcggtaagagagaaatccgcaaggtgaacatctgagacagaccagacagtcgtccgccaggcaagcaacaccccccactccgaccgaccgcagacaagaaggaataatcaaagtcgaggcctagcatttccagaatagtacgagaggggattacatccataatagtctcctgaagacagagaagagagacatgctcatcacggactacatcacgcacagcatccgggcgggcacgcgagttcagacctcgcacgttccacaccaaaacgttctcattgcatgatcccattgagggggaccacaccgagagtagaagagaagaaaccgatcagccgcacacgaccaacgcctccgcagccttgcccgggggcaaggagccggagaagagcgaggagagcgcgatgatgtgctcctgggaaagtggcttggagaagagggcgttgtaagccgcgatcgcctcggccgtgaccgggcccctctccggaactaggccgagcttccgcatcaggttgcgctgggcgcgcgacactgcgtggatcggcccctcaagcgcctcaagtgccatcttagcagcgatacgctcactgcacttcggcacaacctccaccgccttggcggcgagaggcggcagcggcaaaggcggcgggaggagcgcaggagggagtggcctggagcagctggtgaggaaggcgcgaagagcggcgttgttacacggaaattttgatttaattttatgatcacaacgatcttaacaaacctgctctgtgcaataatatgacaataatcttcagtgttgacttaattactcacggccttttatagctagcggaattaatcgcgggtattaggtgtggtgtcattgggattaaccatttgtcataattgagtcgtcgaagcagatgtaccaaacatagatcaaccgcatagtactgtagtagagtatcaaaccggagcagtactcatctcgccagaagcaaactgggcagagtagacaggcatctcatgacatgaactagtagaacttcgtacaaaagatgcgcatatacgcatggatccacaccaaatagcagggagggggtcatctgatctctgctgacagcgagaccctgatttattctgcagtgacataaacacaggacacgcaacagtaacacgacatgcatgcatggtcgaactcgaacagtgccaaatgcaagcacaggtgacggatcgatcgatgcttttgttgacggtctctcgatttctgcgtcagaaggaacaaaaccaaacaatgtcagttgaaagattctgactaattaagctatatatcggtgataattacttacaccaggggaggatcttccagcgctggttgtcgcccttacaccactcccagagcacgacggtggtgccgtcgtggacgccgccgtggtccttgtcgccatggaaggcgtcaaagttgaggtagatgttgttcaccatgcggacgcagcggaagccatggccgacgtccttgctctccgtccacagcaccgactcgtccaggtactccgggttgtatggcaccagcctaacctgcgtgcagacgaacgtgtcagatcatcaactactagtgtagtagtggttttgcgacaaattcacatcatgtgacgccattccagaaatcgtaagcgttgattgctactactacgacgctccaaccactacgttgactgattttttgacatatatgaaacagactgaattaattatctaatgaagaagatgtatgtatgtatgtatgtacatacagggtggctctgtccgagggagtgcttgatggcttccccggtggccttgttcaccagcgcgaacgccgggtagccttcctcgtccttgatgctcgtgctgtgcctcatgtccttcacccagtgctgcaaatcggatttgaacatgattagaatagttagacaagatcacgatggagttgatctatcggtgttaagaatttgagatggaattgtatgcaacggaaataacctggaagtcatccctgggattggttggtgcaaggcagacggcgccgttcctgacggtgaggctgtacgcctcgtcggccctgcacaggatgcgcacggtgggctccgacgccagcgcgcggggcagccggttgccgtaccctgcaccgggtggtccgaccggcggtggacggtagccgtagcccggctcatcgtggctcggtggcggctgcggcgggtagaacgcaggtgcggggtggtagccgtggccaggttcacggttgggcggcggcggcgggtatgcctggtgcccgtatgctggcggcggcggcggcgcgtacgcctcggggccccaggggaggatcttccagcactggttgtcgcccttgcaccactcccagagcacgacggtggtgccgtcgtgcaccccgccgtgggacttgtcgccgtggaaggcgtccaagttgaggtagatgttgttgaccatgccgatgcagcggaagccatggccgacgtccttgctctcggtccacagcaccgactcgtcctggtactctgggttgtacggcaccagcttcacctgcatcaggacaggagcgtcgatcgatcatgcatgtaaaacagttaagatggcgcgcgaagactgcatgcgtggatgaactaatggtgattgacatacggggtgggattggccgagcgagtgcttgacggcgaggccggtggcgcgattgacgagcgcgaacgccgggtggccctcctcgtccttcaccctcgtgctgtgccgcatgtccttgtaccagtgctgcatgccatggtccggattagagagaagctagtaattaagagatgagcacagagccacatagcatagcagaagaagaaaatattatggtggtggtgcctggcagtcgtcgcgggggttggttggcgcgaggacgacggcgtcgtggcggacggtaaggcagtacccctcgtcggcgcggcagaagatcttgaacgtcggctcgtgctggggaccagtcgccggaggctggtattggccgtggccgtgcccatggtggctgaacatgctagctagcttccaagggccggcgtctggttgtctcgctggtattcgatcgttgcaaatggcacctcccgggttatatagaacaaattaagctggaggccggccggcgagacgttcgttcgttgagaccgaggccgcgtacgtggtgccgatcgatgagaccacacccaccgtgtcgtgtcatgtcatcttctggagtacatagggcctgtttagttcgcgaaaagaaattttttagtgttacatcggatgtttgaccgaataacggaagggttttttggatacgaatgaaaaaactaatttcataactcgcctggaaaccgcgagacgaatcttttgagcctaattaacccgtcattaacttatgtgggttactgtagcacttatggctaatcatggactaattagacttaaaagatttgtctcgcgatttcctctctaactgtgcaattagtttttttatttatctatatttaatacttcatacatatgtctaaatattcaatgtgatattttttaggaaagaaaatttgagaaacttgtcgtttccgcagccaagtccccgttgcccccacggggtcaccgggtgggtagtctcttctctgtcaaggcaccggttaaatgatccacgacagacacctggcgtcacacctttcaactttcaactattacatgaccacaaaggatgttgattttgattcgtgaggggataaccctcgttgtcttgtctttatgtcagtcaaatggttataaaaaaatttgaaaagatatattaacatgtgatatatcactccgtaagttcaaatttaacttctatatcttgtaacggaaaaaacaaatttaattgtaaatatacgttaacaagctgcggtttaatttgttttttcgttatgagatatagatatgaatttgaacttgtaagcttgtggagtgttatatcacatattgatatatcttctcaaattttttcataacagttaagtaacatgcaaataggatatcccatgcagtgatcaaagatagtttccctgaccacaaattcattcgctccggcatcaaggaattctttgggtttgggcctgcacgcacacaagaggagagagacggggcccaggcaggtggtatttgggccattccccgtggtggtgtctcatccttgaataagttcactttaggtccctcaatttgttgtcgtgtctaaaattcatccctgaaacacaaaacgggtacaacgcatccctcaacctataaaaccgtgcaaacaaggtctctcagcagtattgtccttggttttggcctacgtggcttctttgactaggttttcatcccacatgacattgacgtggcgcttatgtggcaattcatctagaaaaataataaaatatgtggggtccacatgtcagtttcacacacaaacaaattaaaaaatggtggggcccatgtggccccacatgtcatcctcactactccctcttctctctatccctctcctctcttctctgtatcgtctctctctccagccggcggcgaccggagcggcgactcccggagcaagctggtagagcagggcgggcagcggccggaacgggtgattggtggggcggagcggcgacggacggagcaaaggggcaaagcggggcgggtggagcagagggcaaaggggccgcgggtggagcggcggggcaaagcagggcgggagaagcggcagcgaacagcggagtggagcggattgtcgtcgtcatgtaactggcctaccaatgtgcccacaccgacgccagcggcatcatcctgctcctctaggatgacatttcaatgtctccgcaagagatgaaaaaatcccatctcatgaggacgtggagacgattaatttggcggcgacgagctcccgggcgagctcgtggacacaacactggtaccctcgcacgagctccacggcctccacctccgcctccccgagttgcacgcacagcgccacagccgcttcagctcggcgcgccaccgctcggactctagctccgaccacaacgccaccacctccgctctagctcggcgctccgccactacaggaccttcacctccccctcctccttcgcgcgccttcttccctctggcgacggcggcgatgctgacgaaaatggctagtgccatatatgaatcaatcgagcagcagctatgtcgagatggcataaaaaattggccacagcaaatcaaacttgctctgcttctgcttggtgattgattgcgggtagctgtatttaaggacgagttcgtggctgggaaggcgaccagttcagtgcacctgggacatgagcggttgcagccctgctcgtgcagcaccaccgccgtcgcccactgccgctccgcctactccagcagcgccaccttcccaccccgtgctcccacgtcgctgccggagcaacgcgtggagtggtctccttcgacgacgccggaaaatggatggtgctcgccggcgaccgctcgagctcctcctccggccacctcgaggaggcgaggggggtggctgctctcgctctagccggctgctggaggcgaccgctcagcgacatggccggatgggcgatggccccaccctcttttattattttgtgtgtaattgatatgtgggtcccacagtttttaaaattattttttatccgattgccacgtaagcgccacctgggacgagacctagtcataccaaccatgtaggcgccacgtcatctcaaaccgggcacaatactaccaacggacctcgtctgcacagttttggtaagttgggggatgcgatgtatctggttttgtagacggaggatgaaaatcagactgggcgacgaattaagagacctaaagtgaacttattcctctcatcctccatccccgctgcttccggcggctgccgccattccatctcccacttccccgtccattgccatcaatcctcacgccaagctagctatagctacgatggaacgcccttccactcccgactccggttgggtcatcctcagcaccatcgccgtcgccggccgccgccacagcaataatggtagcaccgccattaattggcaccaccaggaacggaaacaccatcgatcgaggtatgtatccctctagatctctcgcccacccaccaccaaatccctccatcgtcttcgtgcacagctccgacatgaaccccgccctgttcccgaccatcgtctgcgaggccggcgacgccctcctcccctctgtcaacgtgcggtccgaaccctactgtcgctccgacgaccgcgcgactacttcgtataccgcatgccgacgcggcgacgcctgcccgtaggaagcctgatcgtctattgggcctagaacctacaactccgtattgggcctatgcttgacaactccctattaggccctcctacgcataacccgagcccatctaagggctcatttagacttttagagcccaacacaagcatcggacgtgacaatggaataagttcacttagtgaccctcaaaagtgatcgaaatctaatccatgaccctaaaccacaaaaccggatatctcgaccccccaaatcttaaaaccggtgcaatttgactcccttagcggttttagagggtggttttgctgacgtggcgcctatgtggcggtattgaccgggtctcctttacacgtggcgttgaggtggcatttacaattaaaaaatatgtgtgggacccatttgtcattgacagaaaagaaattgtgggacccacgtgtcccatctctctctcccctccctcctcgccgctccctctctcccgcggcgggcagagatggcaacgatcggcggacgcgcgggcgtggcgcggcggcctgcgagcggcggagacgcgtgagtggcagcgccaggcactggaacggcaacggcggtggcaatttccctcttggtttgggccctcctctccctaggaggcccagacttgaattgaacacaagtttagcagcaccaacacttgtacggaataaactcctctcatcctcagcaacaatacgggaatctaaattactttcgcagtataattctcgtattgctcttttgattactgtcgaagcacggcccaggagtgaacacctccagcgcagagccccgtagccatcgagattgcagtaactaacagtgctactttgcctttgctgaaactgacagggacagtttaactcttctgtccgtccaatggtaaaaactagagagagatacgtgaggtaaaactctactgcctgggtatgataagtacattgagaggtaaagtgccgtgcgaatttaaccgacctggacccgaatatactgccctgaaagcctgaacctgcagtgaaatggttggtctttgaccattccaacggggtcctatcttcagaagtcacccgtaacattggtgatcgacaatcaacttttagtattttcgtcatcggtgacgtggtggttgctgctgacgaaagcttttacttttgataagtatgatgagtacagtaaataagcaagcttaacaaaaacgctgactgttaataagttgaaaatcttcagacttgagtttcagtctctcagactgcatctttgcctcttcctgaaaaagtatgtttccagtaaatctattcctcctttatatgtgctctatccataatccatccaatccgtccttttcaatctacagccgcctagcctagattatactagattatagtacttggaaacaacttctttgctaatttaagaacagaagatgaaagtttgccgttagactgcatgcatgctccattgatattacacctacttcagccaagaagtaacacatccatgcaatttccatttcccagatcagagccagaatctattgcatttgatatcttctacaatcctgtatactagtagtatatcaattggctacagtaaagtattattgttctgtatatctagtaatctttaattgtacaacattccctctctacggtgtaaagtactatcaaggctccagcttgcttttgcactgtgcctgaaatgaatacgtaggagaaaaaatcgcatacaaatgcctaattgttcaatactacaataattctataccgtaccccaatcatcatcgtcgtccatgcttccatccgatcttaatatcgtcggcaagattgttcatgccagtacgtagcatccgtaaattcgatcgactgcgtttgatcgatttccatggccattaattaagctagttaagaatatattcagaatagctgaggaggaagcatctggtggttgagtccggcgaggactgacgacggcgtcgcttgcaagccgcccaccacggactgcggcgccacgtcgaagcatgagccgttgagcctcttcgccggcgtgtggccgccgccggcgtagtctccggccgggctcgccttgcgcttgccgccggcaacggtggccgtggacgccgtctacgggttgcacttcgcgaggaagttgtccccgacgccgaggagctggttcagggaggggtggacggcgagggcatgctgatggtggtcggccggcggatctgcggtggcgtcaaagatctgggcgagcgcgtgctcgtcgaagagctcggagatggaggggatcttggggagcttggggatgagcgtggcgctgatcatccgctgcgcgta

SEQ ID NO: 1553 - DNA, 5498 bp, Oryza sativa
gcgctctctctctctctctctctctctctctctctctctctctctctctctctatctctttctctctctctcgccctctcccctccccggtgcgctccctttccccctctccctaccgttccgcccgcgcgccgggcgcgggtgcacgggaatcgcccgcgccgagcgccccctcccctcgctccccttctccccatccctggcgagcttcccgctcgcaaagccagcccccgcgcgccgtggttcgcgcgcgcgcccgcgtggtcgtctgcgccgtccgcgtggttgccgtccggccccgctgccctgccgcgtctgtcgcccgtgtcgtcgcgcagctccaaaccgcccgccgtcatcgccgtcgtcaccgcccggcccccgccactccgcgcgcaagccgccaagggacggaggcagcgtccctcctccctctgccgcgtcgcccccgctcccctcctcctttttcccgaatcggcaaaagggcaagcccctttctccctctcctttttccccttttcccccgccggcgtcatcctacctgtcgccgctttggccgcgaccgccgagcgctagctcgcgcccttgaccgcgcaagtcggttcccaaaccgacattgccgcccatttaaaccccagcctccctcccttcctttcctctccctttcgtctccgcgccattgccgccgcccccgtgctctgttcgccgtcgccgttcgttgttgcgcgtgtcggaggagccggcacgagcaaggacgcggaagaggacttcggccgcgccctctccttcctcttccccggcccgaggccggagagattactcccgcgccgtcggcctcttgtcacagcgccccgacccgcatggtagtgcctccctccgttcttcctcctcgctccatctcctccccctagctttcggtagtagctcgagtagactccccgtagttagccggcgccgccccgaccgttgccgtcgctcgccgcgtgctcgccgccgtcaccgctcgagctccgtagcacccgcacgtcgccagcctcgctcggtgtagctccgtccaatccgacgctagcatcgagttcccgaaaccgcgtagatgctctcaccgccgggaatcgacccctcgtggcctcgccgccgtttccctcttccctccccgccggttgtcgccgccgtgattcgccgccgtcaagcttcctccggcaaatccgagccgttggctcgtctcccctcatcacgagcaaccgcccggtgtgctagcttttgcccgtatcgccgtggttcgctccgccgctcgccgttgccgcccgccgtccattcgtggccgggtcttcgtctacctcccgccggcccgcgtggcagccacgtaggcgccacgtcggcgccagctcagcctagaccgggtcgagccaaccccggtcagtccctccccgtgcgcgcgttccaccgcgagccgtgaggctgcgcgtgggcccgctgcatccgcgtccaccgcgaaccgcgcgcgtgcaccgcgtccctcccccgcccgcgcgcatgagccgcgtactccctccgcacggtgagccgagccgctgacaagcgggtcccacccgggaccgcgcatggtgagcccggtccaccggctctctctcctccctcccccgcgcgcgcgtcttgggccgctgtgggccgccttcttgggccggccagcccgttaagctcggccgagccgccctttttctcgggccgcgccctagccgcccgagggaagtctatattccctccctctccccttttcttttctttttcttttccaaaaaaaagggatttaattaaatccttttcctttagaccaaaaatccaataatcttagaaattcaatatcttcccaaccgtaaatccgtttgactccgttcaaattccaaaatttctcaaatctcgagatctatctaatggcacgcttagagttcattaatagggctttattttcgccgtttgttgagttgtcccgttttgcgtatagtttcggagcccgaagacccgcagtgcgaggatttcgaggatcaagctccagatctcgagcaaggcaagccacctttgaacatcttgagcctatatttgaaatctaattatattgcttgcaaaatattatgcattgataggattgcacttaatctgttgttccgtctgcaaggcagattggtagacctacctaacttgttgcatttgattcttccattgttaattgctataccatgtccccttgtaaccatccagttgcgcctcgatattcgtgcaccctgtgccagtatcgacggttgccctcaaacttaaaatctgagtaacaacttgggtaaaactggagttttacaaaatacttggaaaacccgacacctgggtcggtgcttgcgaactaaatgaatttccaaaaccgcggaccgggaaacgtaccgggtgtacggtttcccgctctcgcacttaaggaccgattccttggaatttcatccaaacataagacaagtacgaccacatgggtggaatgggacacccctggctgagtaactagcttatcaggggagccttgatgccgagagacatgtggatttgccggggtggtgtcggggaggacccctgggcttcctggcacagtatggtctgggacctaacctgttgttggtctgggacccctctcgtcgacatatggtaaacctgtgtcggctttggaaatgccttgtcatgaaagcttggaggtctcccgacgtggctgatccccacgggctgggtgatccgggttagtaatgtcgtgtgggtaaagtgtaccccctctgcagaggttaacaaactgttcgaacagccgtgcccacggtcatgggcggatgtgaggtgattcctagcgtagtttggtttgactactgcttgtgaaattgctgtgtgaaaaggggttcggtgtttgaaaaatctacagctgatgggatcagctaggcccgggtggccgtttgaaaagttgttggcccgggtggccgttgaaaaagctgttggccgggtgccaaccttgtttaaattctaaagactgatacattgcacatactccgaccggacgagacgcactgtctcatccgtgtcgtttgagaagcactcacttagttgtttcagaaaagagttcaattaaaattaattgcaaaaacaccagcctttccttgaagcctgcattaaacacttatttcccatggcttgctgagtactcccgtactcacccttgctctatataaataatcccccccagttgctgaagaagatgaagcggatcctgctgatgaggagttcttccaggagcaagccggctatgatgagttttagggtttcggcctagttcccaagtcgcgcctgtgatgtttggtccaagtcttggcttccgcttcccttttgtaatgcagttgtgagctcgggatctgtccgcagcccaacatgactgtactcctactctataataaagagacctctgttgctgtgatattctgtcttcctgtgataccagcactgtttcctaggactggtatcgattaacaggttaatttggagcgtcacgggctagttccggtcgggactagttcgaggcgtgacagtttgtttgccgcatccactaagataaccattggtgatgggaatatagcgtgattctgggactctgcgtggattgatgggagaagaccaaaggacctcatgcccctagtatacgcaatttctaagaagaggaaaaagaccctgcgccaaggaaaggagaatgatgcctgggtaggtgatttggcactggagacaaacccagtaattacagtggccctttgtggagcagctggttgccctatggactgcagtccacaacgtgcagttagaagaagaagagtcagaccaaatcgcctggaagttcactcctcatgggcactactcggcttcatcggcctacaaagcgcagtgtgttggcgcgcctgacacaacttttgacttcttgatctggaaggtctgggcgcccggaaaatgcaaactccacgcttaacttatcatacagaatagggtttggacctctgaccggcttgcgaccaggggttggcaaaataatggcaggtgccctctctgtagaagagaagatgaaatggctttgcatcttgtcgctgagtgcaggtatacgagacggatttggaacctcgttgcgacatgggtagggttccaccagctaaaaccccgacgctggggggtggcgcaatcggttaaagattggtgggaaaggctggcctctgtgtctggcgtccccaagaagggactccgcaccctgattctactcatcgtatgggaagtctggaaggagcgaaataggaggatatttgatcataaggaagccgcaacctcgtatctcctttcaaagataaaagaagaggctggcatgtgggccttagcaggcgccaagcgtcttggagagatcatcccgcagtttgtatagtgtacagctttccttgttttttgctttttctttacccttaggggttgtatttttctcctgctatattcaatgaataagcacattcttgtgctggttcctttcaaaaaaaaaaagataacatcacttactttgtaatgcaaatacttcttgaaattcttaggagaactagtagtaggttgatcttaatcagatgagtatggttttcaaaattgcggcaactaatttcgtgttagaataaatttataaaacgtaataagcttatgtctattggaggtagatctacatataacatttattttttaaaaaaagtagtatttgagaaattattgaaagttagaattttaaagggaccatcaaatatttatgagtgacgcgatgtgccagctgctgccaaagctcaagtctgaagaaagagtacagtacgcaattcttcaggcctattttagatgggccttactctgggctcatctttgtctaaagacctgtaaaattccagcccatacatgtgaattggccaggattgaggcccatatcagcgaggtacatgacagaattttgtttatttatacattttttattaaaatatttacaaaaatatttttttatttcgaaaatttacaaatctaatcgccctcccaaagggcggcaagggacctaaatgcaaaatttttatttgtgttcaaaccctttccaccggttttaattgcttaaaaactaataatgcttattcgatacttcaaatgattttaaatgaaaaagtgataaactacaaagttatagatctcatcaagatctacaacttttatataaaatttatctccatccaatgtcgtttgagatgtagatctgagattttttaaaatgtgttttatattttgtaacgaatatttgaatatctaaaacatgttaaatgaaaaagttgttaactacaaagttgtagatccccctgagctctactattttgatataaagttttattacatctgactttatataatataattttaaattataaaatcatagagct

SEQ ID NO: 1554 - DNA, 946 bp, Oryza sativa
gcaggagcccttttacggcatcctcccgtgaactcggagccagagacccccgtccagcgatggttggacgacgtggccaacttggtcaccactgcctagcggcagctggccgcaggtggccggcccaccaccactagtacgtcgcgtacccccaccaccctctcctcgtcagcaaggaggagggcccgtcggtcggccacggcctcgaggcggtccacggccccaacgtcgtcaggggcctcaggaagtcggaggcatcacgatggcctctacggggagcaggatgcttaagcgacgccgggacgagcgccgtgctgcccgcatgggagaaggcgcctccttgttcggagtgccgcattcctcctcgcgaggcggtccgccccccacgttcacccctggagggactagttgtagggccttcgttgcgagtcttgggaatgtccggtggcccccgaagtttcgccccaacctcacggagaagtataatggcagcatcaatccctccgagttcctccatatctataccacaatcatcgtggcagcatcggggggggggggacgaccgggtcatggcgaattatttccccatggctcttaagggtcaagcgcgcggctagctgatgacccagccccctgactccatccactcctgggaggacctgtgccagcagttcattacaaacttccaggtcacgtacccccacccaggagaggaggcggacctgcatgctgtgcagcggaaggacgatgagtccctctgctcgtatatacagcgcttctgccaggtccgcaacactattacgtgcattccggcccacgcggtcgtttatgcgtttcggaacggcgtgcggcacaaccgcatgctgaagaaaattgcctccaacgagcccaagaccatcaccgagctcttcgaactagcagacaaggtggctcggaagaaggaggt

SEQ ID NO: 1555 - DNA, 873 bp, Oryza sativa
taatggcgatttgaccgccattaaccgcgctgatgatgggggcgcctagggcgcgaaaatcagggggtcgacctggccatgcccagaatcgtcacccatgccgcctggactcccctacctgccaggcatgcgatgggaccgacggcgggcccgcctaatcgcgcccgtgaacatcgcacgccccgcgccgagtgtgccgctgacaggcgcactaaacgcggggcgtgggttcaatgggcgatgtgatgagtggacgcgagaaacgatgaggcaaccgcaggtgtaggaatcgaggaggcaaccgcgagggcgtgaaacgaggaggcgagcgcggtcgaggcggggataaaaggatagggaggcggagatttcgtccccttcctctcgccgactgctcgcccgcacactcgctcctcaagccctaacgcttctctcgctccacgctattccgtacaccaaactcctcgccgtttccccgccggtcatcatggcccaagacgctagtgacgttgtgctcccggtgtcgcgcatcacggcagagaggcaccttagcctcatccgcaagatcatgccggaggacgccgccatgatggtgggggagtcacggccgcggccgcggtacccagagcgatccgtgcacctcctgtccttcgccatggtggggttgatcctgccattctccaggttcttccataaggttttggatttctacgaaattcatgccttgcatctcacacccaacgccgtgatgacactggccatcttcgcgcacttgtgcgagatgttcgtcggggtgcggccgacgatgcggctgttccagtccttcttcgtcccacagctgctgcaaggcgcggtggtgggaggatgctactt

SEQ ID NO: 1556 - DNA, 13460 bp, Oryza sativa
attatttttgtaaatattttaataaaaaaaatgtataaataaaaaaaattcgtacatgacacacattggaatatctgccgaagtgagaaatggataatggaaaagcgaaagcatgtacgggaattttcagagattggcctaccttacgtaatagtattattattatttttagaagtatatgacaaaaataacttcatctaatataatacacggttacagtaaatcatgcgttaaaaaaaactgcctcccgatcagtctctacatgaactagattacatatattcagagaaattaaagcaccttccttattgatcatacatggcgatcgatcgatgcaccaccaccatctttggcttaatttcatcgtgctcatagcaagaaatgaatcacttgcccagttgctgcttgctaattttctactacctgcttttctccatcgatcagttaagttggttcagctccagcctgcaccattcagatcgatgttttcgcgcctgtgagagtgggacgacgacctgccattgatgctgaggtccagctccgacgcctgcagcgtgctcatctcgcggcgccgttcatccgaacacgatcgtcgcctgctcggctcgttggggaacagcaggtagtggtgctccttgcctgatcttgctgctgccggctcaaatggcggcaagccgatggacaggatgtcctgctctcctctgtggccatgagagcgcgagtgatgcgagccctcgcagtcgcaggcggtcaggcagctgtccaccgatccatcgccgacctgctgctgctgctggtgatggtgaagctgggtgtgctcgttttggaggcgtttcgatgaggaggcgtttgcagttgcagcagtttctgctacggcgatggtgccgagtgcctcctgcgccttctccagcactgactgcaggtactttccttgggcttcaatccgaagctgcaggtgtctttgtaccttttattttcaggatccatgatcacttataaatactactgatttatttattaggagacacaagactattgctatgcattgttacatatattccatcgagaaacaactgaaagatttttatatatacctctagttgttcatgcagccgtctctgcacctcaatttgcatctggagggcttcatttatgtgcatagaactgctaaaaagattgtgaaatatacattacattctgatgtttgatgtttctattcatgagagaaaaaattaactttatttgcttcttagttacctgtttgtctgagtctctaggtccaagtgactagccggtgatccatttccttcacatggtttatctatctctgtcgtactacaacctaagactgaaaacgtgaaagcaagtttactatctcgcttattactaatactgataatcaagctacttcagagttcagaatcatgtagcacttaccaccttgtgcacgggaagcattggcttgagattgaagattcttgctaagtcggtatttctacgataaaagaagccaacttagtttctatcttcaagtcacgaataatgctagacacctatagtttaaacatatttcaaaatgtacctgaagatgactcttaagatggtaaagggttaatccaggaattcccatgagcctcatgattgttttcggcgtcgcctctgaagaagtttcaagtgtagccattgtaagatatgcaaatttaccattcctctgctgcttcaaagcatgaatgattaattaagttttgaatactcactgtccggccctcccagctgatttactgcttccacaaaacgctcatgcaactctgatgtccattttaaccgaggtttagcgtcggtcgagaggacaagccctgatgatgaatctgctccgccttgcaggagaaattgcttctccggaggcaaacccggccttgaagacaggtgctggctatcactctgaacctgttgctgatgatacatcatctgccatcaaagatgtcatgttcctaatttgcagatatcatcttgtgtgagcataagcatatgatacgaaaggcctctcttccttgcatggttcaaagaaactaacacagtagtacatacagacctgttcagttccagtcatgcactgaaatgtctgtctgcttgtagtaggctgcacatttatcagtagtgataagatcctctgcagcctttttcagtgcctctatttgtagtaaccaaagacttgattggattatgtgtgtatggtcttctgggagtgagacaaccttggcttcttcagactatctgcctctccaatgactagctgctgctgcctctgctcatgtcaaggtctcaagcagagagtcttgagtctttataaggcagggaagagaatgtggaatcactgggacaacacacacactcaagcctgcctgacccaatctttgcagcaactgaaaagagatattatccttattctctcagggtgcccgtggaccctaacctctgccgatcttttccattgtaaattccaaaaacgctctcccattctgattatacacttgtaccaactttggttgaaattacatggcacatgagaagggcgaaaggcgaagaacaatcttttatttttcttccttttcttttcttttgagaaactagggggagggaggggcggggggagcaccttattctcatgacaactttggggctgtggtgctgcaaacctatggtgttagaacttgccggcctcttcggctggattcctgaatgatatccatagttgagaactaattctggtctccactgcatttctggaggcctataagtgttgaaatgaaagggcaacatctgtggtcaatcagcattggttaagattccatatgatctgctgtatgatcacaatgaattgtttcgcattttgcccggatgcggtgtacatatgtgtgcacaagttctttcttgatcagaattcaggcacacttggttaaggaataatagagtggttaacctaagaggcccaaagttcttttgactgcagctgcagctgcaggcatccagaagaagaattgtgcaaagttgcctgcatagagtgaaagtgaagttgcccattctataacccctttgatgccttcttggggttgcacaaaggcatggaatggaataatggaataagcatagaattcccttttgtctcctttggtaagtttggcacctgttcagctacctgcaagccaaagcaagctgctggtagggttaaggcaatctaaatagggctgtgtctgtgtaaccttttaagccattgccgtaacttcgttgctgttcttcatatggcacccaaaagtgagcttaaaatgaaggtttagttccaacgtttttaagcactctttgctgctttccctttattcctgcctcaaaaaaaccgcctctagaagtatcaacagcactcccatccttgtccattcaggtttaaatccgggttaggatcccacacaactttgtgaccgacatatggatctaacgaaacctagacccacatgtcaatgataaagtcactgtgactttaaagttagaggaactggtaccaactgtcaggtacacattcagcaagccataccaaaatttttaatgaacgctagagcttcttgtcagatctcaaagggagatgatcatacttgcatgctcccacagtgctacgtcatgtgcgtttcatgattgcatcagcatctgtaatccttttgaagtttatagactcctgccatgtgaaaatgagaggaatctagacgataagcttgcggcgtagtggactagagttttatcccccgtgacctttctttctacaccccaattaaccttgtcaagttggtgttgctcaggaagacaacttgttaattgcaagggctgtaaatattcctcacaaaatttacctttattagtcctttttatatactagtacggccgtgctgtttcactcgcgtaataagtaggaataattcatccagcctgttatgttaatgtttggccaagtacagttgtgttgtttcagagtatcaaactactccaggtaggatacaaagttaataacgcaatatgtgccacgagagtgataaaccagagatcaagtattcaccagagatcaagtattcagatgctgcaggtctggttgaaaaagattgacagagtatgggcatacgaaggcagagcacatcagtattttcgttgttctttcaaaagtcccttgcattgcacttttattcggatttgtgcctgttgctgttacgtggttcgatacaatttcatctaagttggtaagggaatcttggtggctaacccaggtacggatatcacttgtactaagataagcaaagtgctcctgtgatatggtatctatacctgtatttccttagctatatatcgaagttgaatatgttctgttccagctgatagctgcctgattctccagctttggtcgatcgtgagttgtcaacaaaggtaaccgatcaatgatcatacagagaaactaaaaccatgtttatgttccaacagcatcggttcgtgaaagaaaaaaagaactataacacggtaccgtagaatatggaataaactccttcagccctaatggccttagctttctctaactccgttttatgctgttatatatttgggaaaagaatacatgaatacattcggttgttacttgttaaatgtttggtatcatatgcttttgttctctctttgcccatctgtccggctggtaacctctgttgacagtttcatgcatgtaactcttgatgctcgcatgcccatttacttgttgaaattaaagtacactaaaccaaacatcacaacatgaattaactaggcgttagccaaataccaacttagcataccggtaccaggatgatagaatatttgtattaacttagaattctgatcatgcatgcgcactgctcatctatctcttgttgaaagaaatagggggtccaaaaatgttcgtcagtcagttccatattagccactgtgttcgatgtacaaatatcgaggttgaacttaccaggtgctgggagttccacaatagctacagctaatgcacgaagaacaatttttggtgcatgcataagggccactgcagccgaaaggaatgaagaactaggatacctggaaacaactctgttattttctcatctgtgtcaaaagattcgctgggggtcctccagatccagcagagccactcccagcaaatgccgagaagccagacccttgattaccaccaaaagctccaaatccaccttccaattcaaccaaatggagttaattctcagaaaaatggagatggagttaacagattctaagcaaaaaaataagtgtgagatatgtgcattaaagctttagtagctgtggagcaaattggatagaatttactattaagtcacatttgtccagacggtcaaactgcttgtaccaaatacattattttcaattaaaaggaataccttgatttttaatcctttttgccagtaaagaatggttaggcatatatcatttgccaaaaccatacgagaacttagaagttacaaatgacaacactatatttaagttatgaaatagattggaaaagatggttaggcaaaatgatcaatgattactcgatcaataatggataaatccattatatgctatagagctaagtaaatcatggtatgcagaacagcttatgacttaccgattgaaaactagctgtgaatgaacttaaattagcacgctactgctagagcaaataccaaacactattattcacaaggaaaataaaagtaacgcatttatgtaaaatagacctaatagagcagccttaccaaagtcaaaaacagactgctcatgttcctaatatggaaatttagttccacatttggttatatgctagcagttcaagtttaaagaatagttggggagtggcaggctttctaaatttcacaacattgtcacaatatatatcaatcaacaagatcaagttgataatcaccggttcgataattaactactattctaggacatgtctcaaacacaaagatgtggacacatctaaccatgaacatgttgatgtaggctacatcatcatgatctcaaagacgaaaacagcaaaaatccagagagctcaccactgctgaagccacttccctgggctgcacctccaaagccgccaccagatgaagccgcagccgcaaaacccccacctttggaggcaagagcagcaaaccctccaccagtagcagcagcagcaaatcctccgccagcaggagcagcagctgcagaaaagccaccgcctgttgcaccaccagcaaatccagaattgctagaaaagcccccggaagcagaggcactagcgaatccaccaaatcccccagcaccgaaacttcccaattggcgtgattgtccaaaagaacccaggacagatccaagtgcttgctgagcaccaaattgtgcaggctgcccaaatcctgactgctgtgctgtcccaatttgtgcaggctgcccaaatcctgactgttgcgcaactccaacttgtgctggttggccaaatcctgactgaatttgtgctggctgaccaaatcctgcctgctgcccagctccaatttgtgaaggctgcccaaaccctgactgctgcgctgatccaatctgtgcagactgtccgaatccactaagcccacttgagaatgcactagaaaatgtacttgagctagttgattgagatgactgtgctggctgagatgagggaatactcagtgacgccggacggaaaagctgtcctggactggttgtcagggtaaatgacgaacctgaactcttattgtcagaggtagtaaatgagttcccaaagggattggattttgggggacttgaagaaggcacagacccaagaccaaacccaccaagggctcccaagttgagatccgaacttgcagaaggaacttcctcttccatatcatcttcatctgatgagggattgctcggtcctacatcttttccggtggaagtgacaacaacagattctgcagacactggcaccactttaggtgcagagacaggaattgaaggtaagcttccactggttgctggaatcgatgaaggtttgccttcagtgattggtacgcttgagctagtacttgcagaaacggttgttccagttacctctgatgtaaccacttcaggcttagatacaattttattcaagccagttgatgactccttaacaggcattggaatagatagtagggaactagatatggtaccatcaggtaatggtgatgaaggttttgtcattgattcctttgatggaagaatggaaggacctgttggagacaaaacatctgatgtttttgcagctgattcttgcatagttgacgaggatgatgtagctgaagagggaacagttggcttaatagagcatggagaagattgtgcaacaggtgttggtggaaatgcaggaggttggaatgccacctcaggtttagctttcactgggctctgcactgtttcagtaatcttaccaagttgcacagtcttcccttgtaacagagcagacttgggaggttcaggagacaaagacggtttgttaagatctctaaatgcaccacccatattctgtggagaaacatccagtccttttgtggttcccaaatatggcattgcctgtccaccttgtttgttctttgtaataatggatgacgcacctccagaatccccagataaagttttcacggtcaatggactcagagagaattttgagcccgtcatcaaaggcgacaaatctgggagtgtactggtattagtttttggaatgacagtggttttaaatgtcaaagtacttgactttggcatggtatgagttgttccagaggatggaacattggatgagctgatattatcccagacatccttatgtgaataactgaatgacaacggtgaagatgagcccaactttggtgtctggtcagaacttttcagctgccctggtaattcaggatacttatgctgagggccttgagatggtccagccgattcctttacccatttgaacagtgtgttgtgctggggtcctgacggctttgttttctcgtgcagcactgtaaaaatgattcaataagaaagttgtacccaactctataatcaaactttcttaaaataatgaaatttctactgaagaattgttaaatagcttaccttcacttggataatgcagcttgtttgcatatgattctactatggaggaagtggggctactgctggacttctcctgggacatagctgccatctgagaatcaaatattttcttatttgacctgaatggcaggtcactgctgatcttgaggcgctgttgttgcgctattcttttaacagtagttttctgaggctccaaactagccaggctctaagaaattgacaagtattttgtggttagatttgcagccaattcaccatacatagagcaacaagaaaatacgatgagaatgtgccaaaagaaaagaagtgcagaaagaagtgataaaatggaacagaaagatccacatttcttccctcaatcatgtgcataatgcatatatatgcaaagtttgggtctgggttaaaaaatttaccctatccagtgactctctcctcctccttgcagtctcaggctcagcagtcttggaaggccctgatatgctagttatgtgttctctcgttgatggatatctcttaactgacttggaaggagtaccacctgaaaatttggctgcatccatcgtgtgatctagaccaatcgattcaaacaactctttggccactgaccctcgctttgtagaaggagaacttatatttagtgcagatatttgttttgagaggcagtctgacagttgttcagctgctgctaattgtgaattaagcgcattgtaaacactggatatttgtgtctgactgcacaataagaagataaaaatcagataagaaactcacatacatcgatttatatttgaaaacaaaaaaaaagattaaagtattcttttcagaataaacagtttcttattaccatcaccatcccaaaataacttcatctttgcctatctcacacataccaatacaaaagccaaaagactaggatacccatcactttttcaaactccaatgcatttatccccaacttcctcaaactccaatgcaatgattgctctaaagttgaagcatttgtgggacaaatgaattaggtaaagtcgtaaagatgaagttattttggaacggagggagtactaagaaagagtaaagaacagtttataattttgtcattatgatgtggtaaaagtcgtaaaagcgactttagagatatgttaatgtgtgagaacaaaatcaaagaggtatgaacaagctaacagcatatgtacaagctactacatgcatctgtaccaagatagtttctgctcaccctgatcacatagcaagctagcaaagcaattggttactttgaaaattcagaaaaataattggatattgatcaagtttggtacaccatccatttaatgatatgactaaacacacaggaattgctcgtgaggtgtagtattgagtacctggatcgtgccttactagaataaatagctctgcgactagaagcaactcttcctgtttctccaaatttgttcatctccagattattgaaatgcctctccagctctaccagctggtttgtcaaattctgtatgacaaaagaaccacgaattacaaattaggctgttgatgttattttccttaaaaaaaagaacataaagggtcagattgtacctggttagccttgagaatattctgcctcttcgcttcgaattctggactcaatttctgacggttccatatatcccagtattgggtatctgaagattggtcgacgattcctttcatgtaagcttgcctagcagagactgtagagaaacagaaataagtttcttatttagtgtgctaaccaaaatttaatttacccagatagcagatgcaggctaagtgtggcgtccacttcttgcctagaaggccaggaacactttaaaccctttaatttccaattgagatataaaacattgacatcagtagaaaaggagaaaccgacaaatccaagctcaagtcatgatgggtaaaactcctttgtcatgtcacaaccatatcattcacttggaaggctttttcaaacccacaaagtcgaggaactaaaaacagaccaggtctagcatacactcaagttaagggcaagcaatcagcattccgctttctgggtttcctcaatccttatatatggaatgcacaaaagcattgccaaaacaacaaatttgaaataaatacaaacataaaatgccatccccactctccacaattgcaatgttgacaaaatgttaaaatagcagcagagcaaaccagttcttcaaacctaaccctggcctgacgaattgtttttatttttttttcaatatatataaatgtgcagtaggcatgtattaggaactactccctctgtcccagaataagttaatctagtactaggatgtgttacatccagcacttgattaacttattctgggacagaggaagtatgaagtaaccaaagtaatgacagtcatcaattgatggaaatatcagagatgatcgatatatcaattttcattttttttcccaaacgcaaagagagaatgttggtattggatgaccaacaatatcaactaccaaaacaacggcaccaaaccaggtgtggataaaacttagctaattatctgtaagcactatgaagatacatataacctatatttctttcaggcatatattgaagtactagatgtagtgtgtctattggcaaaaagaaataaccacgagtagtagacgtgccttgaaacatcttattccgcaggtcttcaactcttgaacactgttctgctatcttgttctggagatcaaaaataagaaggaatttctttagcaggttaaaggcagaactggaagataagaaaggtaaaggagaccaaaaaaaaatgtgtggtgaaaattagtataataccttgaagatctgcaacagttccagaaaattttgcaaatcaccctcaaacatagaaagaggccgttcctggaaggttatgcaagcatctctgaaaccaccatccttctctatgtatgataggagtgtatctaactccttggtcatatcattaatctgtttaacaaaagggtaagaaatttactagttgaaataaagataacaaaaggtagacccaaattccaatatttaaaatattcactctgtttaaggacatgtttcatacagtattgcacaacagttgaggtgaataagatattagcatgaaaacaattgaaagagtagagagatgaaataaaacaggaaccgagcatgagtgcagaagaacataattatctatatttataccctatcctaaggagatttaatatggcaaattgaactgaaaaggttcaaaacatcatttccgaagacaatattcaggaaaattaattacatgctgaatcataaaaaacagaccaaactgaggcattggtagtaaaaaaacattataatcaaatgtttttgttgatcttacactgtaaaattttttagacaggtcctgttcagtatcgaacattgcgcctaacttgaaatttttagaatggtccactactgcatgtgttctgtcatgtggtttgtcaatgctttcctgtggtagaggtgatccacgggaggtaggaaatgcctcaagatttcctgtgcgaaagccagtggatgaaggtccagctgaggaaggttttattggagaaattgatggtgatgacttggaacttaagccaactgaactaggaactttcttatcggtagtgtagctgctttgcagcgggtgacttccaaaaccaggttcattcctttctccaggcttaaccagggtagatccatcagaagtgaacactgatgatttattaaagctaaggttaccatctttctttgagttctgagatcctccaaatgctcccaccggctgagtggaaggtatgcttcctttaccaagttggttatttacgaaattgctactgctgctttgttgccaggaagaacctaattcactagatgtgttgcttccagctggactcaaactgacgctattagcagtagaaaagctgaaagatattccaggtttcaagttgcttgctggtgctaagaaagaggcaggtgcaggtgaggaagccactatttccttggcttttgaaactggagaactgtttttcatatctgttgatccatgcaggtctctatctgcaagatacaaaaggaagaattattaagtctccaaagaacttggaaacctaacaaacaacccctcaaagataaagtaactgccgcataacagtccttttacctggttgtacactagaaagctcagccccatctgggcgaatactcttgtccaatgagctggtagcacttggagtaaactcttttccagatacagttacaggtgaaatttctttcatcacatcgctatcttcaatagcagatagctttgtttgaggtaattcagaaggatcagaaatcctaggtaagagaccagtggcaacacattagtttttctttcccaaacaaaggttagtacacagacgctatagcaagtaataaacagaccatatttttgtttgtgatttggcactggcaaacagaggttgactacctggcaagataatatatattcagtttcccttcaccagtcagataaagtagaatatgttgaggagcaacctccttttgttcaggaccaactgttactgtgatcttctgaaataatgacacattctcgacaccaaaccccaatatgacattgtcatcaccattctctgaaatggtagattagagtagagaaacccaagtttagactttattcacagagaaacagtctgctctagttgcggctgaattatgtcttaccttgtaggtcaatcctaggactatatttatcctccaacatctcaagatatactacagtttttttgtcatcagttgcagatgaccacttcaagagagaaatgtgttcatcaatgctctttttgttggaagtcaccattagatccctgtcaaattacaatcacagctaacaaatgttggaaaaaaatataagtaaaaataaatgcaatattaccacattgatgctaattggcagaactaagaagatactaatgccccaatctaaggtcagaaataacatagccaattagaaaagttgcattgtgcaagtttagtccgtatagcttaaaatttcagcacatatactattttacttcatgctatggacaaaataacatgaaatccacctattaaactctcaggaggtgacaaaagaacagaaatgtttagttaaataaatactttgatcaagtatttacttgctcacaacatgaacatttctgttggactcttagaagtataacaaaaaaaa

SEQ ID NO: 1557 - DNA, 720 bp, Oryza sativa
ccgactggtgtttccgcctgcacggctggcctattatgccgccgttgctgggcgtctacgtcttcaccgaccggccgcctcatccgccgccgactggtatctccgcctgcacggctggcctattatgccaccgttgttgggcgtctacgtcttcaccgaccggccgcttcgtctgcagccgactggagtttccgcttgcacggccggcctattatgccgctgttgttgggcatcatcgacttcaccgaccggccgcctcgtccatcgccgactggtgttttcgcctatacggttggttggtcacaccaccgttgttgggcatctacgtcttcatcgaccggccgcctcgtccgccgccgactgatgtttccgcctgcacggctgacttattatgccgccgttgttgggcgtctacgtcttcaccgacaggccgcctcgtccgccgccgactggtgtttccgcctgcactgttggcttattatgcctccgttgttgggcgtctacgtcttcaccgacaggccgcctcgtccgccgccgactggtgtttccgcctgcacggctggcctattatgccgtcgttgttgggcatctacgtcttcactgaccggtcgcttcatatgacgccaactgatgctatcttcttcacggctggctacgtcgtcgtcaccgctaataggcaccgtcatcttcaacgcaagctgtctacgcctggggctgcag

SEQ ID NO: 1558 - DNA, 1444 bp, Oryza sativa
tccctgcatcatacccctattccggtatgacttgctgggtacagtgggtagtactcagtcttgctctatttttccccaaaccctagagtatgagtatgcgtcagatggtggtttctccgaggagtaggcttcgtcctgccgtcgaggatgcctgtggggtggtgttcccgctgcagatctagtcaaggcttagccccttttatcttttgtttttccgctgcatttatgtaagacttttataatgtttgtaagacgtggatctgtatgtcaactttgtcgcttgtgtaccccacccagtcctggacggggattttaatgcacattctgcttggaattctattcgggaatttctgggcgtgacacgcatgggagaggtgtgtgcaaagctagggccacctatcggcacggaaaagaagcgtcgtatgggcgtgggatcggatggtgactttgcctgtccaagtagacatttaccaccttttagttgtagtgaccttttagttgcagtgacagagattttgactgttgcgcctcgtgagccatgtgggccacacccatcacccacccgcacgcactcgatcgattaaccacccaaacaacgccaatgcaagcagctcgttcccaagttgccacaacacaccatgcatcttcgagttcgactcgcgggcgcacttgtggagattatgggtaccccatacccacacggcacggttatccgactagttataggggataacttatatatatgaaatatgtaacagatcatgacttgggtattacgtttccttgtatattacggaacggcctaaagtcctggtttgataagattgtaaagtagatttaggaaaccgataccgtattggataaggtttctatcttgtaatcatgtcccccatcctatataaggtgggcaggaggccctctagggggcatgagacaattagatcgtcagatctatactacactcggcggattcaaatccccaaacaggagtagggtattacctctcattgagagggcctgaacctgtctaaatccttgtctctgcatccatatacttttaggtttcgtgcgctaccccgttttattattgccgaattcatgttttgacagctggcgcgccaggcaggggatgcgtcgagtttcccgtcgacgagtgcgatggaatcaattcaagcattgagattaatctcaacgagttcgacgactccaaatgttaatcggtttgtcgtttcaatatattgttatcagattgatctataatcacaattgattttctgttgtttttcctctctggttacatgtgccgccgcgctgtgaattcttctgatcactgcgggttgaaaaaaacataagccatggggaaaacggccggagttacgcggggtcatcagatcggttctgtccatgcaagcacgggatcaatcaactgaattaatatgaatgg

SEQ ID NO: 1559 - DNA, 1396 bp, Oryza sativa
aaggtgccccattttgagttggagctcctctcaggtgaggacggcttctggcagaccacgacccccagcgggatcgctgacggggccgtttggcgtcgcctcccgactcccgaccacgggcacgacatctgttgacgccgtgacaggggacgcgctagacgttcccccggacttggcccgagcaacgttcgcccgcgcctccctataaaccgccatgaatcaaaattccactcaaacagaagacacgagaatctaaaagtttctttacttacttctcgccgatcgtcacaatgcgcttacgtcgcgcaggcggaggagacacgtcggaagcctacaaaacaaccaacatagagtgagaacaaaccttccttgctacataacctgacgacaaggtgaaaattactgagggagtcgccgccttgcggcggtgtccgagcacagacgagaatttcctcgccttagtcggagctttgccaccactagtggtggcagcgtcagacgccaccttgacgaccttctctttcagagatgccgccacctgatgatccgcgagcggaccgacgacatcagtcaaaggaagggcctacactaaatcatgtcataagctgattttgagcaaagaaggcggacgcttatcgaatgaactcacattgattgcttcgtcgtgctccgtcactcccctttcacaaaagggtgcggggatgtcgctcgccgtagtcgggccgctgatcatcacctgaccaacacgccgctccacggcttcgctgctcagacctgtcaagaaggaatcaatttttgataagtcgaaaaggaacgcgagtacaagcatatcaaaatgaatgcgagaaagataccccgaggagaaacccgggtcgcgtcatctggcccggaatagttataggccgggtgggcccgagcctggagcggctggattcgcctatcgacgaagtctgcaacgacttcatatcccgataagccccgttctcggagatcatcgatgatgtcgataaacgattggagagagggggtcaaggggggcttggcggtccagaccagaatcttgttgttcctcgggaacaacgaggatcggatttgaatccttgatttcaaggtaaaaccacctgttccgccatttactacgagaagagggacactggaaggggacatagcgcgacttcatcccgtcacgaagtcggaacccgacgcaaccagacaccctattgggttccatccagcgcaactcgtaataaaagcggaacagatcaagaaagggctctaccccaatgtaggcctcgcaaagatgcacaaagacactaaggaaagcaatggaattggggttcaagtgcataagagaaagcccatagaaattcaaaaccagcagaaggaattcggaggg

SEQ ID NO: 1560 - DNA, 1818 bp, Oryza sativa
tcaaattcatcagcagcgaggagttgcccgaggacgatacagaggccgagaaaatgacccgtaaagcaaagatctactgtatgggcggcaacgatttatacaaaaaagcgccaaacgggatacttctcaaatgcgtctccaccgacgacggcagacaactcctcctcgacatacatgaaggcatatgcgggtcacacgccgccggtcggacattggtcggcaaagcctttcgacaagggtttttctggccaaccgaccttaaagatgcatgcgacatagtccagcgatgtgaagcctgtcaattccacagcaagcacacaaagctacctgcacaagcactccagacaatccctctgacttggccgttctcgtgctgggggctagacatacttgggccattcccacgaggacagggcggctacagattcctatttgtagcaatcgacaaattcaccaaatggatcgaagcagtacccactggggaaatcaaggccgataacgccatcaagttcatcagaggtatattatgcagatacggactaccgcaccgcatcataactaacaacggccctcaattcatcagcgccgatttccaggattactgcatcggcttgggagtcaaaatatgtttcgcctcggtctctcaccctcaaagcaatggacaagtcgaaagggcaaacggcatagtactacaagggataaaaacccgcgtctacgacagactcatgtcacacgacaaaaaatgggttgaagaactcccatcagtactatgggccatgcacaccacactgacaacatccaataaggaaacacccttcttcctcgtgtacggctctgaagccatgttccccggcgagttacgacatcaaagtacacgagtacagaagcattccgacgagaaccaggagaaacagcgagacatcgatgtaaaccttctcgaggagcatcgtgagcgagttgccgttcgagcagctagctatcaacaagccctccgccgttatcacgagaagcgcatccgagcatgcatactttcgatcggcgactatgtcctcagacgagttcaaacccaagcagggcaaaacaaactctcaccaaaatgggaaggaccctacacgatcacacaagtcttgcggccaggcgcattcaaaatcgcagacggcgacgatcgcgaactagcaaattcgtggaacattgaccaactacgtaaattctatgtatgagtcaataccactgtacctgtaagcacccttacagtatcaataaagcctatttctaagtcacatgtcacgaccaaagtgttttcacccaatgatcccttactctgacgacacctagcgttgaaacctgtccttatgtccctttacgccgtcttgacaaggcctccgaggaacctaagggatcttcgactggggacgcctagagccgataaggccttgtcagatcctttagagacgaaagaccatgtaagatctggtcgtgtaagagttctcgccgtgcgtattaaccaagtcgtgtaatcggaaaccgagctttccaacttcacggctgggtgctaggatcagagcttattcaaccaagacaggtcaagggtccaagagccttgtcctccgagaaaattcctccgacgacaaagctgggggctagggagagtgtacgactcaaacggctaactaaagtcattaactgagaacacactcatacacacgacatccagagtaagaaacatttgttaaagatagatttctttattcacaaaatatttcttacagtttgtacataaatatttcgctgcattacatcttcccctaagatatctgg

SEQ ID NO: 1561 - DNA, 1739 bp, Oryza sativa
ttcgatacagcttataacgccatcatcgggagaactgcacttgtgaagttcatggccacatcccactacgcatatcaagtgctcaagatgctgggaccgaagggaacaatcactatttaggggaacgcaaagctggcggtgcagtgcgacaagcggagcctcgacatggtcgagcaaacgcccaccccacccgccacgtctgagccacctaagaaagtgagcaagccaaataagacgccaaagccagacggcaccatcaagatcgttccgctctctagtgctaaccccgacaagactatcaaaatcgggactacactagatgagaaataggaactcgcgttcatcacattcctccgcgataatgccgacgtgttcgcttggcagccgtgcgacatgccgggggtccccagggaggtgattgagcacaaacttatggtgcgacccgatgccaagctagtaaagcaaagactgcggagatttgcaccagaccgaaaacaagccatacaagaagagctcgacaaacttttgaaagctggcttcattagagaagtacttcacccagagtggctagccaacccagttatggtgcggaaggccaacggaaaatggagaatgtgtgtcgacttcacagacctcaacaaggcatgccccaaggatcactttcctctccctcgaatagatcagttggtggattcaacagccggttgcgagcttctaagcttcctcgacgcttactctggctaccaccaaatcagcatggcaaaagagaacgaagagaagacagtgttcatcacgccgttcggggtattttgctacgttaagatgcctttcggactgataaccaccgggaatactttccagcgtacggtccagggcgcacttagcaaccagcttggcaacaatgtcgaggcttacgtcgacgacatcgttgtcaaaaccaagacaagtgactcattgattgacgacctgcgggaaacgttcgacaacctcggacgatatcgcctcatgctcaatctagagaagtgcacgttcgaagtaccgtcgggcaagctactcggattccttgtttctggcagaggaatataggcgaatcccgagaagatcaaagcaatcgagaacatgaagccgcccacatgactcaaggaggtgcagaagctaaccggatgcatcgcagcattaagcagattcgtcgctaggatgggagaacgaggacagcctttcttcgccttattgaagaaacaagacaaatttgtatggacacaggaagccgaagaggcatttattgcactcaagcgctacctatcaaacccccctgtactcgttgctccccaacctaatgaagaattattcctttatattaccgccacgccatattccgttagcaccgtcattgttgtcgagacagagaaaatacagcgaccagtttattacgtcagcgaagctctccatgacgcaaagacaagatatccacatattcaaaaactgctctacgcagtcatcatgacatcaaggaagctacgccactactttcaagcccacagagtcacagttgtctcctccttcccccttggcgaagttgtgagaaacaaagacgttgtcggccgcatcgcgaaatgggtagtcgagctaagccaatttgatatccactttgtgccgcgaacagccatcaaatctcagatactcgccgacttcgtggccgattggaccatgccagataataagtcagacaaccaaggtga

SEQ ID NO: 1562 - DNA, 1500 bp, Oryza sativa
agtgggcggacttcaaaatgcgcacccaaaatccctttaaataggcgcacccccgacggtgcgaattccaaggaactgagagaaatccccgccggaaatttctaggtccattacgcgcggcagtttttgacttaagttcaaaattcactcgtgaccgttgggcttcaaacggcatgttcgactacacgtcatctccgtggttctcgtacctggaatgataacgttctcgacacccgaagtcgcgaatggtcgcacgagttcattttgagcagaagtcgggagctactgtcagggttacgggtcaggcataccctctacccttcgatatacgttacgtatcgacatggcatacccacgcgtatgcggatatttcctttatgatctaaggaaacctttcacgaaatcaatagacgggaagagtccttctcggataagaactgggttacctacgtattgagctgggtctgggtctggtgtgttcgagtcctactcggagaccaccagacctgcgatataaaagggacccctggggagggcatagaggatcgaatctcagagccaacacaacccacacagcctacgaagccggagcctgcgaggggccacgtcgtcaagagctagtcgaatcaactcgactacaatctcgccggattcgacaagttccatctttcctttgtaacctgtgttttccaccatataatcccatatcaactggattagggctattacctgtcaaggggcctgaaccagtataattcttgtcttttgattacttgatgtcgtactacgtagatccttgtaccagcgtaccccaataccctctatatccagtctacgtacagtggcgcgccaggtaggggcacttggtactcaaggttctactactatgccatcaagcttcgtcgacaacaacgtcaacaccagctccagtcaagcactctcagcttcaataatgctggtatggactcaagtcggcgaaatcgtcttcccggtttacaccacgatgccgatctcaaccggtcctccaatgactggaaacgagaacgcagtggctatgaaccaggacggctccatgtcgaaaaatccacccgttgaaacagagaacggattatcgactacatccaaactcgtgaaggattctgatgcggccaagtcttgtccctccgacataaaccacgggccaacaaagatgacttccgaagttatctggtctttgtgtcctatccacaaaaccaagaaacatacccttcaagattgctaggtattcatcaatgtccgtgctgaaattcgcgcctgcaaagaacgcggaattcagcgtacttctctaactcgggatgtctattgtcctatccacaagacaaagaatcacgacctctcgagctgcaaagttctcctcggcgccgtgaaaactccgtctcctaagtcatacgtccccgttagggataacggcaaggaacaaggagcgactccagcctcagatcgattcgttggggtaatcga

SEQ ID NO: 1563 - DNA, 2177 bp, Oryza sativa
ggtggcacggatactgatgatggcaaggcacctaatgctggcaatagtcctcaagagctggatccagagagggcaaagctgcatgcagaagcccctgtgctgccatggagctctgttttggatcgttggggttctaacagggatgcacttgtaaaccaaaggggacttgagctcgagagccattggggaagggtggataatgatgctgttatacctgctgcaaagattgcagaattaaatgttcatagttcaatatatagagaagatccagttgagattctaccatgccttgcacctctgaagaaaggaggcctttgccagagaagagatctcaagatatgcccgtttcatgggcctattgttccacgagatgccgaaggaaatccaattcatcagagtgatggccattgtgatgcagaaggaaatccagttgggcagactgatggccattatgatgcagcagtaagtcctattgatccgaatgaagacagttctgatgtaagagaaaatatgattatgccagatggaagcagtgatggtgaatgtatttatgagtcctctccttcaagaacggcaaacataaataatgacattagcgacagcgatgtaggtcatgacctcggtaaaattacagtggagcagttggcgagacaggcagtgcagaatgtccggaaaagagacagggatgacaaaaaagctctggaaaaagcccaacgagcgagaattcgtcagcataatcaagatgttttgcgggaagcggctcttgcttcaacctcgcgctcagcggcagactatgacctcccttcgccagcagtgtctcgacgggacgccgaggtaagacaaagggaccaacactggcatcgatgctgaagaagaaagttacttccaaagatagaattgcagagaggcttctgaatgctcgagctagggatgcgacaataagagaagtttcacatactgaagatatgagctacagagaagcattcccaaatcaatggtagtataagaagcctaatttttgctgaataggttggtgaatcgtcatgataagagtgaatcaataattctttctgcgcgcagttttcagttaaccacatgtcttcttgagttgcccagatacaagtaaaattgtaggttttcattgtgaagtttagtttttgtacagtacagtagattgaataagtttcttttatttcttttgcatgttcattttccctttgtaaacatgtatatgtaccactccatacttgctggattaataactatatacgctgaggctgcagttcaaattgtgttattttatctgagtaatattgtggattaattaatattgcggttttatatggttcaagacttcaagttgctggtgcaactcgtgacctcaggttttacagaaaaaacaaggaccgaccgttgtgcataatagatgtaacatgttattttcacccatacatgttagcatatattcgctacttcctctaaaaaaaaaaaatttgatggctaaaatgtggcaaattttacgaaaacggttttttttcgggccgagagaagaacagaaacccgtttggaaagaataggaagggtttttgtgatcaatcagcacacctatctttaaaagcatacaaagagaatttccgttctcagggcactatgccttggatggaacagcgcaaaagaacgatgaacctttgcacatactcactccgcttcataatgtaaaactttcaggcattgccaaggttttttttgtcacatgtatataacatagttgctaacacattggacaatgttattatttttcacacattactaacctaattagtacatagttatatacacattcacttacagaaatacacatatacacagtgtggtaagtacatcacatggttcagatcgataaacagaaattacctgtgttcagaacgattagaaacgctcttatctgaaccaggcacacgtaaccaaagctaagaacttgcagagatttccattccagagagccgcttatgcctcgaatggaatttaacaaacacaaatctagcaaaagcaatatacacctgcacatcatcatcacatacacaaattaacctaccaaactggacacacacacacacacacacacacacacacacacacacacacacacacacacacatatatatatatatatatat

SEQ ID NO: 1564 - DNA, 977 bp, Oryza sativa
agcctgctgcatcagcatagtcgttcttgagaagattggccaaggccatgtggtttgccttcacctttggagcgcgattggatgcgccaaccccaatggcatgctgaagtagctcgttgtaacggtagtcctgcttcttcttccccagacagaatgggcatctgaacttttcattgcctagactcaccaccggcttcccagacttgaggtccatgtagcacttgtcagcatagtcatcaatatctgcatcacttagctctgactcgtcggaggtgaaatccatggcagacctgagtgacacggaaatattcaggtgagaacattgcattgagctcgaaaacagcactggatgcacctttgttacaaccacagttaaaaaaaaatcaagcaaggatgtagtaagtgtgcatatggcattgttcagaacatcagaggaccacacagaacaacagggcaatggtcattcatgattagaataggaattacgattgcatttcaatttgcatttgcatgacacaacattagacagtgttacagattctctaacactaaatgtgcttcagtagaagaattgaaataagtcagcagcaaaataattatgaaacaagcaacacaaaatcctacagttttgaaataactcactgatgtgtgttcattttgcaatctacttcttttttttagcaagaagggcagatcccctcccatttccattaaagaaaccagcacagaacatttcaggaaccactacactcagaacaagtacaggaaaagtatataacctgagaagacctgataggcaatgccatccccatttgcacccctgaactagcctaagcaacaatccagtaaagttccagcaaacaaaactactgccaatgaacagaggtgatgcaatctattgcaattgcatcagaaacagccctatagaagcgaaactcgaaatatctacacagtccaagtataaatgtataatcaag

SEQ ID NO: 1565 - DNA, 1488 bp, Oryza sativa
  unsure (1)..(1488): unsure at all n locations
gaagggtttctcatccagctcgcccattctcttgagtccgatggtgctacgagggcctaacagttctgataagccctacaaaacatacgcacaaactcaggtctcagccacaatcatagtataataagattgaatctgaaatgagtccaaataaacacaaatgaaaatatcttcagactctgtcaagcagtagaaaggaaagatcagcatatcatcacattacagaaatcagcgctttcttggcatcttgcagttcatcatttgtcttcctttctttgataatgnnnnnnnnnnnnnnnnnnnnnnnnnnnnnnatctcctcaatcttctcatttagttcctcagtcagctcgtcagtacgtttcttcacatcaacaccctctccctccatgtgttggaccaccagcagtcttcctctaagttgttgtatttccagttccagcttttgcttttcatccaattgcttttctaactgcaggattttgttcagagcaatctccttctctttctgtgagatttttacaagccagagtaaattccagagcatgagaaattaaaagaatcttgcataagattaataattggaaacaagagtgcagaccttgtgtttctcaacaagctttagcacatttttatcagacttctgttgctcgattctagccatgtggatggagtcgttttgctcagagttctgtaggggaaatcagtaagacaaacagtcagataagatattctaacaaagatcatcgtaaccagactgtaaatgcggagctaacaggaagtgtaatatagatacatgacaagtatacagaaatcctgtcacccctagaaagattgtcatagctgttcctgaagatagaactctgaagaggaaatgcaaatgctaaacagtaacataaagcaaagagagcaaagctgtggttacattcatacctttttcatctcactctccaattttcttctttctatgtcagtttgagcaacaaacttgcttagttgcttggatctcctctcgatggcattctctttatcatccaactgtttcctcagctgatcagtctcttcaaatattttctgtgaatgttcacgagcagcagattgcatatttcgcatttctgtaacagcaataaaatgaaacaacacaatagatattattattctggcaaattggcaataaaagtagacaacaacatagcaatcatatgcccatggcatgagaattattcatatgaacagtttgtagtatgtaccttcattgtaacttttgtgcagcaagtcagtttcttccattgccttttaacagagagaatcatttgattgcatctgcattccagttccaccaaatacttgctcttagctgtaatctggtgtgacaagttagctatgagagtctcaggcttgcgagacgtgtcattttccacaccagacacggtcgtcatatcaccatttgctgacaaaaacctaccaactgggtcactagattagtag

SEQ ID NO: 1566 - DNA, 809 bp, Oryza sativa
tgatcttcaagactccaactcgtactcggtttgtagcccatctccgactcggattacacgtaggcgcgcgcctatttatagctgctgccctgcccgtctccttactccattagcttgctagcgcgcggcacaagagcagtaagcgaggcgcgcatggcggcgcgcgcggcgacaccggcctgagcaaggtcaggcgctactggcccgggagggcgccggactgggcgtgggcgggcgccgctgtcgctcacgacgaggacgacgcacgtctcgtctcgacgcttgacgagatcaagcacgtggaggaggaggcgctgaggtcgccgcgccgccgccgccgccgtgtacggcagcctcccgagatcgtctcggcggcgccggcggttgactgctggcatgagcccgatcagatcgaggaggaagaagaagatgacgatgatgcccgggaggagcgcagagcgaggataagggagagggcgctgctcctgaggcagcatgaggaggagcagcttcttcttcatcatcatcaccagcggcatcaggaggatgaggcggcgtctgagtccgacgagacggcggcggaatcggactcggacgacgagcagatggccgtcgtctacatggccgcgcccctgttcgtccccaagtcacagcgcgacaccatccggctcagggaggaagaacagcatcggcagcgccggcggcttgagctggagctggacaagaagaggctcgaggacaggaaggctcagacgaggcggatcctgctccaagagatcatcaaagaagagctcctcgccgccaccaca

SEQ ID NO: 1567 - DNA, 690 bp, Oryza sativa
  unsure (1)..(690): unsure at all n locations
gagcgtaccccggcactggaggagtgggcgcccatgctagaccagcgctagacgactttggccgcccacgatagaacggcggccgaggcggagtcctccctccacctccgtgaggaggccgctgccgagcgcaaccggaccaccctcgccgcagagcttttggtggctcgttgcgcggaggagctgcggcttcgagaggaggcgtgccgggaacggaacgccgtgcttgccgtacgcgaggctgaggtgaaccgccgcgaggtggcggcacgccggctgggcgagcaactcgcgaagcgcgaggaggccgttgcgggcgcgaagctcggcatctggaaagcgcccgcgctgagcgcgcggcgatggcggcgagggcttccgagctggaggccgcgagaaagagctggtggcaggcgggcagcccagcggcgcggagttggtaagccaactcaccgcggctcaaagcactctcgccgacctgnggcgcctggtgcaggaccaagccggggagatcgtggccctccgcctcaccaacgagattagacctggccaactctccgacgccgtcgaacagctggagcgcgcgggatgcggggtaggcatcttcgtgcgccaggacaggaagctcccgcctacacagccggcacttgcgttccggctggacgggatggcggcagatttggagaggct

SEQ ID NO: 1568 - DNA, 1200 bp, Oryza sativa
cgatatattctcttcattcatgctaaagtggttctacatttatcccgtatgtgcagattgacagaggatatatctctcctcagtttgttacaaatcctgagaagtcacttgttgagtttgaaaatgctagaattcttgtcactgaccagaagatttcttcaataaaagaaataattcctttgctggaacaaacaactcaactaagagcaccactcctcataattgcggaggatgtagctggcgaagctttggcaactttagttgtcaacaagcttagaggaattctcaatgtagctgcgattaaagcacctggctttggtgaaaggcgtaaggctcttcttcaggacatcgccatcgttacaggtaaaactactgggcaggcttattggatttattttttcccgttctcatgatgttccatgtttgttaaccaatagctctcacgtctttgttaacaagtacttcatcttgctactcagatatatattcatcatttgttatctttttacaattatttagtatttatgcaatacacagacagagatgcttacatgaattatgacataaacctgcattgcataatccaaatatttatcatctggtttattggctttgtacacaagtcattctactgcaatataggcaacattaatgcatttctttgccatctagcaaaagtgacgcgctaacaaagactctactaattgccaccacctgattttgtattagttaaagtggttggagccagtaagtatggtaaagtccggagacagaactgagttacctgaacatagaactttgagaacatatctttctttttccaaaaagcctacagcttgtttcatcctgtggtgtgctctatctctattgcctgtctgatttactgttttttaatgcggtgtcttttgtttcaggtgctgaatttcaagccaaagatcttggtttactggtggagagtacaaccgtggagcaacttggcatagcccggaaagtgacaatctcccagtcatccactaccattatagcagatgttgccaccaaagatgagatccaggcaagaattgcacagctgaagagagagctttctcagacagactcagcatatgactctgagaagttggctgagagaatcgcaaagctttctggcggagttgcggttataaaggtaggagctgcaaccgagacagagcttgaggatcg

SEQ ID NO: 1569 - DNA, 2954 bp, Oryza sativa
tgcatagataagggcaacttatttagttattttgatacatcttaggcgggccggataaactagaacatgatactattcttttacatgtgtgtgtgcgcgcgcgcgtgtgtgtgaaatcttcttggaatcaaacagtaacctacatgtcacttcaatttagacagtttactacctattcttaaacatttttccttctgtatagtttacatgcagaaaaggtgcaatttcaccatttttaagttcataaaattgatttttttatcagggagttttagaagcaataaggataagttgtttaggataccctacgaggcggacattttttgaattcattaatcgctttggtattttgcaacccaaagttctaggtcgaaggtaaattaatgtttgtttagttttttctcatttttacgggattttttctctcctatatttatgctaatcttttcaccaatactaatgtgtttgttggcagtcatgatgaagtagctgctactaagatgcttcttgggaaagccaatcttacaggctatcaggtaattattttaaaatttagaactaattcccctaaaaaaagttataactaattaaatcatgagtaaattcttttcatttcttcagcctgtcattattttattccatgaaaacagtaacctgatgctatcaaacaaatcaatttccatgatataatgtgcatttttgtttacgaggccactcctctctgccatttagcagttgtagtttgtttcatataatagtttttttcccatcatctttgcctgatataaatcaaaaggatattgaaatgcactaatgttggaaaatacaagggttcccataacctttatatatatatatacacacacacttataaaatagtgtgttaacaaaagttggtatatcattttgctaatctatgatctacctcactttttctgatttcaaatttacagatagggaaaacaaaagtgttcctccgtgcaggtcaaatggctgaattagatgctctcagaactgagattttgggactatcagctaaaaagatacaaaccaaagttcgatcgcatgtggctcgtaaaaaatatgtcatgttgcaacattttgctacacaactccaggcagtatgcaggggtacatatatatttatatatattattttacatacaaacactatttctttcccccatgaaattggctttaaggagagagagagtgacttctatccttcaattgtcgaaggtacaatcgcaagatggcggtatgaaactatgcgtagagaggcagcttcattgaaaattcagacatgctaccgtaaacactgtgcaaggaaaacatataaagagatttgttccgcgtcaactactatccaatctggtttacgtggtatggctgctagacacaaactccatttctatcggcaaacaaaagctgcagttattattcaggtatttacaaggttttactttagtcagctatcgtgattattttttttcattttaaggttttaattttaactccataaaattagataattatgagtcaataaattactcatttaatgatgtcatcccttgcagagtcattgtcgttgctacttagtgctctcaaattacaaaaggatgatgaaagccataataacaactcaatgtgcatggagaggaagagtggctagaagagaacttcgagaattgaaagtggtaagagcaattactttctccattctccctttcccctaggcatcaagctacaacattagaaacttttgttttgcaaactccagtgtagcttgtcatcaatctttctattttttttcattatatagttcttgttgttttatttcttcttaatattaaatcttctctatttttttgttcagtgcatgtcttagtgttaatgtggtaagcgcactacaagatactactggaataaaagaagtatgctagttatatgtagaaaggaacttaacagtaccggcaatgctgctacaaactcattatgtaacctagtttgcatctttcatagtttctatcaatatttttgcacaggcactctttttctgccttcctagaattgaacgaagagtaatgcaatttgactccttttatgccttcctagtctaaaaatcaatatccaatttgatttttggtgtgacttgccacttttgcattgctttcaggctgcaaaggaaactggtgctctacaagctgcaaagagtaaactagagaaggaagttgaggagctcacttggcggctacaattggagaaacgcatcagagtaaactagtgcactaaacacatgcactcttttccattaagttatctttatttatagtgcaaatgcatatagaagtgacatgatatttcctatcttttactacaagcaaagttatccatcaataaagaattatcatttaaatggtgtgatatctctaaggcacgctttgacctaactttacataccaacaaatacgttatgtctatttgcagtatgcctctattattatatgtgctacatataatattgattacacttgtccatttatagtaagttgtctccagtgaaaaaaaaagatggtatttactttaattacgaaaagagcatagtcccattgtttgaactaaccaacgtcaaacaaataaaaagggatggagacacaagaagtggaaagatagtttggcagcaagaagaatactgatagtttggcagcaagaagaatactaatgctagtatgatagcaaagtatcaggcattgcataacaccacaaaatgaaatttcgatgattatgtaattcctatgcttttttattcatatttgcaggcggatgtagaagaagccaaggcacaagaaaacaagaagctccagttacaattgcaggacttacaaatgcaattgaatgatacaaaagaattattacaaagggaaaaggaatctactaaggcggaaatggagaaa

SEQ ID NO: 1570 - DNA, 617 bp, Oryza sativa
acattttcaggaagaggaacagattaaacggctggaaaggcttaagcaagagaggcagaagaggattgctgcaagaagtagcacatctaattcaatatcaacaccacagcaggtcaaagtgaaaccttcaccaaagacttctcccagtacctacaagagttcaaagtttagtgatgctgaaccaggatccttttcacctctaagaaagcttcctgctagaactactgcagagagtgaccatcagaaaacaggaaaagctagcaaactaagcgatagtagtacaaatgcagtgagtaaatcaacctcatcattggcagcgatgaagaaagagaaaaatgggagaaatgaattgtccagtgagagattgaagaaacttgctgaacctaaaagtaatgctttgaccgaccgtccttcaaattcaaagtttgctagcatggaccattcacgaaggaaaagcatgccagaagatacccaaacaaagaaaatatctgctataatgcagctcgaccagaggaaatcagcaactgtaccagaactggaaagtcaaatctccacgagctccctcgatatctgtgaagaataagacaattgctagagaaataagggatggggatcct

SEQ ID NO: 1571 - DNA, 1300 bp, Oryza sativa
ccttgttgacatatacaccttctacatgcaatacttccatgtccttttatcttcactaggctaaaaaaagtaaagaacataggccaatcaaagctcttgacgcttggtcacattgccacccctcctctttccatcgccgagttgctcctcatattctctccaaaattaagtatacatcacaagttaggggcctccatttggtgttttcatacgatcgagggcaatgccagatcgtgagatttagctataatttatcaccctctttcttggctttcttgatcatcaccgtgttcccaaatattacagacataagttggtggtatcgattgcatcatgggatagaattgatgtctacaattttggctcgataattccatcctacgcaatggtaatagcttgtttccttattgttcttgtttctttgaatatcaaaacttattattgcatagcatctttcttttctaacatggtgttaccttgacttctgttgaacattccacatattgttagacaaaaaatatttgacaaataatgcatatgagtcgaatgcatttattacgctatgtataacaatttgtaccacaaaaattcatgtatgtgcattaacactttatgatgcacatgtgtgcaatgagttatttataacataatatacaaaatgcaaatagaattgtttctccttagttattcaagtataaatgtaagtcaatcatatctctcttttttatggagacaagccaatcaaatcttaggatgcattttctagctgatacctcctccgcctcctcctccttctcattgtactctctacacaaacactactaaaaaaaggtaaacatcatgaaccaatcaaatttctcaatgtgccgcctcctctccctccaccacttactcctcctgttatcctgtcatgaatcattgctaaaaaaagtaaactccagaagcccactagatctcataatgaaagccaattaaggccctcaatttgctccaagacgacactacgatcaagggggaaattcactcagatttcagttaggatgccaactcagtatttacaatgctcggcaaattggcatcacattgcattgtcgggctgtgctgatcctctctatcctagtctttgattgtttcgtcacgcgtaatggtacccatttctttccttccttttctcttccttttatatacatatcaaaacaaatttatgagaatgcattacatctttatttttccagcctaaaccctcttcatgtcttctatatgtttgaagatgtccaaatgcaattaatcaacataatag

SEQ ID NO: 1572 - DNA, 724 bp, Oryza sativa
tttttctttttttaaagcaatgtcgagacaaacaatgttcatggaagaagttataaaaataagcgaaagtgttttcattggatacaataataataaagctaaagatgatatgttgggagctcaacttacatatatttcattgagtgcatatctggactttagattttggagtactcctggctcatgcaaataagctagccttgtcatatcctccacaccacctcggggagattctgtatccttaggataggcacttcccacattaatggtgaccttcttgccagaagtgcagtttactacgagatcattttcattgatctcctctaccaggccatccatccaagcctcatctgggtcctcgacccagacatgagatcccacaacgaaacgactcttggaagcctgtaatgtagtttaaaaaaatattagatggagtatttggagccgatttcatatagagaaagaggagtaacgatcacacacaaaggcataggtatttgtacacagtcctacttgtctacttagatactacaactaattcaatttacttaaaaaaagtgaaattggtggagtgttaaaatggcatcacaatgttctgtgcatagatttgaggataattcagtgagtgctaaataaaaataaaaagtatatcatatatattcgctataatatatgctagcatgagcccatgcgctctctctctctctctctctctctctctctg

SEQ ID NO: 1573 - DNA, 571 bp, Oryza sativa
aagtgtccgacccacaatatttgaaaattcgatacataaactttgattagttccacccaacccatactcaggcatacttcatattgggtacatatgcaaatggtaaagcccatctaccaagagtcctctatatgtaaggtctaaatgtattttggacataaatagtagattaaatgcaaaagcataccagttaagcacctgtttgtcttgaaactttcaaaaccataaatgtccagtacaccaatcaaaatctttgaatcgggatcttgaccaattgaactattgattttatttacaagcctgtagtagtgaaaatacaatagttaacaataattataacttattactgtctgtaccatgtattatacaaggcagcagaaaaatatttcccaaaatgattgcttgtaaacttaccaatcaaacaaacgtgaataaacaatcctagataatgcatctctactaagagctgcagctcgtggatctaaattttttgtgatactctccccacgtgttgccataacacgcttacacaatgattcctcgagacccttttcatcacacctggaaaatg

SEQ ID NO: 1574 - DNA, 604 bp, Oryza sativa
ccgtgggcatggctgttcgaacagtttgttaacctctgcagagggggtacactttacccacacgacattactaacccggatcacccagcccgtggggatcagccacgtcgggagacctccaagctttcatgacaaggcattttcaaagccgacacaggtttaccatatgccgacgagaggggtcccagaccaacaacaggttaggtcccaaaccatactgtgccaggaagcccaggggtcctccccgacaccaccccggcggatccacatgtctctcggcatcaaggctcccctgataagctagttactcagctaggggtgtcccattccacccatgtggtcgtacttgtcttatgtttggatgaaattccaaggaaacggtccttaagtgcaagagcgggaaaccgtacacccggtacattccccggtccgcggttttggaaattcatttagttcgcaaaagggcccccaaccccccccaaaaaaacccccccccaaaggggtttggggtttttttcccccgggggggggggggtttttttttttcaagtttttgtaaaccaaagtttacccaagttgttaatcagattttaagttttgaagg

SEQ ID NO: 1575 - DNA, 7156 bp, Oryza sativa
agtagggcggcggggcggaggagtcgatggagctgaaggcagcacgcgaggggaggggaggagacaaggctggcgggcggcatggctagggctagggctgccttgccactggaagtctggaagtcgatgtcgatccaatcatccaaccatggggagaaagagaactacaagggaagggagcaccacacccccacccccacccacccacccacgaggaggaagaagccgatggatagatttacccctttttttaactgctacctactcggctactcctatataagcacaagagagaaagaaaagggctagagagctgctttggtgtttcttgggccaagctagtgtgtgcagcaccatcagatcaagtacgtgattcctagtgctttgctgaattactaagcgatttatcaatatattttttccaacaatcaaattagaagtaaaaagaaaaaaataaaatatcagggtttatcagtacttatcataaaacaaacaaatgatattcacgctttaaaacatattgataaatatatgttaaatatttaaaaatgatagatagatttgataaaatattgtagtcggagggtgaactcctcaagcggagaactagaaagcccccattttagttcggcggggggcagcggatgagaatcgaggtttggaggaaggagtgatgtggaggggggtctggcccctcaagaacgatgagacaaaaaggggtttatacaggttcggaccgctaagaggcgtaataccctactcctgtatgtggttgattctgtgaggaacaaagtgtatccgtcggttgaaatccgagagctccctctcctcactaggcctggaccttcttttatacctcaaggggttaccacaggggcccaaaaatccacctagggaagaaggaaaacattctttgcatttattacatgtcttattcctctgacagagaagaccatgcgcacaacatctcagcatggccccatcagatcacgccgagcgacacgggggacgcctacgtcattctgcattaactgcttgaaaacttccaggcacccgttcccaccaaggaaagaataccccaatttaactggagcaggaaattgtccccagtttgtatacgaggcaaagggcttctcatcatggtgatgtgaccagatggcaccgggcacatgccacttgacaggcggtcagtgcgcggtcagtgcacaggtgcactcaccctgccacactggtcattcgagcgtcgtgcagcctatcagccacgcctacacgccacggccgtaggatctgccttaaatgcggttaggtgggcgttgggcgcgcccactcaacccgcacatgctggcggatgcgtggcctgacccctaactgtgaaggggtagccgccgctccaccccgggctcgacccccctcgggggagttccacgtgggtgtttgggggcggcctcctctctctagacatgatactccctaacctatatcaccgacaattgtgcaaatgatgtgagggtgtgatgattggatatgcttgtatgtttatttgtagaattaaataaattgtcgatgatgttgtatgcttgcatgaggttaaatatgtaattattgctagtgggtgatgatgtggtatggttgcatgttgagctttagatttagtgggctataactttatagaaagtatagataaaacaggagaagacgttgttacaacggagccgtcggtgggaaatccacttttgactccctcaaccataataccgtataccttatcccctataactattaaaaccgatgtaatttgacttcctaatcattattcatgatgtggctcattgacctgctccaaccagctaacgtggctcattggccccacatatcagtgcccctcctctctctctcttcccctattctctcctcttgcatggttgcatctcctccggctatggcacccatccctgcaactacctcaacttgaatggcgatgaggtgaacggggcgggttgaatgatgacaaggtgaggcaacccgcaagtagggaggtgaccaactttgatactttgcgcgctacctgcttcgcgaggaaccatgcccacaacggcgtcacagactctatccccaatagcaagcatggcccaaacacgtgcaacacctattgtgtcgtccctgtgcccaatagcgtcgctgggcatgatgtcaacgacaggtgcaatgttgccactgtcgaggacatctttacggcttgggtcatcaaccacgtgaggatgagagaggcgaaagcgaacttcactcccgtcaatcggccctacagcacgatgtctgagctgttacgaggggttggtgctgtcgctaccgccctcgccgctctagggtcgtcatcgccgttgttcctcttgggcaccaccgcgcatatatggtcaatgaggtagcggatctagacacctccagccgtggcttgccctacaacacggcacctgagccatcgccgtattctctcaagggagggagggggggttggtgctgccaccatcatcctcgctgctcccgaccgctacactgttctcccacgtgctcaccaagataccgacaaaagggggaaaaccataaaagaacccgaccgctacgctgtcctcctaggtgctcaccaagataccagcaaaagagggggaaaccataaaagaagtgagttgagtggattcattggggagagaggccaccaccaacaatggcgagttcgtggtggtggcagtgtggttgtcgtccaagagcccaccgtcacctgcctgccaaggctgatagaagaggaggggaaacgaaccgctgccgcagcaaaggagagatgagaaagacaagccacgttagcgaaaaccgctttcaaaaccactaagaaaatcaaattgcaccagttttaataattaggagggtcaagatatcgtattaccggagtcaaaatgcacttattcctccttcatactaatggcatatgggaaggtttgtctgacccaactaaagcccttgagatattacaaatctgcaaaaccaaaatgtacatatgtttggtagatctgaatgatattgagataagaagatggcaatttgtaaaagtaaaacgtagtcgggagctgatgctcataaattagctaagtttgcatgtactacaaccctctttttttctttattgagggtacttgatttgtcgatatatatttatgcaagtacacttaaaacctgttagtcatgaataaaactctgaacttttctttcctcaaaatatgagagagggagagagactgctgcacctttcctctcaaaagctttgccgcatctgcatgggtttttggctatttaagggtcctcctcctcttactactagcaattaatagaatgagagaattaattaataatttttatggagtagtcagcatttttctctcgaaaaacaaaagagaaaaagaaaatcatctcgatctcaatagcactccgaatctggatcgatcgggtcgtcgtcggagaatataattgatcaccatggttccggtgaatttcggggattcgtcgtcgattcccccagtggatgcggtggtgccaatggcaatggctcctcggttactctgcttcctcttcctcctcctgcagctgttgctcttcccccgcgtcgccgccatcgtcctcgccgcaacccccgtcctgcttctcgccgccttcctcctcgccctcgtcctcgtctacagcgagcccaacaacaataatgagcccgatcatctgattccgatcaggatcaggtcgcgcaatccccatgcccatgaccatgcctcctcctgcaccgcctccggatcatcggacgacgacgacgacgcccaagactcggactcggagtcggtctcggagcctgccgatgatgagaaggctgcggtgtggacggcagaggacgagaaaagcatccagaacatcggctcgctggagctggagaggaatgccgctgtggagaagctcatgtcctcaagaagcatgcaccgctactacgccgccgaccgcgacctcatcgacctcgacctcgacggcgatggccaccagctgccccccggctccgctccctccatgcaccgcaaccccttcttcttccacgatgaccaacaagcagcagcgtcaacggcgaagctgttcagccgacacgagagcttcaggccatacttcgtcgccgacaagacgcagcagccggtcgtcctcgagagcagcggtggcggcggctcttcctcgtctttgtcttcgtcttcctctgccagcggcgaccgtgccggccagcatatgaagcaagaagccgtggctgacttttcctccagctccaaggccatggtggtgacggtggatgcagagctccccaaccccaagtccatggtaacggtggatgtagagctcatcagcgactcctcggatgatgacgacgacgacattatgtcgttgcccggccagcaaataactaaggtagcgagcagcatgtcagacgacgacgatggggaatcctcctttgaggtggagagcatcacacgacaggtaaatgaaactttgcatgcccatgctgctgctgctgctgccgccgccgccgccgcccgtgaaggaagagaagaaaaagaagagaagaacaagttggcatcgattgaggaggacgagaggagggagcgcgacgtctttccgtctccgtccccgttcctccggcaaactctgccaccattaatggcgacggcggtggttctcctcctcctgccgccaccaccgccgctcccaaagcagtcgtagcagcagccagatacaagacgccctccaagaaggcagtcgtaggtttcttccgaaaatgaccaacttaattaattttaattagttactgtttcttcttattcttcaattcaattcatcttaatttagccagctcaatcttttaccatacgtcacttataaagaggagggtttatagtatgtcgtagtacactgtatgcaacacgtttgtattgtagtactacgtatgcatgcatatcagaatatgtacagagtagtacagttcagcaagcacgtaggcgacctttctggcttctgggtcgcaaagccagctgcgctgatgattctgattcttatctcacccatgcatccatctctgttctgcatctaatagaatagagcccttgaaagcaagcaaagaacaaggaattatttaatattaatgccttacttgatgcatacgtacctttgcctgataccccttttccagcaacagcaaaactaccatgcgcagattggcatcctcttccaccgtttcgtttggtaggcaagcaagcaaaagacaatccattcctggttcctctccttaaaaaccaaaccaagcgggcctatgtttactgaagattagtctttaacaggggccaattccttcccgtcatcaaacagacagacaaacaaccaacacaatgatgatcaattctgccttaacggctgcttccttccaatctcctcccactttcatcaaactacaagtacagctaaggcctcagaagcgccgcctgcaacaccaacaacagcttctgattgttggcaacaacggggcaataacaataggaaagcaggagttcgtgctaaagcctgtacaagcaacactagggccaaattcaactggtggccgcgggggttcgcccctacccgatgtgatccagcagttctactcctccctcaacgagaaggacagcaaacgtcttgaaaacctgattgctcctgactgcatcatcgacgacaacgcatactataagctgctggacatcaaggttttacttgttcttcattctcatattacagacctacagtatataagctacagcattttttagtccactgctccatatatatattggaaaccgagctatcaagacctggttaccatactcaaaattattcacagcaacttcgctgcatgtagagtacccaaacctacttcaggagactgatggatgcaatgggaaagaatttcaaatttgccatcgatgaggtttctcaaggagtggaacccactttcgcagtaatgtggcatcttggtaagatactgtgtaatacaactcaatagaagtgataagacaatcaacttggataatggtataattatattgcttttacagaatggaatggtaaaaccatccccttcaccaagggctgcagcttctacatatgttcaagaaaagaagcagcacttgttattaggtagttcatataaataactgctcttgggagattttctttgtctatttcaaaaacaatattttttgtttccatgtttcctttgcattcatgttagctgactcttagagctataacgttgcagtggctatgcttcggtttagcctctaaataaataaaaataatattccccttctgttatctctgatggtattctaacacaatgcaggaaaattcatatcttccaagagtcaccagtgaaaccatgcaagttttcactggtaggcatgctaatgagtttcttgtctatattaccatacagtccaactgaatcagaagtataactctcactgatgaaatattccaatgcttacaggaaatactaaatatcgctaccaacttgtttgacacattcccgaatatagctgaaggtacatgcttcatagaatcaactgtttagtttataatgttggtagctaaaaagcagtctaaaaatgttagtgcacatgcaggtttattaaataatccagaacaagcaatacagccctttgtgaggctttacaagtccttcgtgaagcctttcatcgtcccttttcttgcatactatacccacttttggacatacttggctaaagtattgactatgatgctccatttgttgtatagaataatcaaatggtatgtttaaagactagaatgactgaaaagtccatattgtgaaaatagaaattatatacgtaccttatctgtgcacaaacaattacaggtagccaaacaagaaaggggactgtatggggactaccaatggatcagaacttttcagatgatgtcatgtcgttgccagaagtttatcttgtccattctcctgcctagaaagagtgaacatcatttcgtttttaaggaatttaccgttactctattagtataaaactgtagataatctctggaa

SEQ ID NO: 1576 - DNA, 1048 bp, Oryza sativa
tgcttgttcgaaacatgcattggttcttgccatcgctgtaaggaccatcattgttagaaggcttgaatattgcctactaatttgccgatgtttattcttgatttactttttacttggtcttggactcctggagttagtaaaatttttccaagatccaagagggacgtttgttagcatttggcttggattggctatttacacggtaaatgcgcgtcatgcatgttctaaatatgtatcttcttttattgcaggtcacttatcaaacagatcttttcctagataaaaatatagattatgctgtaaatgaacaccaaatcttgctaaatgcttcaaaatgttcttttgtttcaagtctttttccaccttgtgaagaatcaacaaaatcaactaaattttcttcaataggatcaagtttcaaggtaaaacgatgtttgttttctcttgcctttccatcatattatgcataaccatttactcccttgatcgcgtgatctcacagcaacaactacaatctttgttggaaactctaagtgctatagaaccacactacatccgttgcataaaacccaataatgttctcaagccagcaatatttgaaaacagtaatgttctccagcaacttcgatgtggggtgagatcttgcgattcaatttatttatattcatgaatactcaagtgaacatgctaacctgaaatttgattatgttggccaccactgttaactaatatgcatgtttacaccccccccccacattgttggacaatttgctaaccttgtgcatagataagggcaacttatttagttattttgatacatcttaggcgggccggataaactagaacatgatactattcttttacatgtgtgtgtgcgcgcgcgcgtgtgtgtgaaatcttcttggaatcaaacagtaacctacatgtcacttcaatttagacagtttactacctattcttaaacatttttccttctgtatagtttacatgcagaaaaggtgcaatttcaccatttttaagttcataaaattgatttttttatcagggagtt

SEQ ID NO: 1577 - DNA, 1395 bp, Oryza sativa
cctgctctaatggaaatttaagagagagatcactccgctaagtaaacgagacagaagattcggataaatatgtcgtatcctatttaaaatagaggcaacgaaccgattcaggtatgtcataccctatttaaaatagaggcaacgaaccaccaatccattagagcttatttaatatttaatagtatatttaatagtatatccaacaactcgctccaattaatttatagccaccaatccatttgagcaagtttaatagtatatccaacaactcgttatccaatcatttatacaatagttatttataagcatatattacaccattaatatatagtcctactttttatatacacacaacatattaacgtccgtgctgcaacataagtcgttatttataagcatatattatattatttatggtattaatatatgatcctacttctcatatatacacaacacattaacgtccgtgctgtagctggctataaatctatatatatacacaacacattaacgtccgtgttgtagctgactataaatctatagcccgctttcatgatattgaagtctgttcttagcccgcttccgctttctagttgcccgcttttctctctattctgacgctagtcgaaaaccaacgctttaagacgctatcggagactagcgatttctattgctgcgatgcttaatatgcccgcaacttctattgctgcaatgatgattggaaattgcaagtggtagtaacttacacagcaaaagaataggaaatgcagcaaagataataactagcttgcactgaacctcacacttctgaaagagactcttgatgtttcaactatctacgagaaaataatcactaggtgatcaagaaagtgattatatgtcaggcacagcacacaaataaacccaacatgactaacttctactgtccgtgaagttctaaccatttaagcaggggtaccaaatcatcatctgcagggagcataggcgacatgaatctcctattatacactcaaaaaacataaaagcccaagttctcgaaaaaggaaaaaagcagccgccaaaatggccgcgataagacgtcaaaatcaaaggcttatgttgtgtctcatgtctcccttcgggacctccggcgtggggcagcagctccatccttctcttcctcttccttctcgtcctccttgccaccgctgcttccagctgcttcggactcggtagactttggttttttgacctcggctacgggcttcacaggagcctagggaatgcaaatcttacgatcagccattgttgtttaactaccaaacgaggagagcggaagcatatgtatgttgtgagagtaacttaccgctggcttcttgccgccgaacaggatcctgaagagcacagtcacaaaga

SEQ ID NO: 1578 - DNA, 5794 bp, Oryza sativa
aatgagcttgagtaactgaagctgttgcatttctataaacatccaatctggaagtgatgtcaattttgtccctgagatttcaagggttagcaagctagataaagcagatatggaacgaggcaattcctcaaggttggagcacatggaaagcaagagctcttccagttttatcatatcttggaaaagatcacagggaaaaatgtttatgttgagctgagtgagatcaagatagagcaagttgttcacatggcatttgtcatttggtgacagagtgttgccacgattggagaaattgcataggcttttgaggttagtacatcctctgagagaaagcaacctgagattaaatagatgccaaactgaaggagggagtgattctagtggtgtataagaaaggtcaagaatagaaagacaagagagtttaggcaagatgttgtcaattaggttaagcaagcttggtttgtgtgagaaatgacttagaagaagtgcggttgtgccactagatacttccttgttggttatgcattttccacttatgtgccatttctgatcctccgttgtctgctcacaaaccaacttgatccatcccatgttctgcaaacactgctcctcatgaaacatttcgtcttcagtgagatggtttataacgagaccgtgatatgctaagaagtgtgcagcagtgtcagtaggctcatcaactttagttgctggagcaaatggtagctttagtaatgaatactccagaaacgtttggaggatgatgttcccaacttgatatacatcatcatggtgcctgatgcccacattgtggatgttgtcttgaactgctcttggtggtttgctagcagtaaggaagccttgggcagcccagtgacgaataagctcttctttggtaacattaataccattgttgttatctgcattaggtggcgcatgacattgtggaaagagaagcagggcatagtgaaaacaccggagggcaacgcggtgccagtgctccacgtcatcctcctgccccactgccttggagatgtccttggctgattggtgcagcgcaaagaggataagaaccatgatatcagcaccagagaatgactcatacacgtcatcaccttcggacttgctcttgctacagacttctcgggaggtggcggataccacccattcagagcccgaccatgcattagcaggaggaagccgcaactcggttgtgaaagcactggtcgtgatgggcttgtacaggttctcaaccaccagcaggtacctcttactgtccagtgtggcgttgatccgaggagccatttcccaaaacaagtactcacgcatttcattatcccccgacacaccccaggagaaatagtttgtctcctccatcctttgcttgagcctgtggtattcttggtcgagcagccccagctcctgtgccaccgcggcgaccagctgcgcctccaatctcatgacgaagctgcttcctcctcccactcgtttttcctctggattgatcggcgacaccttgattacttgatcaaactgtatgttacggggaaacacatccagagcgagccttgatatggcccgcgtgaaggaagctgccggcccaaccccaacattccaatgcacgttattatcccggtaaattttatacgcaagttttgaatattcgtcagtgtcacggtagccacctagcctggtgagatagaggcgagttaattaattagtactgtgcaatttagtatagttgatttattagtgctgaacgatatttactgttttctatccacatatatgcatgcgtgcggccggctgcaggccagatatgattcagcaatatatatatccagtgcatgcatatatatatatatatatatatgcaaagcaccgtacgtccgttggcccgtttcgtgcatgtgtgctcgcttagcagccttgtctacgtaaacaaaataataataactaggtaacccgcgcatatttgcacaactagcattattatattttttttctcatataatagcttaaagaatttcatattttattatagaacatattaaaatggcaatataattttaaattatgtactaacttgactctacacttttttttccaatactcctcatttttttaattcctaatttcagttatttataaattgtattcctatatagactctagactcttctcccaatcttgttttttcaaaaaaaaataaattttagttatttataaattatatttctatatggactctaaactctacttataatttttattattctttaactccaactttcaattaattgtaaattcctatatggactctactcttccaatttttcttatttttaattctaaattctattatttctaattgtatttttatatggatgctaaactcatcttcaatattccttatttttagttccgaactttagttatttataaattatattctatatggagtatagacttatctgtcaacattcttttttttaatttccaattgtaattatttctaaattgtatggactctaatcttctcttcgaatatttctttttttaattccgaattttttctattttaaattgtatttctatattgactctatttttccctttttcttcgattaatgtgagaatttttaggccgtaagagcgaacatggtgacttctttttctaataataataataataataataataataataataataataataataataataatagtggtagtagtagtagtagtagtaataaggagccagctactcaaattctacattctacaaatatacagtagaacctctcatagcattttttatgcccaaaataattatgatgagtccaagataaactgtaatatgtgttttacgtgcatatataaaaaaactaactcgcgcgcttatacggccaaaagacaacactatgtacaagctcggattttcactagcgttgattttgggacaaccaacgaaaaataatccatccgatcttgttctgcatcggcatatttgcaaacgaaaaataatttatgaataaaacttttatatacgtattcttagaggctaaaaaataaacttcgataaaaaaaaaccctaaaaccaactccaaatttaatgtcgaaaatttaaattttgactgataagcataaatataagcgaaaagatgaggccctttgacaaggtatacttatttgaatttgaaacaagaacatatatactcccttcgtcccaaatcgcgtccccttttatgaaaatcaaactcagtagcttttgattaataatcatactaactatattcatgctaagtattatacatgttatattattatatttatattttgaagtactttaatgtgatactaatttcatattagttaaaaacataacatagaataaattatatattgatcaaagtatgttattgaaaatcgtataaaaaattataatttaggacggagggagtgtacttaatgatgagcctatatgtataaatatcggtgggtagatttcaagcattgaatcaaaagatctttgcactcgggcgcatctcacatgaatacattatagttttgcccatttgccgtccaattgcagtgagcaggggcggattcaggaaaaaaaaataggggctcagttacacagtttcttcaatctacaactatttaaggacctttagtttatcattcatggtgaaaaatcgaaggggttgttccgggggtatccatgggtcttgtgggtgtagaggggacttgagttcccctgcacccacattggatccgcccctggtagtgagtattatttattacaaacttataataaagaaagcttgtgaggctaattagttgtgcctactgcctgcctaatataaaaatcctctaaaattttaccatcagttcaaaatactaccgagatatgttagataaactatatgaagattcatattattagattcacaattgattgtagttctataatatttattgtagtttttttacattatagttgtcaatgttatatataggagtataataacttgattcctaaaaatgaatgtaggacactgaaatgacaaatcgctgaaatggtgacgattttttttcttaaaatcaaggtacgggaattgggaagctttgtttagtcactcaagtttcaaccgggtcaatttggtccctaatgttattatatttaacacgaaaagctttttttttaaaaaaaaaacatcatgtgaacccacggggcctcgcttggctattggctatatattaagttcgggcctgtttactttgataccattttcaatcttaccaaattttggtaaagttgctaaaaaaatagctatatttagtttgctactaaattaaagtgtacatgccctttattttggcccagtcaggcggtcataaatgacaatatgtttcttgtgatttaggaaagatctttgaactaaaatcatctatgtaaaaataatctttgacttgcgacaagtttttacaaaaaaaaaatggcaatatgaagatcaatttttctgtacagtttgatttgcataatctaattaactcccatgaacttaccttctgtgtccgcattgtagtaggaaaaatagttgcattaggcccttcacagtgctcctatgtggagggggtgctatgtctacgtggagggaaaacaaggtgggacccatagctacggtgggttcttcgcttctcaacaaaggaacgaggtgctcggccaaaaagccaggcgcagggcccactcgacgacgaaaaaagaacgacgcagctcatgcgtcgacggatgccgccgcgagcagatcagccgctgccaccaccatcgctcggaacccgacgccgtcggggagctcgtagctgcgccgccagggagagccggaggctgccgccggggagctctcggccgcgccgccggggaagcctgagggcgccgttgccgctccacgtcgcgacgaccctgccgctgctcccgtcttcgtccgacatcggtggtcgagggcgccgccgcacggccgtcttcccggcgccgccgcacagccgtcttcccgccaccgccgtcttccagatccgcgccgcgccgccgtcttcaagggcgccgccgcacggcccggaggacgccgccgccgccgcccggcccggaggagaggagagccggcgctggcagagggaggaggggagccggcgtcggcgaagggaggaggggatttgggggaggagaaatttggggatttgccggtttgggggtagttggggatttgtgggtcccactagcagatatttgtgggtcccactcagtgcttgcactgtgaagagagggtcttcatcctagctgtcaggtgggtgcttgcactgagaaaggccttttagaattaaccagtaatagctttgaaaatgcagtttaggctagcagagtaaaaaacaagaagatatcataatagctcatcacattataaaatattaacgtttcgccgcttgattcatactcattcgatgcttctctaaaatagagaaggagagaatttaatgataacatctcgagaaggtatatatgtacatacaagaaagttacataccagaatttttcatgcttcaaacgctcacaccatttgtggaagaaaggtgttcccattagatacaattatttatggtagaaaaccacggtatccacaagacctgtatgcaccaaaagttatttgaattagtcgcgggaagtgattacaacatatttttgcattggaagatatagacacttttcttatatgtagaaccctctttcattttg

SEQ ID NO: 1579 - DNA, 2993 bp, Oryza sativa
tccaagtttgtgcttcccataatcccactccccttatcatcgccatgttgcttaccatggctaggtaatcttcacatgacattccatattgcgatggacacataacataataaagctgttaattatctgtgattaggagatgtccgcatgacagattgacaatcttggtggttgtagcaagcaaagcacaatcatgttactagaagaatttccatgctcttttcactggaccttatagtctcctattttgcctcgggcacttgaaatggtgaccatgagggaagaaaatattactagagggaatgattattcttctaaggacaaatatgtgtgggctagtgtgctttccgcttaaggacaaatgttgcaattttccttgcagaaaatgtgtacttctcttataaaatcaagccatccctgatagttgattctgggtgagttgcaaagctaccactgccaagttagcaatgagcagctttgaacaatgcatgttggtacatgtctctctatttgtacaagaaacagagtactaagcttattctaaataggagtaatttgcgtaacgaatgtgagtttcaagatcttaagtatcatgaatgaaatttttgataaaaatggatttgtagctgaggaatacacattagcaatgcagactaaaaaaataaaatagatttaaatgtgatgtgtatatataaactaagagcagaagataaaacatgaaaattgcttacgactaagcttggcaattcaattgattaagaccaattaccaccatagaaaatgtttgtaccaacttggctttgattaagatttcagaactatcaattgatgccatcgttccctgattttttttttataaaactgaagccctgccagagtgtcacttttcagggaatatatagttaattgcatgatctacagaattcagaatggtatagccgttgttattacagatttcatatgctctccacactagaaagaagttcactatgtaatgatggtacaatagttacagtatagatttactaactccactgtgtgctatgagctttggaaacagaacgtgcaatagatatgcatttttatcaccacaatcaaaagtgcatacaaattaataattacacaccactctttataattaaatacgggttctcatattaggccccatacaaacattacattgtttacacacaacaaagcacacattaaagtagtagtgttctacagaaaacagatactccaatcatatctggaagcaaacttaatttcacacatgacaaactggtttagctatcactagatggctggccaacagactggtctccataatcaaggaagctaaccttttatttaaacattctatgtgtgtgtgtgtgtgtgtgtgtgtgtgtgtgtgtgtgtgtgtgtgtgtgtgtgtgtgtgtataagcagatcaacactgacgaaagaactcatatattagtactaatatgcagaaaagttttcttattttcttttttttttcaatatacatggatggaagcagtggatgggcattgtgaaatatgtatggattgatgggcggtataatataatggtatgtggcatatgtatggtactagaatgggtgtaggtggaatactgtcaagtaaggtaagttttttttgttgttgtagtgaatcaaggtaggtgtttagctagcacatggtgaatatatggcagatgagctagctagcagagggcattgccaaaatggcaagagaagtcacgtggcatgtcatggatgcatgaaagctgagaatggattgatgagctcggccatgattcacctgaggtagctcatcaccgtggcgcgctcgttgaaggaggcaaacggcaggggaagcttggatttatagctggcgctgtgcatggtggagtcgtcgtcccagatgagcttccgccaccatgccctctccccgctcacctccaccgcctggcttgaatgttcttggcggaggagcgggagacggcgtaggctccagcacccgcggacatggagctccttccacgccggtgcggatatggcggcgttgacatcatcgcggaggtgctgcagtagtggcaactcctgaggcgcatcctttggaggatagggagctgatagttgatgggttgctcacaaggatgttggtagaagattgtcttgaggttgtagcagaataggatgtcgagtgtcgtgaggcttggtagtgcagactcacgtggcacgatgcgctctagtcttgggcagtactccaggtgcaggtgcttcagggaatcgaagttcgaagtatcattgtactccaaaggtttgtagaaatgaattagactttggagctgagacactcgaacattttgtagagattgccccatggaatatgcatattctaaaacatgcttcatgtgatggcatgagcgaagcttgcagtcctccaacttgtcaaaggagctcagtttagtaaggcaggagacataaatatcatctatcaaagaaatcgatttggcaacttgtagaagagaatataaaccatggggataccgattcgttgcagacatctccacatgacgcttggtttggcgaatgggaggcgcaatggcaaccactgaaaattccttcgccatataacgacggtacacatcaccatatggtgatttcttatttgctagttctgtcaacttgtcggccatcatgtcttgttcatcctccaacctcctaatattggtcttgcattgggcaatttgaacatagaaatcttggaaaaactctccatattctactagccttctggtgtttatgttgaaactgtaaaacaatctagaatcttctatgcaaacatgagcaatattttttttgatatttgcaacttgatcatcataattattaccatttccttgtgcacaacaatccaagcaaaacatatcagggaatctttgtagcttatgccaaggaaaccgactcaaggatgaaacacccatgagaagcaatcgcctaa

SEQ ID NO: 1580 - DNA, 778 bp, Oryza sativa
tcttctgcaatgtgcatggcaactcagttactcacaacatgaagccagtatattctacatgttgatggataaactaacaaacatacagcagaggaatattggaagaatatattacctggaactcagaaagaccatcacctgctgccgctgctgcctcctcagccttctccttctccttctctacttcgtacttgggcttccaagacttctccaggatagaagtggcaaccttctcatcatcagcgatcaaaatgttgtcaaacaggatgccatcttgcatcgtccagatctcaatcccaatagcggcaatcggatcagagtcaggcttgtcaagctcgaagtactcagggttggggatctcttggggcttccagattcctttgtagttggggttgtcgataagaggcgcatgccacttgcccttgtaagcagggttctgcttcatcggcctcttccactcaccacaaccaggagcctcttcacacttggggttgtcaatctttggtgcttcccattctccatcctcctcatcatcccagtcttcaggcttgttagcctccggatcatcaatttcctctggctcatcatccagccacccctctggctttgtggcctcttcgtcctcaatttccatgggggcatcctcatcccagtcatcaggcttcacagcatctggatcagggattttagctctctcatcccagtcttctggctttttgtcatcaggatcaggaatggtcttggatgggataagtgatggctcaaaatcatcagcaga

SEQ ID NO: 1581 - DNA, 768 bp, Oryza sativa
catgcgattgcggcgtcacgatatgctggtctgtgtcgtggaccctgtgagcgtctgttttttttcccttaggtagtactagtacacacaacgctaataatcaactagccgttgcgatgtggcttactttaattttgttcctgctcttataggattatcgtaaatatgctttaactaaattgcatttaaagtttgtagtatatgttgatcctgtggacgttgccagcttatttatatatgagtagcctcactacctgttcctcgtgtgaacatatcgtaatggcatccgcgtgctcccctggacagcattttgtgtaattccttctgtattgacctgatggtacatgaggttatttgaattttgaaatgaagaaagctgtcatgtatgctgttgccacttgtggcgttttgttctttcatctttacttcaaaaattctccatatgctaagtcgtgaaattgaaaggcatgtctagcttgtacagtttgcagtaaacatatctacttttcattttatctgccagtgtaagattacgctaattttctacctcaattaaaaatttatgttttttcaatcggttctttatagcgcacataagatggcttaaatggtgatgtacttactgtggtttgcaggtgtatggaagcacgaaaagagtgatggacatgaagactatggcctgcttgttagtgagaaggccaagaaatatgccataatcaaggagcttgatgagcctgttactttgaaggatgggactgttgtcctgca

SEQ ID NO: 1582 - DNA, 5803 bp, Oryza sativa
ccatggtaatcttttacttttttttcttacatatatataaaatcatgttgcatccattcatgtaagtatggcattattataacataatatgaacacctactcttttacagattataggtgagtgtcagggagttgaaggacctgagtttgaagtattttacattgactatggaaaccaagaacttgttcctcacagttgcctgagacctatcaatctatccatttcctctattcctccccttgcaaactgtgcagccttgcctttgtgaaggtgcccagtctaaatgactatcttgggcaagaggcagctatgtatctgaacagtatcttgcttgacaatgggagagaatttgaggctattgtcgaagagcgagatgctgcttcgggagggaaattgcagggtcagggaaccggagaaatcctcggcgtgactctactcgatagtgagaccgacaatagcatcaatgctgagatgctagaggtatgcaattctagacagagttttcacttaaatggtatttatatattgaagttagttaattagttctagtggttgttttcacccctatcgacctttagcttataagcacacagaaaaaaaaaactttattgtagacctgatttggggtttttccattgcaatttatttttcaatattttcttttcaatcacgaataacctcttataataagtatatattgttaaattacgttacatttggaattcactaactttagcatataagattgtaggttgtgttcactaacatctgttccttgacatactcaaactcctgaaatacatgtctaagattttgtgttgctgacttattttagatttcttttgaaaaaaaaatcatgtgataaccattgtgtatctctccatttgcagagagggtatggtcaacttgagaggaggagatgggactcgagggagaggagggcagccatcaagaagcttgaggaattccaggaggtagcaaggaaggagcagctaggcgtctggtgcccaaagaatgcaaggaagcagggcatggatgaaaacgagtaccctgtcctggccagagcaccacctcccccaaagaagggatatgacctgatcaagttcattgcgtcccggtccgactaagaaaaaaaaaaaagccttgtgtgtttgtgttgaagatgtcatgcatggagacagaacaatttccttaaatccaatttcgtttttgttggtgcatctcttgtgatgtcaaactttgagatactacctttcaacctttgtaaataaaactcactattggacctaaataacctagctatgttgtttctatggacttctcagttattggtggttcatatatgcttgtttgtttttgtaatttgtacttcagtttggttagctcactttcaagttgaaactcatagcacaaatgaaatgtctacaggaaaaaaaagaaagtgatattaaatcctctgctggctgtgcatgtcatttgtatatttttttctttttagagatgggtatttttacccggccactacatccaaccgaatatatgcagcctttttaaattgagatcttagcctaacctaatctgaaattctctcatatatagatttgatctcaggaccatagggtgctactcaggtcactgcaaccactaggctacatgccctttcacgcatgtcatttgtatatgatagaccatgaggaccttcatctaaattaataatgagcttaatgtaacatgctttaattatcaagcgggactatgcccattaagtttatgcaggggaaaatgcaagatctacaacctcatcttgtactccagattttgggccaccgcaatcatgtgtaaacaatctacactctatttttctttagaggtaaactcattgttatgttctaaatttgcacctgctggccagcgcaaccaggtgcgaacaatgagccactcacttctatggagtcatcaatttcgttctgctctgtgaatagctacaaaatcactacaaccagaaatgatagtgatatgatgtaaggatatgttacatccaaccaaaatcccatatatttaaggacggatggagtaacaaatatatgattatgtaatgcacaattacatcatatcactcatctatccaaattcgttatactaggatatgtcacatccaatcaaaatctcttatatttaagggcggagggtgcagtaactttcccgattcatgttgtgaagctcgggatgctcactcaagaaaatatgcatgtttctttggctcctccaaaacagttctgttgctttgtccaaaaaaaaacacttgtattggcctaaaacatctgtgtgttcaacttttagccttaacatcaataaacactccaattggttttaaattaagaatttgctaaattacagtcggcagaaaattaggactaaaatcttgcatatttctctttctggtgactggcagaagaggcaggtgacatcggcatctcacatggtgggctggtgttggtagcgggggtaatgtagactgagtgattaggaggtaggggtgtctctggtggcggggatccctgaagaggtctggtgggcctcaatcgcgtggtgcagtggggtggcggcaatggaaagacctaatatgcgcctaggcacacgctccccctacccgcgcgtgcggagagagggaggtggaacggcgtaggagaagagtgcaggtttctttttttttgtttctctttgtttttttttcagttttttatatgtacatataccagctttgtatccacatgtacttttttatacgtcaatttttttatacatagagtttatatatatacgttgtatatatatgtctgtatatactttgtatacatacatataaactttatattatgcaatacaaagtttatacatataagttggtaatttaaaataagggccttaaaataaatcatatgtagagcataggagagaaatatgaaaaagagacaaggttgacatgtggattgcagtattttctttttttattattaattttggttttgtttattattattttgtagtatttttttgataactcatgcatttattcaaaggccaaacggataacatggtacaggagtagatacagtgctcaaagaagcccctcaagactgggcaaaatactctctccgtccaaaaaaaactcaacttctagagtttaaaatttgtcccacgaaaaaccaacttttaccatcctacctactctcagcacgtaaaacgagaagttttatcccttcaatattctttacctaccttctctcttactactttttttaattattaagggcattttagtcattaagggaattttttgtgggacggagggagtacactgtaagacaacattttgcagaagaggacctaacaagaaactggaaaatcaatcaagtccttttcctttgtttgccttcgctgtcgatgaaatcctaaagcgcaactctggtggagagtagatccagataagccgcagatgattaagctaccacgtaatcccaaaaggggcctcacacacatgcaggtttggatggtggcaaaccatggtatgaattccaacagagcacaagaagataatcggctaaaaggaatttcttccaaagatgacaaacgaatccactagaccagcgaaaaaacaaaggaaaacatagcaatctgcagcagaaaccaagaggcaaacctatacgaggcctccgcacaaaggaggttgaaactatctcggtggagcttgaaaacctcagacgtcttgagagagagattcgccgcatgttgagaagaaggccgccatcgttggaaggaggacaccggagaaagaaagtaagaccggtattacttttgactccggaggattggatgaacccacagtgaaggcgcgtagtagacacccagctccaatggcgagtgtcaccggatctgaaatcggcggaactcaccgtgatactaggacgagggaaactgaatgccgacaaccacttcgggaaccaaaagacaacaaacaacgacatgggaaccacgaccatacgcccatacgggaagacccgactagaattacaactaatagtagggtagatgggttggacctctctccatcccttccagggcggtgagacaccggagaagaagagagagagagaggggccggaggaaagaaaagagcactatagaggggatgcagaagaactctcgagaggagagaagcatggtgaatagcatctctttataatacttcctccatcccaaaaaacatgacgtttcaccgccccagcatcattttgtagtatgttgatgttatcactattagctaacgtggactccacataagcattgtcatcgaaaattagtttgtactcatggatgaaatgtagaaatttgtaacaaatagtgaacaattttataattgagtgcccaaaattgaaccaagttaacggagcaaatttaatctttccttgaaagaataactcaaaaggaaaaaaaacatagtaacaacctcattttttggcttaagcttatggttatcagccaaaatttaaattttcaaccttaaatttgagttgattttggggaattttcatcgaagtttattttccagcctttgcttttagatcgctaagaacacgtatataaaagtcttattcacaaattatttttcgtttacaaatatgccgtttagcttatttttttgaacttcggctaattaatccctctatcttatatggatgtggagacttgggtcatatgtttcttttctattttcttgaaatttttaaataaaaattcaccctcttttaatttatttatgcataacagtacagttagtgccattacaatctatgtcgtggtgcggtaaaaagtttgaaattttgtaacttgttgtagatttgtagggtttattttttaaaacgttaaaaatgaaatattaaaaagccaataaatatttctaatgaaataatcctttttctttttatatactcctatatacatattcgacgattttagcgttcttttttcgggtcgtgagcacagcgtggtggtactggcactcctatatcggagtagtagttcttttttccttccgagatcttccatagtcacagccggttgaagcccccatccgacgtggcgtcccctctggcccaggcgtcaccagtcccacgtggcgccaccccattggccgccaccacgtcgcgcaccttctcattggccggaacaagtcacgccacgcccgtttcctcggtcgcccccccgccccgacggcccgatcgacggatccccgccgtccgctaccccctccccctcatcctggccgtccatccgctccagttccgcctcttcttataccctctccccccctctcttcatcccccaagccgcggagagagagagagagagagagagagagagagagacgcagctctgttcttcttctcctctctggaaatttctggatctcgcgagagatcgggaggacgatggtgggtgggcgcgcgctcctgccgctgcttctgctctccgcgctgctcgtccagatccgcgcctccgatccggtaagcggcgagttcttttttggtttccttggtggagaatttgcttggagtggtggtttggggggtgagatttgtgatgcttttttttgtgttggatttctgtgtgtgcttgcagctgttctatgagccgttcgacgagagcttcgaggggaggtgggttctctccgggaaggacgactacaaaggtatgcttaccgccgcatcgagatctgtgggtttagcgggtgtgcttgggggg

SEQ ID NO: 1583 - DNA, 1351 bp, Oryza sativa
ttaaataaaacgatttgcatattataattgttcgtttaatggtaaatctagtaacatcaaatttacatgattgatattttttatttttttgctattaatagtcaaaattaatttaaaaagtttgacttgtcactatttaaaaatgcttatattttgggacagagggagtagtattgatattatttatttctttgctattaatagtcaaaattaatttaaaaagtttgacttgtcactattctaaaaatgcttatattttgggacggagagagtaggtatgttttaatttctacatggaaatgaagcgcaataatgtctctatttttttttggaaatttaactcacatattcctttttaatttatatattctgattttttatattttatatttcttatttaccataattcaaatttaattcagccctaaaattattgtttggaacaaatcttttttatgttcattaaatttatatttataatattgcctaaagtctaccatgcaggatccataactataatgtatatttatatataattagataatgaacaaaaacctagtatttaaattaggctactttagtcgcttaacttaaaagaaatcgttccatattatcttgcaaaaactaatttttattcccacaacctagctagcatcgcaatatgtacatacttacaatttacaatcaaccaactaaattagggctgccatccttttgttctgtaatttggtttggacactttcggatgcagcactgcaggtacatggtcatgaccttaataacaattcaacagtagatatatactagtatatgatatatagtgtagaaactaaatctataccgtagttcaacaggaactcttcccttcttttatggctagaaactaaatctatacagtagagttgaacatttatagaatagagttgaaaatttatagaattttctatttatgtgggaattaagctttcttttacccactaatatgttgggccgttgggctctttatagctgttttttttcatccattaggattaatgttgggctctcctaggagagccttcaatcagtataattaaaattgttttcattttctaagaattttgaatgactttgcagattgagatcaacacagttgatagaactggaacattcttaggttccttatgggaatctaatatcaatgtggcttcggttcttttggaggctggtcttgctaagatcagctcatttgcagtggataagatgccagatgctcaggttctcttaaagactgaaaaaattgcaaagcaaaagaaattgaaggttagacacatctatttttaataggttaaataaatttcttctaatgctg

SEQ ID NO: 1584 - DNA, 5838 bp, Oryza sativa
cgagaggcgtcaatgggcttcggcatactttcttctacgagaaattttataggaagattacactggaaattttggtactacctccaagtacttatttgtagtactagaggtaaccataatttctagaataaaatttggtatctcagtagctcgaggtaccaaaaaatttcattaagaatggtaaaattacccttcttttaatgtttgagcttttacccaatcatcaaaattgagatgttcttgtccattaacattattactcctatgaattctaatatgactaaactaccatgggcaggtaattctaatgagatttactccggtccaacaaaaagtacctcgaggtaccggtacctcacggtactaaattatttctaatcgttagatcttgttgggcgggatgggtattgttagatccaacgatcggaaacgatttggtaccatgaggtaccagtaccttgaggtactttttgttggaccggagaaaatcttaaattctaatatgtttttgaagttgtattttcttcaaacgtacacacacatatatataagattgataatttgaagttgtattttcttcaaacatacacacacatatatataagattgataatttgaagttgtattttcttcaaacgtacagatatatataagattgacgaaataccctccttggcgatcgatcgatcagagatcttaccaggttgggcgcgatgatgcacgacagcgtgacggacatctccggcggcgggatgacctcctccgccttggatgtgtccatgatcaccaccgtatctcccgacgggacggacttcactttccccttccacaccggcgccgccgccggcacggcgccaccggtcaccatggtaagaagctagtagctagattaggctccctgcaacgagataagaattcgttaattagcaaactaaagaacaaggtaaaaaaaaaaaagaaggcattcatgcaagcattatgtttgcgtgatcgatcgatcgatcgatcgatcacgcagatcacagcgattctagaggtgttatgaggctgcactcaatcgattaaatttcaacttatcaaattgcactatacattggtaccaatcaatcgattaattacgtacaaagatcaagttatcaaatctgatcgatctggaccaaattaaacacgtacgtatatagatgtggatcaagggaagattttatatatggtaatcgatcaaaagaacccaatcaagaccaaattaaaagaagggcatgcatatgcatgtaagtctctaaaacctaattaactaatccaaggagaaagaaaaaactcaccggccgaactagatgcgacgtcggcggatctcgcgagtgcctcgtactgtcgtcgagggttttgggtgtctttgcgagagaaaaacaaaacgggtaggggtaggatatatcggttgggcggacgtacgtacgccctatttgtaatgagattacggttgtgtggcgctgttggggaggaagttggagtcgtgtccagagtccagagatccgcggcttcgttggcactcgtatgcgttttgatcacgtccgtcccctgtatggttttgatgactttcgtccggggctctgagccctgattttttttttcttttgcacatgccaaggcattttcagtttgttgacactttcaatcttattaaatattggcattgctaaattttgataagacaataaagtatacacacttcaaccattattatctcactaaattttagcagttgtagaagcttcttcttttaaaactctaccaaaatttgccaaaggtatcgacacaaataaagccaacactgtcaaattttggtaatgccaaaatatgctaaagttttattacccaaatgtgaaatggtttatttgggcaacaaagtgaactagcccttagtcctttttgaaagcttgttttacaaatagacctctaaaaaaacttattctgaaattagactttttttcgcgacagtaacatcattagcatcgtggtctaacatgacggcgtccctagccaccccatggaagctaaaccactcatatcatatatgaagcctatgatgttggcaccgcgaaaaaggttcattattgggataagttttacaaaagatccatttgtgaaataagttttcaaaagggaccaaaaagtgaaaaaaaaatctaggctctctatcaccgatcgatccatcggcccgcagctccacaccgcatctctccaggctcgccccctagcgatcaatctctctagcgcacatgactcgcactcgcactgccacccccactcaatcgatctgggcacgctaactagcacacgaatcacccgagagtgaaggaggaggagagagcgctggtggaggacaagcacgccggcgtcatcgcgtcggcgtgtgtcctagctggctcagtactagattttttttttttgcaagcggtctaaaatgatcttccgaggcaaacggctaatccacctgtaggcaaaagcctgcgagcatcaagaggaggaagagctcgtcggtgttcaagaagctagctagttcgtcgtcctctttcgcaggaagtgcacatcgaggccctaccggccgtagctctttcaacactccgcacatcggcctaatcaaagtccgcatgaagtctagggccgttttgtatactttatcttgaccatggagaacgcagatggaattatctggaggagtgcttcatttagtactacctccttctctaaatgtttgccgctgtttagtttaattttgagctaaccaacaataaaaataaattgagggtattatacagtaataaatgcatatgaacatgcatgagaaaaataatggtactactatagtactccactacaaacaaaccaccacgatttcaatttttcatttagattggtaataaaaaaaaggcccaactagctttgacataaaggaatcccatttaaggaccaactagttctcttgaacaattattaaacaattaatagtgactaaattatatatgagaggaaataaatagaccttctcacacagctagctacaacaactatatagtaagagatttaaaaccttggtgctcactttagtccagtgatgagtccttcaatgcaccaccccaatgcgcggcatggatcccagccacaactgatcgacgtcccaccgcccccaccgctgaattgcgttgatcgtcaagcctatctgcaagctcgcagttagtgtcctaaatatgggacacccaatacttatgcattaagctcagcagggtacaccatatatatactaagtgttatacgggatcaagccacatacatgaaaggtgttttggataaggaacaagaaatagagtatcatttgggcgctacaaggtctatttggatcgtatccatacttcggttttgagagatataacctgaccagggtacgttccgaattcccctccagatcagaaccctcatcatcccaatcttcatcaagacattgctgctgtggatattccggcgaaggatacttcgatgatttcggatctgggagacatgacctgaccagagtgcattcccttatagattggaaccattgtcatccaacaatttgattcgttaagatcaacaaagcacgttgccgctgtggaaagcaacaatttagtattgtcgacggtgaggccttcgcgtagatcgactagtttcgaactaacatacgccgccaaaaaaatccgatccgtctgacaattgtgccaaagtcttcagatctttgttgcaatattgcttactactacgagaacccatagacaaatcgaatcaccaagccatagccacaaaccacactgataaatagctaggaggagatcaatcgctattcgtcgacatcaaatcgccagattgatcgtagttagcgggttagaaattagaataactaatatgctcccctattgtaatgcgtgtggtgaatgccaaagatatatacatataaagtagagtaggattattactcatcttaagacccaaaccactattaaaatccttgtcccctatctacttaatgtactatctcacgtataccttatatcttcatattctataaatattgttgtcatatacaatcatttcgaccttttttccaacttctactctcttggtttaaccagacatacacttccaaattgttacatattattttttatgaaaaaatcccatataaaatttattttagaaagtcatattaattatttttaattttttatttagttaatatataactaattatagattaataacttaactcattttctgtcctaaaagttcagtttaaaaggaataagttattaggcatgtttgagctggagctagaacttaggcaaatagtttcagctccacctataattggaatggagttagattaagcactcttacaaaataaactaaagaggtggagctaggtttacatagcttcacaactctgctacactcgactcctgatactaaattagctctaacctaatcttccaacacagggctcgttgacatggccctagtggggttggttgggtgggctgtgtacgcggaagagaccgaaccaaataaaccgcaccgcagccgtactcctccacgaaaaggcgaaaacgaaaccgctcaaccgctgctccattcccctccttcgttcccccaacgaaattgagacggaggtagtactaaaaatattgagaatttgagataagagggtggaaatctctcccgtctcgttcgtctcctccgcttcgctcctttgcgccaagacgcgtcgcggggctgaacagggagagaggggcggcgatctccatttgccgagcagagcagagcagcggaggggatcctggtgagcatccatccacatcctctttctttctgattcatctcgctcccaccgggactacttttgtcttggaatttgcttgcgttcggttcgttcgttaaccctagctttctcttctagatctggaagaagctctcctcttaatttcagagccttaaccttaatactactactactgcaagtaacagtttgtttgttcccccctcaaaaagtttgggggttcaactgaacccccccatgtcccaagttggatcatccgccccctggttttgactaatgagatatccgttcgattccctgataaataaaccctattgtgcatactgaatcacggactaggtggatatgtctaattgagagccgtcgtaagtccacatggacgagtagttttgaattggtcctcctgagctatgtaaatgtgggttggtgttcctcaaactttgctgccaggtgatggtctaagtggctcatatgagttcaagtacttctctgctctagaaaatggattttgtactctttagcttggtgatatgtgttaatctctacaattatcatgactctggagaacacagatggaattatccgggaaagtttcattcagtgtggtggtcattaatgcatatgaacatgcatgagaagaaaaaaatgttacgatctataataaggctgcgttcgataggatgggttgggaacccatcccctccgcacggaaaacggagctgtccattagcgcgtgattaattaagtattagctttttttttttcaaaaatggtttaatttgattttttaagcaactttcgtaaagaaactttttgcaaaacacgcaccgtttagcatattgaaaagcgtgcgcgcagaaaacgagggagagaggttgggaaccttgaggttcgaacgcagcctaagcagttattgtcagtaaacctgaatatgctttaatttatatcgtagtaatgtgggttctattcaaaatatt

SEQ ID NO: 1585 - DNA, 2268 bp, Oryza sativa
tgtaattataattattaagcgtgcttacttgttttccaatcagtcttgtgcgcaggaattcctttgctgtgcgagcaaattgttcagaggatttgttctcctctgaaggcttttcaaacttggggggtctgatgcttgaaagattaactcggcgttctgctgaaggactgccataaggttcagcgtcatcagcgatgactaggcagtacccgttcacaacctctatcacctggaaaattaaacaaccattcacagggtcagctgtgttgctgtgctgcagaatctgatattttctttcttatagttataaggtagatgtagttgaataggagtaattggtacatataaaaaactgcaaataaaagtaattatatattatggatcatcatgctgaagtgcaagctgctacaaggtactgcagcaagagatgggaagtgattttaataagttatagggcatgtgacatgttttgttcccatgtgattcaatattaatggttcctgaaaattttgactaacataatgctacagattattgtatcacatatcttctcataaacatgtaaggtcaaattcaattcacaatgtattgtgagaaacagaagtgataaaactaattactaggcggccatattttttcatgtactctagagagaacttgagctttcacgtttccatagtaataaatgacaccataatatatgtgttcaattgaatttaagagaaaaatgagcaattgaaatttgaaaatcattagtgtccaaaaatggaagaaaatggatggtcaagaccactcacttttcctgtgaacttttggttgtgaattggctttgtgtttgtcaccgggggcttaaatccagtccagattcttaactgttccttcttaacctgaagatcagcattcctcaactttgtcttaagttgaggatcaagcacatttgcactccattcaacatactttgcgagtccctatacaatgtgacaagaacattggtaagtggagtgaaaggaaaatttgagtggtacgacatggagaaacaatattcgtcatacattttgaaccagatcaagtgccaagtcctttacaacatccccatcagaataataaactgaaccaaatatgttgttgaaattgtctgtaccctccatcacaatccgcacctaaaggcaaatggaaaaaaagatagtgatcagaaattatatcttttacaatatgtttacactaataaacccccacaaattagcatggtattgacagtaacaatacatatgaaaactgaaaaaaaataataacttacttctctgttaagcacccgtgtctcggtgaagtgcttagcttcttgtccaaacctgtctggtgggacttcagaataaatgtcagctgatgccaatagtttctgtgctgctgccattggtgctggagtagtggaagcttctccatttgctgcgccattgccaactccagcttgagcatttgggggaggagttgctcgtcttcccatggatggggcctggatcatagtacaaaatcaaagttcgtcatccaagcagttaacattaacagattcatgtatatttacatgtttatatataataatgctcaagatgtacaaacattaaaaggatctataaaagaatatatataactcaaacttactatcaacaaattgtgttatactacttgctaaagtaactgtcataataattattatatcatacagactagtgagaacaaagactgattagaagcatgcaatcaatacacagttcaaatcttgaaaacataaataaaacgaatggagaaaatgcatgtgattaataaataatatacacctcatatttagtgttggttgataaaactttaatcaggttgccatggtcctaattatcctcaactagcattcatccatggtagcatatacgattacatataatgtatataaaaggggctacacatcagctccatacctggacgccagcaacgtaaacttggacataaaggaaactgggaatcaagtgcacacgaatagtacttccatcgcgaacatgctctacaatggcttccaagctcttccctttgttttcagcaacgaaacccttggcatcgaaagatctgccatctccaattgtcgatggtggcagatctcttattgacgactcaagagcgccaggaagctggaagtaaaacgagatagatatatgcatcagtgatatgatcatagatatgatggtgcggcagcgcatgttgtgtcgtcgtaagacaaaacgg

SEQ ID NO: 1586 - DNA, 5994 bp, Oryza sativa
ttcctatttttagaatagtgaacagataccgactttgtcacttacacctacacctaacaccataagttccacttgtgatacatactaagaaagatagtacgtctccagaaacaggagatgtccaaatgagaatgacagtgcagggatgaaaagaaaataataccaccatgtggaacagttgcagaccattcaagcaacagactttgtcataaaatataaaaaatcatcgtaacaatttggcaatggaattcagaaacacatcgtaccccaaaacgaagtgttggatatgatgtcaactgggaaaatattggcccaaaactctgtgccatgggaacaattacaggcgaaaataatggaactgccaagcttgcttcctgcaaaagaaaaagaaagaagaagaaaaactacaagtaatattctactagtagcttttaaaagaattaatagattgaacggaacaaaaattcttttcgctctggttacaatagataacatcattccgtcctaacatctaaatgcaagtgtcttatgacactacgatttttgtaccaaactaacagagccgcatcacatgcttcgcagctgatgtacccgctccatgtagattgaagcgtacaaaagttcttacttcactctgaaagttgcattactatggattaccaaatttaaatatctactcaatgaggaatgtccagttatccacttatcttatcaagagatacaaactaaagcaataaagtatggatccctggtcatctacagtgtactagtatggtctttacctatatgtatgtgtcttccctaagccatgcaattttctctactacttcgaaaggacagtcatcctccttcctccccttccaatctcacgtataaaaagcgctaaaaaaagagaaaaaaaagtgccaaaaactaaccaactgagaaaaaaaagaagaaaaccaggaaaagaaaagacgattagttaacgaaaaaaacaactctgtcctccccatatctgtcccaaaaaccaggaaatgtaatctctgcctcctaaaaagaagaaaaaaaagaaggaaaaaccaggggaaaaaagaacaagcagttagtcttccggtgctttactcgatccacggtcccatccatcctaatggtatggatatatcctcaattaaataagcccattgcaaagcatgggattgttactagtgttaacaaggaggggagataacacgcaaaaaacataccttattgttaaaggccatcaatatatttccacttcgctgcacagcgtatcttgatcctaatagaagcaaacatcagtgataaaacaacatattacaccgctaactgaacaagcacaaatttaatcttacataaagaatacttcatagcccagaagataaatgaagggtgtgtttagtttacgctaaaattggaagtttggttgaaattggaacgatgtgacggaaaagttggaagtttatgtgtgtaggaaagttttgatgtgatggaaaagttggaagtttgaagaaaaagtttggaactaaacaaggccgaaatatgcacttataatctcgtaccaatgagaaggtggatcacagatcccaaagaatgcccaacaccaaatgtgggaaggtcatttacctggaaaaaaaatgtttgcttagtatattggacaatattggagttaattgttatgtgaaaaataacaacttacaggttcaaccatgtttcttaagcacctgtcaaacttaaattgaacttcatctgcgatgaagaaatgatcaaagccgctagcatatggcgttgcgatcaccaaagctcccctaaatttcaaatagactgataaaatacatgtctgctagagaagtggaatatgtagaaagatagctctataggaaatcataatagcagtgtaaaccgtgtagagctagagctaagaagtactgtatcattttcttgaaatgaagatgcagttcattgcttgtaatattatcaaaggacaaactttaaaaatgattgttgtttcactaactttttgatagattgaacatgcgtgtcttgcttagaaccacataaagaggtgccttgcagttaataatgacaaattacacaccaaagctcttattctctagattcatggtcaagcaatgatgcactagttaaacacacaacaaagggagggctaaattttcaaaggttgcatttcgggtatagaactatagtcaactctccagcgttacgaacaaatcaaatgccgcgctgtttcagtctttgagcagaattagactgttgcacacagataattttgggtcattgggcattgcttgtccacatacttgtctgcaagtcgttcaaggaagaaacgataagtgatctgaggagcagctccaacaaaaatcccaccaacgaagtgaacaacgaacgagggctcctgtgatttaggcttcagcacccacgctccctatcagaacaaccagtagtaagtaaaatcactctgcatcaacaacagtagcaggaaaattttgcactctcaattgaggtcgcaatcaccgaagcgcacctcgatctcggtccaatctccggtcgaaccccagccctcccgggactgcttcgccgcctccgtgatcaccctgttcgccggccgcaacaacaaaagatgttatcaatctaggagagagatttcgcaggcacggaattagccatcgcctacctctcgatctgcgagtagagctgtatcgatccctcggacggcgccgggggagccgacggcgtggcgacccggggcccctccccttcctcagcagagcagcatgagatggcggcgcgcctcctcctcctactcttcccccaaccccaactactcgtcgccgcaactctacttcctcttcgggaaccccagaaacggcagaccgcggaggaggaggagggccccggggtgccgccgccgccgcgcagctgcacggtggacggaggcggcggagacacaacccttatcatcgccgccgactcgacgccaccacgtcgcctcgctgcggccgtacggactccgcgcgtgccgtctccgcttcgccaacccgccccgcgcccacagcgaccgcgagagtagagctatcacgcgcaccgcgaccgacggctcggcgcggcgcggaggcaagtgtacactgcccgccgtaggatgccaccggaagcgaacgcgcgcgccgtcggattcgcttcccggaaatggacccgacccgtcgtccacgcctcgactggtcaaaaaacccaaaagcgcctcgcctcgcgcccgttgctgccttacacagcacaccacactacccctatactactagtagtagcttgcccctgcgcttgcttgtgtcgctgtggctcgattgcttgcgcggcgcggcgatcgcggccgatctatcgattcgatgcggccgtgggagcggcgtggcgtgggcgcggagggaggcgagtcggtgggccgcgaggacacggacacgaacacgaacaccacagccagtagcgcgaacgcgagcacgagctcgagcaccgccgcgagtggtagcagcggggcgaggcggaatggggcggctgcggcggcgggggaggggtgggggagaagctccctgtcgacggcgaccatcaacctgagccaggagtacacgctcgccatccacaccagctcctaccacgagatctgggcgaagatccatgtggacggcggggatgggcagcgggagggcggcgtcagtggtggtggtggtggggaggaagatgaggaggacgaggacaggtgcaccctcgccggcgtgctccagccggaggacgcggtggtggagcgcgcgctgggggacgcgccggacacggagctgacccgcctcgccgcggactacctccgcagcacgcaccacgcgtcgctgctctgcctctccctccgccgggcgctgcgccgcgcgcgggcgctgtacgggcccatcacggacctcctcgcgctgataccgcacgcgcccccgctcgccgcgccgcaccgcgactgcgcgttcgacgccttcctcctgttcgaccaaatgcccaacccgttcccggcccccgcggccggcttccagggcatgcaccggagcttcgtcggcctcaagaaccacctcgacctgcgcctcctcagggcccgccgcaggcgccggctggtgcgctgcgcgacgcgcgggtcgggcatctgcctaatcgcctgcgccaccggcgctgcgatcgcgggcctcgtgctcgccacgcacgccatcaccgtgctgttggccgcggcccccgcctgcgcggcgtcgcgcggctcctgctgccccgcaaccgcttcgatgaaacgcctgcagcaacacatggaccggcttgacgctgcagccaggggcgcctatgtgttgaacaacgatgtcgatacaatcgagcgcctggtgggcagactccatgccaccgtcgagagtgacaagctgctggtccggctggggctggagcgtggcaggggggagcaccacaccatagaggaggtggtacggcagctgaggaagaaccacccgagcctgctacgccagctggctgacctcgaggagcacatctgcctctacttcgcagccgtcaaccgagctaggttgctccttgtaaaccacctcagtgcccaatctgatcctgacagactgagtttccattgtcatgatataattcaataacagtatccgcttcaagaaaaaacttgatgttggagaactgttctaggttgccaaatgcaaaatgagatatactgaaggaagtttacacaagctcgttgtttcttgtatgttattatgcattcgatatctattgcctgaaactgtgttctcgggtatctatttaaacttgggtaaacttagcaattgtactgtttgctactctacaaatgatttttttttttacttttgcaattattactatgatgtcgtaataacttaattattctgaatttagttacaacgctcaaacctatctttcaagtttggaaatgcaacctttgctgttagacaaccaatgtacaaaatttgaagtagtttataataactacagaagattttattttaggcctttacatgcatttgttgcagatcaaagatgaaatgatttgtcaatttgaatggttgtttgcatatcatcattacaaattacatagcaatgtttgcatgtgctattcagagctaccctgaattacttaatctgttactgttgttgaatctacacctgtttgttgaaacctggagatgatgtctttcttgcagtatcggtattggttgcaagctactttaagaaaattataggcttcttaacattctgtcaagggattgcagaagaacatagttagaataatatttaactgataaaggtttgtttaaagtccagtgtttaatttgtattttgcatcttaaaggactgttgttgtgttgtatgcatttttcttgcaggcacttgactatagactctgcaaatggataagtttcatgctgataatgttcttaactgcaatgtcgacggaattcatatttgttggtaatctcagcttaaaagatgtgaatactagcaattagtattctatctcaagctttggtttgttcatctctcaattctttaaatcttgaaacattgctggtatagtgatatgtttaacttacaattacaaaatgatatttcttttagctcattcaagattgccaactgcagtacaatttcatcttcgaatccatcttaattcggtaattcccatattggacttgatctgttcattgtatctgatcatccgatatacaaacttgaaccataatatttcatttgaaccgtaacttggcagtaacctataaaaaatatcttgggatattttcaattatcttgtagtattgtgatccttccttgccaaccaaccaaccaatcttgggatattttatgaaactcatgagcctttttgggaaaaatctctctggcattaactgttgctgcatcaataacacaatccaa

SEQ ID NO: 1587 - DNA, 26048 bp, Oryza sativa
  unsure (1)..(26048): unsure at all n locations
atttctcagcatgggtacaacaagagctacggtgcacggccactaagaagagccgtcactcagctggttgaggatgttatcagcgaagcaattctgtctggtcagttcaagcctggtgacaccataatggtggacactgatgccacggggaaaccttgcttgagccgactgaatgatcagaccgtccaattatccgatccgacaccaacactttgaaggttcaaacaccctatgtatattcgtgatttactcatttattcttccacaccgataagcaagcttcttgtgcatgcataggttccatagttcatgtacatagcctccacatgctggaatttctccatgcatataatgtaaatttgaatctaacatcaactgtacatatcattgaatttcaaaaggtacttgaaccatttacatgattagatggtccaatacgcatccatttgctgctgtgtccatctagttgatttacgcatcactggaagtggacttgggttctgaaggttttcaaccttcacattacctgggaactgcattactccattcagtctacagtaatacgaaaagaccatcttggccaagcagctttagttctcttaaagaacttacctctgaagaaattgcaagatacactccacacaccgggataacttggaaaaggcccaatagattattaacttataacatacacaacttatggaaagtgttctatcttgacttgcccaattggaaatatcaaccactcagcataagattcaaccgttcaagactaaaaacaggaagctagtaattcgagggtaacttcagtgcatatcatccatctaaatttatcatagtttgatgactacaaaaacgtctatgagctatcttttccaatcacacttctgcctaaagagctcatccttgaaatagctagattgtacttccaagaacacgattttatgcaacttgaggaaaagctggtgccaacaggctgtggcaatcgatttaagttgatttcgttaactcagggtctctgcaaaagtcgtgtgacgaaaattatatcagatcaatgaaactaaatgctacataccagaaatttgtacagctgttccaaacctttgaatgtgatcaaggatgagaagtctgggaccaggggggatcttcacatctctaagtgcactggatcaatataaacatagaattttattattggtaaggacaactttttggcatatagaattttattattggtaaggacaattttttggcatatcaatattttttttaaatacttatgttttttcatctactgtaggaaataaattgaataaaaaatatatatacctgtcattgagtaggggcaatgtttgatcagtaagaagacccttcttgaaattcttctcatagttctgaagccctaattgtttcaacatatttctcccacgggaatagtatatatcttcactcggtggctgcgaaaatttctgaccaatctacaaaatagatttgtaggcaaaaagaattacaactgatatcaaatttatcgctaaaaaggatagtaccaatgggccctaaatcctaatccactgacaggacatcaaacaaaaatatcaactagttgcaatgcacatgtctaatgtcaagtactaatgaaattggtactcacatccagtactaaaatcttgagataattcaagttgtataaaaatggctttcattagaaagagaaacattgaaattcttaccatgaaaaaaccaccttgaaatactgcaaaagctacaccagttgtaattgcattagcaactggatttggagaccccattccactcacaatggagaataaagcgccagaaccaaacgctgctgccatgctatcgaaatgagcacttgtcaatcacgcaggtgaaaaaaaaatcaagtaatcaacacgatttatatagatagtcaataatcagccttccaaacttgtaatatacccttctggtgatagagtcggcatttctttttcggttttcagcactaatttataaattagtttcttaactagtaaagcatttaaagtttatcataagacccgtagatgcttttgttatgtttctatcttgagtttgttgaagattacaaaatgtactcgcaccagtgagtcaagtcttgctcattttgatttaagcagtataatttcttaggtagatttttcataaaaacacagacacgtggctttcaggtttcttacatctaatattagtcagtcatgagtggcttacaccaatattaatttgacaaaagaaaaaatcttagaaactcaaactagtagttatatcgacaactggtaagcaactcacatgtgggaaagaaagaaagggaatatagtatatatgaacagaataagatgcattcgtgcaataagtgtactggctttgctgctactaacgagtatttacatgacagtaaaatagaacttgtgaaccctcacctgccctggacatcctccactcctcttatccttctcataacacaagatattcctgcattagcaccagtcatgacggcaaagtttcgggcttgcaccagtggtccacctgccaaagcctgaaatacacacaaaaaaaagatcccgttattctgattgcttagaggagaacacagaatggttcctttgcagttctttacatcaaggatactgatatagtgcgaccttttagctctacacagacaatcttgaggaacaataaagactattgcaccagtaaaacaaatcaaagcagagtgtttgctttcttaaaatgctaccacatgcatacaaaaagcacccatcttccttttctttaataaagtttgcttccttcgggaattgcatcattattctcaaatttgaacaaaagaaccccgacattgtcgatgcataccagataaccagttaccgtcggtgctttatcaagaaatgtttggtcgctttatattctactataatcctcaacaagcatccaagaaatattaaatttgtttactgcgcccctattattcctattattattgagtatactgtataactacgagatgtatagtataggaagaagacgagacctgcgcctgcttgaaggaggcgagggcgttggggtcggccccgggcggcggctgcggcacggggaacggcgacccgccgtccggcgcgagcgtgcccatcagcccgccgagggcgccgccctgcacggccccgacggcggtggcgacggcggcctcgacgtgcgtgggctgcttcgccagccacgcccgcaggccggcctccagggtcttgacgcggtcggtcagctccgcgagcgggttggccccaccccgcgccgccgcctgcgccgacgccatcaccaccagcggccgcctcttctgctgccccatcccttccatctcgccgcccgcgcccgcgcccgcgctcgcctcgacgacgagagggattggaggtggggttgggggggcggggagaaatgggaaaagatagctgttgggttgcggggcggctggtttatcccctcggatgctccgctcggcgctcgctataaaccctccgcggcgtcgacgaattttcctcgcgaccagctcacttctacccacccgcctctcgtggatcacatgggccggttcttctgggctggggggtggcacgtttctgggctgtgtgttcatactggcctgtgttgatctgctcctggactccagggaagtaggggatcggcgtcctttgcaggaataagtctacttttcctccctcatcttatgcccctggttgaatcacatccctcggctgcaaaactgggtataacacatcccccaacttcaaaaaccggtgcaaatagaatcccccggtggttttaatagcggtttcatcctacatagcacttacgtagcgggttgacttggttttcatcttacatagcatcaacgtggcgcttacgtggcattaaattttaaaaaaaaacaaaacgggacccaaatgtcattgagtaaaacaataaaagtaaatattgggcccacgtgttagttcatctttctctttccgtttcttagccacatgtctccgtaggggtgaaaacggatcggataatatctgatccgatccgcttcgaatccgttcgaaacgaggatatggtatgggcttttcgaaatccgggggatacggatgcggatagtatgagatggatgcggatgcggatgcggatatggtgtctctaaaatccgacattatgtgataagccgtttgccggataatccgagattatcaacatatataaccactctatctattctatataacataagttggtacatccaatgccctaattcattaattaacatagatttttaagtctaaggcttttatcgtctcatgtcacactcacgtagctatattttttatattatggacatcatgtattcatgttgtttagcacttaatcatatacttattacgatgggtcatttatggattattgtattattgttcctgagattgctaactcgattttgcattgattgcatatacacgtaacatccgataaatttaatccattttcaaaccgattccgcactatttctgacatccgaaacaatccgctccgcatccgcatccgtacaatatccgcacctgctccgaatcggcttaaaaattatggtttaggatatggtatgaccattatctgtccaaatccgctccgttttcatccctatgtctccgcagagtgataggggatggatgccgtcatgccggcgagggagcgctcggcggcgagcggcggtgtatggcagcagtggcggctgtgggacggagagcaacaacgcgaaggcgaagacgaggtgcgcgaaagtggaagtgggctctgcgccgcggaagtgggatcagcgttcatcaccaccgccatctactatgccggtggcgtcgggggcaggagccccttcttccctcatccacctcgcttgcccccgcccccgcccctcccctgccgccgctcctcatctctgggacaatcctgtaccggtgcggaagaggagcccatgacgttggcgaccccggtggagccatggaggacgacgagaaggaggcgccggcgcgcgcgaccgcgactgccgggtgcacgggcggaggcagagcttgtgcagcgccggagcctagagcctggaggaggccatcggcttccgccaggagacgcagatggacctcgtcacctcgctccagcgcctcataccgacctcgtcccctccctcgaccgctctcgctgcatcatcgcctgaccgcccctttgctcccatcccgaaccccgacgccggccacggcaagagccccgccgcctcaagacccaccaccgccgctctctccgagaccaagtgcgctccacccgctgtaagacctcgccctgatcctcccctgcctctgtcgctgctacccccggcggcctcgacgttgtgcgcaccatggtcgtcgtgtgcctcctggagctcgtccccttcgccgagatcaacaccgcaccactcgcgcgtcgcctgcaacggagagctcattcgccagcgaggtctagcggactgctctcgctgacctagtcgtcgaactcggtggcttggccgcctccattgtagtcctcgtcctctggcggacttcgcctcgccatcgctgccgccatccaccggtcactaccaattgctatccacctgaagagagagaaaaggaagagggaggagaaagggtagctgacacgtgggcccaaaattttttgtattgttttacgcacttacatgtgggtccatttagatttgtttttattttagtgccatgcatgcgccacgtcgattccacgtaggataaagaccaagtcaatccgccacgtagtccgaaaccactgggggagtcgatttgcaacaattttaaaagttgggggatgagttatacccggttttacggttgagaaatgcaattcaactagagtcatgagttgtgggaatcaaaatagacttatttcctcctttgcatgttgttttggatacgctgggctggcttacggggcagctttaacgggtgtggtttataagccgaagacacgttaaaaacgaaaagtaattttagtgtaggattttataattttttaaatcataatacaaacacaagcgcttatataaatatattcatactcacctctataaactcatacacgtacaaatgtcctattgatgtgagcacatttgaaaagacctgcatatctagatattcacgaaatcactatagacgtcttgttaccgattggtatgtttcatactactgaaagaataattaagtatatttgtaattatatcgtctaaaaaacattgttgataaataaaaggtaatgaaagaaaaatacttgatcgaattaattatgttctggtatgcacaacagctgtgaagtactttgagatactagaattcaaattttaatacatattatagggttgtttattttgaaatggagcggaggtagtgcccacgcaggtacatttttagtaacaattcagtgaggttaactgatttatcattagtcctctatatattatcatgtgttggggaacagtacatatactggtaatatatgggtttgggatgcaactgctacgtgtgtagtcgttttttcaaacatattttatatagtaataatcaaagaaaagttacttttgttcttgaatttaaaattgtctgggccagctcaaacaaataagggccaatggtccaattataattagatatgcatatcttcaacaattaggtctctttatccaattgtacagcgatacttggagagttcgtaggtaccgttggaatgaattatccgcctttccctatcagcttaagcttttgggttgaactggtcagtacatgcaacttaatatggtatcagagccagaggtctcgagttcgaattctggctggcgcgcaattaaataaaataattgcagctcgcgtgaaggggagtgttggagtgtataaagtgaattgcccacctttccctatcagcttaggcttttaggtgcaactggctggtgcatgtaacttaataggtacgaattttttcaacttaggttgcgttctttacctccggtacgaattggatctggatttttcaacttaggctgcattctttacctccggttcccaacttccctccctcgttttccgcgtgcacgcttttcaaactgctaaacgatgtgttttttgcaaaaaaaaaattatatacgaaaattgcttaaaaatcatattaatctatttttttaaaaaaatagcaaatacttaattaatcacgtgctaatcgtggctctgttttccgtgctagggactcccgaacacagcctagtacttttgaaaaaacttattctataaatagatccagaaaacttattatataaatggattcttttcgtggtgtcaacgtcgttggcgccgtggtacaatatgacggcgccaatctctctcacctctcggtgaaagttaagtcgctaatctgaagagggaccatggcaaacaaattaaatggacctatttgtagcagaaaatgacctatttgtaataaaaaaaatatttacaaataggtctttaatgtcaatgacactgacatcgaggacctatttgtaaatatttttaattacaactagtcaactagatatttttttattataagtaggtcagttttttaaaaaaatacaaattgatcctcggcgatcgatgaaaatgagctaagtgttaaaaactcaggaaaatcatacctaaaagttttataaattcttgaaaaaaaatgagagatatgtgcatatatgaaatacattctcaccaaatgccaagcccaaactcaacttcattcgagagaagcaaaaatagcaaatttcagataaatagtgtcatcttactattcaaccaatttttcttgttttgttactcccaaataaagttgagtttgaacttaaaatttggtgagaatatatttcatatatacacctattttaattctttttataaatttataaaacttttaggtatgatttttataagtttctaacacttaacatgttttcatcgtatacattctcatgaagttagtgttttactcaaccgaatttctcgaacgaacacaccatgggtagtgcggtctgaaatctggaggttgcaatttgaccatacatattatagctttttccatttcttgtttaattaccatactagtataacgtaacttaacccaaaatactacgagggctactagagaacaggatactttatataggttagcgtatcagcttcctccccgtaagtctagcattatccccctcccccaacttccatgtgctcgcaccccccacgtcttgagctagtgccggtagtgtcgtaggcaacgatactggtcacaacagcaaggaacgatagttgagcctaggggaagggaaaaaaggagaggaagcgttgatagttgatactttgcaggtgccagccctagccttgatacctaagtactaggactgatacgtgtgagtaccaaccatgatacctacgggtaccaggtttgacacctaaccatgatacccaggtaccaggtagcaggtctgatacctacgagtaccaggtctaacacctaaccatgaaacccaggtaccaagcctgatacctacaggtatcaggcctgatacctagttatcaattgtgatattcacaggtaccaggcatgatacggggtaccggtccgcgataccataggtatcaggcatgatacctacgagtaccggctgctgatgatacattgtagacatacctgcacacaatcgggcgaggagcatgatggctcaccatcacgttgcccctttatcaccatcaacaacgcacgttgaaggaggaggctgaggagcacacgttgggcctcatcctcccagttcctgatgaccttgcttcttccaagtcgcccccgccgccatgagagctagatccagtgggtgccaccatgcctcaaaagcatgagacggaggaggtggccatgagacagaggaggccatgagattggtgttgcccactcgctctggatctagcagtgaggagggcatagtactctagatttatttttagggccactctatcatcagagtgggatctggaagagagaaaaaacaaagagtgggattggataagagtaaaacgttatccacttatcccgtgtctacgggatactgtacagtagattttctgaaatactacagccaaacaacatcaattggcatgtgatgtaggtaggtgacatgtggccgcattaattggtcacacacgacgacatgagagtactagtacgagacagaagtctggtgcaggctgcagccgccagccggcaacacaccaaggagtgtaaagttttggcgtctcacataagtcattatatagggtgtcgtatggagtgttcgggcactaataaaaaaattagttacataatccgtcagtaaaccacgagatgaatttattaagcctaattaatctgccactagcaaatatttactgtagcaccacattatcaaattatggagcaatcaggcttaaaagattcgtctcgcaaattagtctcaatatgtgcaattagttgtttttagcctatatttaatactttatacaggtgttcaaacgtttgatgtggcaaggtgaaaaattttggggtgggatctaaacaggcccgaactcagtcgaccgtactccctccgtcccataaaaaacgaatctaacaccgaataggacatatcttactactacgaatctggacatagtactaggatgtatgtccatattcatagtaatagaatgtgtcacatccggtactatgttggtttttataggacggagagagtacacgtttcttcaagaaaacaatattccttccatcctataaaaaacgaatctaggactagatatgacatattctagtactatgaatctggatatatgtatatcctaattcatagtattatgatgtgtcatatctagtaataggttggtttttttgggacgtggggagtactctcgttgtcccataataaacatatatataaattttcgtgttcaattttaatcgtccatccttttaaaatttattttttaaaaaaattaagaacataagtcaaacataaactgtgacagcgtcgatcgtgacacaagcctaacgtgacagcgtcgatcgatctttgtcaatgcatggccagccgatcgatcgtctcagtccttgaagatgccaaaggacgggttgacgatggagcagccgccgtcgatgagcaggttgtggccgctgacgtagcgcgcgtcgtcgctggcgaggaacagcacggcggcggcgatgtcctccacgcggaggcgcacgcccttgaggttggccacggcctccatggcggcctcgaacgcctccccctccaggcccacgtaccccgtggccagcggcgtcgccgccgcggcgggcgacacgcagttgacgcggatcccgtggcggcccagctccgccgccgcgttctccgtcagccccaccagcgcgcgcttggcgcacgtgtacgcgtgcgacgccgtgccggccaccgccgacgcgaggctcgccgtcccgatgatgcacccgccgcgccccgcggccaccatcacccgcgccgcgtgcttcgtgcccaggaacgggcccgtcaggttcacggccagcacgcggtcaaagtcggccttggtgctctccaggatgctgtggcacgccgcgccgccgatcccggcgttgttgaacatgacgtccagcttcccgtacctcgccacggcgtggtccaccgcggccgcgacgtcgtcctcgctcgtcacgtcgcaccgcacgtagctggcggtggcgctcccgagctcggcgcacagtcgcgcccccgcctcgtcctggatgtcggcgaccacgacttgcgccccgtgcttcacgaacagccgcgccgtgcactccccgatgccgctcgcgccgccggtgatcagcgccaccttgcccaccaacctacaccaacgtacacacgataacatggcagagttacgtgtaagatcaccgacaagctcatgcatcgcacacaacacgcgggaaaaaaaattaaaccgttgtgatctcactttcttgcagactcatgaacgtcgccgtagctgctacccgccatggccaccgcgagatgagaaatcgttagctctctcgatctgcgactctctgagtaagttagtttggcctgagacttgatctcttttatagtagtagagccggctactgatcagctagtttacacaactacggcaaattgtgtggttcggcatctccaacagacagattcccagcggaagatgacacggcgcatcggcgccggcttggaccttgtggtggaggctgactgtgcgagtatatgattttgcttagtagttgacggaatgcaggagctgtttagatttagatttagccaaaactggccgccccacgtcgtcgctagcggcgtgtgccattttttttaagagggtagctatacgggatcttgttgctacaggatactttaagtgattcatcccttactttttttttataggtgagattccacatggtgaatatgtgctcccttccggtacctggtaccacgtaccataatcgcgatacctatctgattcctttaactcctttcctttcttctgtataggtaagatttcacgtggtgaacatgtgctccctcctagtacctgataccacataccataggcgcgatacctatccgattcctcctcggtatcgcgcgtgcgatacctcatcgctggcaccgctcctctgcagtcggagcagcacaatataggctggtacatgatacctgatacctgatacctagtacctggtacctagtacctgatatctagtaactagtatctagtacctgatacctagtaactagtacctgatacctagtatctgatacctgataccagtatggcactagttgcatggtgtgtagtacctggtacctatggaattggagagattcacaaggatgggacaggggaatcgatactatccatataagtcagaaaaaaaaatcagcaaagaaaatcatcaatcaaaaagagaaaacacacatgaggaagggatgcaagcggcggtgaagcattgccagctgggggaggggatggaggaatcagccagagtggaatggagtgcaggaattgaagaaatggatgcgagtggcggagcagcaccgccggcatggggaggcggatggacggaggggagcggtggcgcgagagctcgcacgttgatttggcaccgcgctgtgcgttcctgagccagcgggagtagctccgcgcggcgccagcgaagaagagcgggccgagcgtcctctatgctcaacgcgccaccccgcgcagttagccgctattgtcgtctctatgctcttgaggttggtagtcacacagaggaggaaagatggaaggggaagagaaaaaaaagagaataagatacttagatatttagtgatagcagttatccgcgtgtacgaaatagtgttgagtagtttttctttttttttattaagggcggatgcattacggtgataatcggattgggtatagcagccttcgttttcttttcgatgtcaaacaagtcggcgaggccattttggccaacgcgtgggtggagatacgcgcgcgcatgtcgagctacagcacataggggacgtacgctttccaaaaattgtcacgtgtaacagtgcgagaacctcttttttctgtgtcaggtccctttattttttagtgaaatgcacacggaagctgaatagtaataagctattagaggaataatggggttggctacctacgaatgggtttgtactaacgatgtttcaaactcgacaaatgcggatgtagtatgcaaatgaaaaacggaataggccataaagtccagctggcacgctctcctcccccgcgcggcaatttttttcgttttcttttttttttgcagttttttttgctttctttactctcttctttttttttctcgattttctttttttttcttttttctgattatcttttaatacttaatctgtccgtgctacactacggcgacatttagaaatacaaattaaaatcgatggatatagttattatgttgttaattaaattgccacatgcataaaataacataattattatgcacgaacatgtataaggtcttcatcaatggcagcacccgctgtttgatgaatttttgtactataaaattcacagaaaaaataataaatcattaggcatcaagttcatatgcaaatgctatttacagctcaattttagtaaatacacgttaggggtgtctttatgacgtgtggcctaaaaatccaattatcacacaatatccgaatataatcaatattggactcgttttgctgtatatatcaaatagaaaatgatggttcgaatagaatttaagtttgatgcgcaattgaagagatatacgctagtaaaagagaagagatcaactagtgctagtgctagcagtcgttaattggtttgctgccactcgtaaattatctctagaagaaacaattcgatcaactcatataaagtgtggggcccaccgtcatttagacatgttgatcaaggattatctctatcacgtgcactcagattttatccacggcaaagcaaggctctatctgcagcagtgcgggagaagagatcagcgcgttaaactaccaacttgcgcaggaggttcggaagagattaggcaggttggttaccatcgctgttgcctatataagcgttgacccccaggacgccagcaaggatgaaggggacggagaagggaaaagatacacagtgacgagaaaaatagagcgactcgctcctgaagaaaccacagcaatccatctgccggcggtgctattagaagattaaatctcgccgacggttcgcgagcaggcgtgtcatgaaatgaagattaaacatctctcgtcattaagccaatgtcgcaggtggagatgatcgtggtagatgataagtatgatgataacctgatagtaaaccggctgttcttatggatgatcggagtacctcttttctcctcaataattaaagtgctctggaaatcaaatcacatttgctttctcgaaacataaacttgggtatgtctaatctgcggattggactatcctcgtattatttataatcaaaacacatgtttttatggtgcacatgccgggagcgagcctcaaattataaaacaaaggaggagtggagataaaaaatataacatcgatgctatgttcgtgaccaatgaggccgagcgatgcattggctaaagctgaaaagtactatggccaccacatatgtgacgaaactatggccgagcgccgacaaattataaaataaaagagattaaatttcatcgtcggcaattcgcgatgagattaaccattgccagcgatgattgcgccggcgttcatcatcaagtcgatccgtgtgtgctgcaggcgtgatgaaacatcagaggagccgatcaaaatcttcatatgctatttatcatcaacaacacagtgaggccgtagtgctgcgctgttgcacggcccggttaacagaaaagtaaagagaagcatagacgaatatatcgtggatgcgttgtgaacttgtagccatggatatataagtatcccagcggcgcatacacacgcacacgtcatctttgttaagtgattaatatagggtgcaaataaatacaaggcgagcctgaccctcgtaaaggttggagcgtctaaattattaatatcaaatattggatgagatatttatttgtataaacttgggatgagtttgagtcttattggcatcataccaaccatgatttatacatatttatattcatgccggaagagttacatatttgcctcatgcatgtcatgtacaggagcaattcttttcctctccaaattctaccggattgatgggagcaattctcacaattcttgaaggcatgcattattcgctaaataaaacaacgctagccataagggcgagacgtgcagatttaaaatacacgtcaacatcgtggccgaatgtcaacgagatgaaatggccgattcatcaatatttgtattacgtctgagaccgacaccgggaatcagcggactgcacgcgatctccagtcaacatacctctccattaagcattcctcgtgaaggcaaaagatgaactcctgccggagccctcatgtatttgtaaacattcatgttaatgaatcatgattaataaaatacagggtttccctattttctatgtgttcgttgttttgttttcgtcaaacacccgcgccaccgtgcatgcatgcttgcgtctgatgcgtgtttccaatgcaggagctgccggtgcagcagtaaggcgacacggtgagcagcctggtgtacgaggcgaacgaccggatgcgggacccagtctacgactgcgtcagggccatctccttcctgcagaaccaggtgtcacagctgcagatgcagctcgccatcggacagggcgagaacctctgcatccagatgcagcaccgtgatggcaacgagaacgagaagaatgtgagagaggaggaggagagagagagaggagggaaaagagagaaggtgctgacgtggaccctaacatgtggggtccacatggggacctacgctgactcagccgccacgtcagacaataccggagttaaaaccaccgaatgatctaaagtgaacggttttgtaagttgagggatgtcgtatatctgattttgcggttgggagatgattttgtatctcgatgacaagttgagggaccttgggtgtactttttccttttgcttgatgcttggtgccagggtaggtttgcagcccagtacagagtaaacaggcctaatctagccatcagtcaagatccattaggttcctgagcccttggtttcttttgtgaataaagtccaataaaagtcccttaaatataggtaatatctaattcaaccactcaaccgttacgactcctcgaattattaaagccagtacaaatgactctaggatgatttcgatggtggttttaactgaagtggaatcccaatcagtaagaagaaaaaaaaaatcccagggaaacccacttgtaccagaatagccatgagcccgagctcaacggggaggtagagtccaagcccgagctatgagttcttctgccatcgggcacacccgtcatgccatcgttgttgcagcctatctgtgctctgcaatgacattttggggttgcttagatccactggcaaaattatttttttccctatcacatcaaacgtttaaacacatgcatgaatcttttaagcctaattacgctatgatttgataatattgtgctatagtaaacatttgctaatgacaaattaattaagtttaatctcgcggtttacaggcgtattctgtaatttatttttgttactagactacgtttaatacttcaaatgtgtatccgtatatccgatgtgacacaccaaaactttacacccataactctaacacagtgtcagggttacggataaggcatatcttctatcctgcgacttatggaatatactaataaggacttatggaatatactaataaggtatatctttatgtacacggattggttccatgtacgctcttaaggatttgttttaaatcacagaaaatatctccacgagtcaagcgatttccaaaatcctactcggaaggggtaaagtttctgttataccgtgtcgaatcaaatatccccatatttttcttggggtcaagatgatccacggtataaaagggactcccggggaggggatcaaggcatccaattcaattgccaacacacccaccagtttacgaagccggagtacatggagtcgctgggagatctcatcgaaaccctcgactacgatctcgtcggtatcatctatttggactacttgctttgtaatctgttctcgtcatcatcaatcccatataaactggactaggactattatctgataaaggtcctgaaccagtataatcgttatcttttgtctgcttgatatcgtattatgtagtattatgtagcctcgtaacaatgtaccccagtactcaactcatccggtccatgagtataactcgtcaacacacagcctttataactcactttctaatagtccgtatatctgatatatgcaattaaacctaaaatttttccacaactaaacgaggccttaggtgccccaaacaagatctgttgcctcgccgttaggtctttctactccagtcagttcagttccatcttcagcagcagatcgcgaccgtcacgtcatttcaacgcatcgtgatacccatacagctagccaggaccccgcgcgttgccgcggggtgcttaagcaaaacaaaatatttaacatatgaacaaccataaagatttctgatgggaaaattttctatacagaacacctgtaatttacatagacaaaagtgtattcgagaaatattccatcctataaacctagaagataaatacctaagtagaaaaaacatggaggtgacatgattttacttggaagtacaaacatgacaaagtatgatatatacaggtgattggctgcaagtctatgatgaacaatggactatctatgctcaattggctgttaacctaggtagcttgattccatctatgattttattaccagtattgactctcttactatgtgacgttgagttgaaagacagatcagatttcttgcaaactcatcatcactgacatcaatatgtagccagcacacatgccataggaaagaatgaagaatccatagctatcctgataattgacaaatataagaattaatcttaatgatttgttttttatatggtgtataatacaaataaagagcatcttcacatgattcttcgtgaactaaagcatcagatgaatttagaataagaaatgtcatatatgaagggcaatatgtacttttatgaatgataattttatccttgaatagagcaaaagatcatttacaaacaaatagaatgtcaacatgtatatgagatgctctttttttttcatctgtggatcattgtggaaatggaaaccatgatattaacggtaatattcatggcaaggatattgcttgtaagatttgactgtgtttaagaaggaatttaccttcggaactaaagatggaataacatgtgcaggagccgtaggatattgtatgattttaatgtaaagtctgatgaacttgtcagtaattttgcatagctgtcatcacaatcatcaagctgcaacatttgtatcaagacataacttagcagttagcacatttgaatgttgcgatccaaaaagaaaaataatgcaaaagcttttgcatgagataaatatgagtaaatccaatgtataaattgcaacagagcatctcctatgtatgatttatgagtctttttaccattcaacatttggtacctcgaggtactacaattttttggtacctcgaggtacgaactgttggatggcaaaattgctcatgatttatggcacatgaaaatgaattgatggcttagactataaatgagcagcagtagtctaggaaagcttctctcatatagatacactaaaaatgtaactatggtttggggttttaaggtacaggttttccataagattgttgctccaagcagtaaacatcttctggcatgaaaggcggtacattcttctcatcagtcaattaggaacctgaagcaggtaaaaaaagaaagatcttacatacaacaaagcattacctaattatttaggtgcaaccatgaatgccttaaaacatatgcagttagatcgagtagcacaatgtctggcaagacatacaggacaaaaagatcgatacctgcaaggaaaagaagattagcctccatgccatcataattgctgaaccacagccagcgcaaagatcacatttagacaccactaatcaaatccacacagggccaaatcatcgacatggtgagtaagatttggtaaaagtttaaaataataccttgagctataggaagacaggcaagtgcttcccttcctgccaccatagccggaggacagcaaagccgaggttgagcagtcacacaaacaaccaatagctgcataacttgcacagatcgattcatcgttgaactgttgaaggacgtaaaacttaagtttatgcgctataccctgccgcctcagctcgtccgccgcaatgcgcattacctaccaaaaccctagctacaacatgagacaaccaaatctggatagagaccaaatggaggatggtagaatgggatgctatgtcatgtgtggcgaagccgggggtaatctagagcccagatggccatacctggacctgtggtcggttctcaatggcgcactgtttggaatcctcattgtgaccggcagcaaccgagaacccccaaccatagccgacgctgattcagtaaggagaacggagggaaggagtcggcggggaagaacggaggggcgaagctgaatgggatcgatgggcgatgaggtggagacgccgatttctgatttctccgcggtaatggggatcgatggggaattggggattggtgagcggtgggtgcgtggcgtgcctggctgaggtcttggggatgacgacgggcgagcggatcaggggctcgggctggcgcagaagcagacacgcggatgttcggatctcagcaacgtgggtgcatcggacggtccacgcgcaggcagggactgttgcactgtagcagaatcgtgagctctcgtgaagcgacgcactggtggtagtggctcaggaaaactaaagatttaatatgatatgatatgattaaccctgtgcacctccagttcccccctgcctaccccagcttccgtccgcgtcggtcgatcgggccgccacagcgctactgttggtttggctgcacctgcacatgtacgcgcgccccccgtgtcgatctcactgctgctgcactgcacactgcacgcgacgtgaaccaaacagaccgcgacacgcctggcgcttccgcactcggcaacccccccacacggattgggatcacctgcagtagctatagctcctgcaacttaagcagtcctataaccaccattggatcagaaattgatgtcctagatctttcctaaatactgtttacagaaaatcgtacacagtgtgttcctgtagcactgtttggaccgttgattatcttgatccaacgatggaaaacagtcccagctgctaaacttgcagtctgtactgtaactgcaccggatccttatcccccccgcacacacacgattgggcgatcgtcgacgtatgcaaacgcacaacgcgaggggttgggagagttgggaccctctctgtgacacaatgacaagcgaacgtacatgcacgtggccctgagcctgagttggccagatgcaccaccaccatcaccatgtgcctgtgcctgtgccagttgtgggcacgctagctgcagtgacagactcacagacacagacactgcttctctaatttaacaaggcggcagcatgagcaggtgctagtgctaagctaatctgaccggatctacggtcgagatcgagatcgagagagagagagagagagagagagagaggaggaatttgttaatcggcccatcgccatcacacatgcaacggccgagacagctcggcccacgcggcccacgcatgtacgtgcacatgtgtggcctcgtgtacggtctacttcctccgtcaaaaaaaaaaaagacaaatctggtttccgaccatccatcttgtttaaaaaaattatgaaaaaaattacaaagacaagtcacacataaaatattaatcatgttttatcatctaacaacaataaaaatataaattataaaaaaatttcatataaaacggatagtcaaagttggacacggaaacctagggtctgccttttttaaaggactgagggagtacttgctgccgcattgtctgcttcaactcatcgctcggtcactgacaagtaaaaatctcccaaaaaaacgtactcccaaatgtggcgaacagatcatcaacaaatcaaggtcaagttcatctggagatcgattgatttcatatcatagcagggtttaaccatggacatcacataacaacacgcgcgaaataaataaagaaattatggaggagtgtagttcgggtggccatcgaccgaccatgccggatgtgacttgtgtgcggtggtgtttgttgcatgttggatggctagctcgtcgccaccgcggccatcgccatgccgccgttgccggagacgccgccgcggttgtggggcgcggccatgatggatttgctggaggaggagctcgtcggcctcagcgctcgcatcgggctcgccagcgcccacgcccagctccggtggctacgcgcgccgtgggttcttgcgctgggggcggcggcggtggcgccgtcggcagcggacagccagtaggaggacgacgtgggcggcggcgcggcgccgagaccgccgaagaacccggcgcacttgatgcggtgctgctgggtggactcgtactcgtcgtcgtcgccgttgccggcggcggagtggttgccgcccaggtgggcgagcgcgccggcggacgacttgggcttgggctcgcggtgggactccacgcggcggagcgcgcagtcgccgaagccggtggagaggcgctccaggaagtcccccgagaagctgcggctgccgcaccccacggagcgcgaccgcgccaccttcctcccgaacgacgacgacgacgagccctcgctacggcggccggggctgtccggctccactatcgcctccagcctccgtcccagcgacgctgacnacgccgaggcccccgaccccgncttcctcctcncngacgcgccgcnnccgccgccaccgttggccatcgacgccgagccctggtggccgccgctcgacgacgaggacgaggagtagaggaaggaccagaagctcttcttcctcgggctgtccgcggtgaccgcggacggagcgggcgccgtcaccggcgtcgtctcctccggacgcggcgccaccgacttgctcctcttgagcccgccagccgccgaggccgggatcaccttgcgcgccgcggcggcggcggaagggtggagaggcagtgacgacgacgacgactcagcagcgacgtggctggtcggagtggacgaggaggcggaagccggcggcgggtggaaagggctggacttggacgaagacaccaacatgccgagcttctcctgcaggcagaaggcgcatatgccgccgccggctgccaccccagccgccgcagccgcgccaggcgggtacggatgctcgctgcagtacgccactccgtcctggtcccccgccaccacaggcgccaccgccaccgccgccgctgccaccgtctcccccactttctcctccattctcacacccgtcacctcacctcctgcgatcgatccccgcaagcaaagctccgcaccaccggatcttggatacgcctacgcgacccaccgcatcaccacaagaggtcaggccgtctcgatctcgatctgctgctggtcgtgcagggcgtgggggcacggggcgcagtcgcgcagaggcggatgtggcggggtgtgtggagtgaggagtgagggacgcgacgcgaggggggtggtggtgagcggcttgttattttagcgccactaccagtggcagcgcccgcttctttttgtccggctcgtgcggatgggggggcgtgacaaggagagcacgtggggggtgggggtgggggtgcgtgcgcgctgctgcggcagcagcgttctcgttctcctccccgcgtcgcgcgtggtgctccacgctgcggccgcgcgctgtcacatggcgcgcgcaatttttctgtatggtatactagcaacggatcttatgccgcgctataacccaggttttactactactactactacctcgtaagtgaccacttgatcgaaaaatagttagaagaatgggatagccgcgccgtgaccacatctatatcgctcgtttctctcgatcactcgatgtactaatgtaggagtatactactactactactactaccaccaccactactactactactactactactacgtgcaaatgggcaaatggccatgccgaaatgactgatccaaccttgccatatcttaacaacagccacatgtcttcggggagactacaacatccatgatcagtactacctatcgtatgctgcatgtgctagcatgaggtattgagcttgcagccctagctaatttgatttcatcacggatacagatctcaaatctactgaaagagcaactgatctccatcatggaaggagctataggatggaaacacgatgtagtataggggtagtgattaataaattgaggtgccacgagaccccgggacaaacagacaggatttgtacaaattctaatggtcttaacagtaactcttaaccatgctccctgggaatctatcgtttgttttagctctgtccagggtggcacgtacgcttagctacatgtttctaatccgatggagtttttattacaaaaaaaaatatatctgaatgagtggtcgatggatcatcagaggcgactggcgagagtaatttccggtccagcacattgcaacgccatgccattctgtctctacctctcacccagctacagcatcaagggatgtgcggcacatggttcccatcggtcgacatcatgtacttctacacacatcatcatcgtttcggttagttttctgagcccctgatgctacacgaggggcacttgtatatactactcctactagtagtatgctcgcaacaggagccgtccatgtgcgtgcgtgcgtgcgtggggagatgcaccgttgcagtggacatgtcgctctccgatccgcggcttgcgttttgcgtacgtgcggttcgggctgtgtctgtggctgtggccaccgtgctctcccggcgtccacgcgcgcttcccggcgcggccagccggtgcatcggtgaatggtttcgtgatcttggcagagatcttttgcatacgtggtggcttttagttccaggtgacacgaaaaggttgaaagcagcaggattccagggagcagcggttcacggtttcgagatcggctcatttcggctcgatgcgttgacatggtggtagagactaatctggggaattttttatatagattttgtttatgaactatctatacggggattagggcaaatactataaacatccaagcacaatctcctaggtgccacataagctaaaatggtgaggtggaggagagaagagatgagagagataagcagccacctctcatgcaagaggcaaccattacacaaaattcaagacaaaaggagagagaggaagagtagattgggcaaacaaacattgaggctagtgtattagaattagtatagatgtgatatattgtatatattacctctatatttattagttgatgatgtggtcaaaattagatgcaacaacctccttttttataaaacttgcacttacgtgaacgggattttgtatattcgtgcacggacagataatggattggagtacaatcttgcttttgtcattcgtgtaggatgactccaaagttagggactcgaggacatttaactatttacttcatccgtttcacaatataagactttctaacatacgttcatataaatgctaatgaatctagacacatacactagaaagtcttatattataaaacggagggaataccgttcctagatctagagcagaatgggatagcccttcagtcatcaattaacacttaatactccgtactatagaacttgttttaattgataggaaacagatcatacgaaaagtaaatttcaaataactacaagtatttattaaaactataaatttcaaataactataactattttactaaaactattagtttagtacaactttggccgtgtttagttttaaagtttttcttcaaacctttaactttttcatcacatcaaaacttttctacacacataaattttcaacttttccgtcacatcgttccaatttcaaccaaattttcaattttaccgtgaactaaacacagcctttagctaaatatttcacggaactgcaacaatagtgtatgactttatcaaaaagcttacattattcacctgaaaagttttgagtacatatatcatacacacatgcaatactttatatcagggtaagtcgagcccatatgtgataaaatcaactgttgttgctgttgttgttgcagcagtcttatgaaatacccatctgaagtaaaaggatagttttaacaaataattacagttttacgaagaatgataagcacgggtgcatacctcggccagtttcctcggagaactatagaccttccgttgctaccaaatgaacatttcttgtaaaactgaactgtagatttgcggacaggactgtgcagtactgtgcacccccagtgcctgtcaggatcagagcagccacaaacccataaactcatcgctctattctagtccttccaaatgtacatttttttaatggaaatgtacattcataatactccatcaagatagattacattcaacaagtcatgcgctacgatgtacagcatatatatacaccactagcatgtcggggttgaaatgcaatctacagtttgcaatactcgtcagttgaatcctcttgacgtttggtactggcattcccaacctgctaaacctttgtgggggtgtcatcatgaacgaagtaatcttggaccagaatttgactcaatccatgaaacaattacgtcaacaagtgtattgacatcctttgagatttgtgctcgtagaacgcccgaatccgcacctaaagtgctacctacctccttagcaacagcctcccatggtgtccctgttgctagatttgtcaggagttcacctcctctgtttactgcatcggccattgctggtggaacatcaggaagtacctgaaggaaaaatatgtgattactta

SEQ ID NO: 1588 - DNA, 9067 bp, Oryza sativa
cattaaaatacggagggagtattagccaagctacagacactgctacagactctttcggtataaccttcattttgtttctctatctgaaaagtgataagagcaccggacatattacctatgttctgaccttcaggcggaactccgttaacgagtccctcgttgaaaaatctttgattaggagtataattaacacctctcttttgtaaagcaccctcctgttccgttggacttggatttctttctgatgcacttatccaaagtgcatgtacctattgctggctttgtaggggacaacactgataaggcacccgatagggaatcttattatcttggatcgatcagccagtcgcagaacatatccccccatgctgaatcaaagaggagagaaatcatggctagactcaattactcaactgatcttgcagataggttatgatagatctcccattgtgtgattagcaatctgatcttgtttattcatttggtatataaaattcagcatacatttttttgtcaatgttgctttctgatgatcccttccaagatggatacctccgcaccaagaaaagtcctagataaggttaattatgcagtgcctagatttttattttctttcgaggaatatgtagtgtcctagattattccgtcaggtgttcacatttcctctccgaatgcactagtttagtatgataagattgagtgaagacgacgaaagatgacagcttgacacttgttaattactgctgctaaacacgccataatatctcatctatcagattgctagcgacattggcttacttatctctaaaggcagatggggcgatgcctcttggaagcgattagctgaatagaaacaagtaatctatttcccttgcacaaaaaagaaatctatttccttcccctgataagcaaagagagaataacactactgtactgtaactgtcaagaggacaaataattggagctctttacaaaggcgggagacgcgattgcttggacgaaagataaaatgagccgcatgataagagaaactgaggcaaaggggaaaagacctgctgatagcaaagtcgttgcaacttgcaacctgtcgacatgggcgaagatgagggctctagtactagtctacctaccattagtttacagtggcaagcaattctggggctcatctctcgctctcgctgacatcctggcgaacgagggccatatgaccggggggtcaataatgccagaaggcaggccggtgcgaaagcagatagagtttggtcgtgcaatggtggggttatggtgttgacactttgtttgtgtgcctttggatcgaagggaaacggcacctaaaatgaatgggacgactgacggctgatgaattgcttctgggttctgatctcctccagcaatcaggaacatgtatttgcaatttgcaatatagcatgcatgtcctcctctgaaacttctgatagtcatgccgcagaaatcaatcgtccatcgacatattcagatacgagttcccagttcacacgcgatgcaacatgcaagaacgaatagtttttgttcctgcacgattgcaaaacaaagtatatcgcgggtataatatcgtccgccaccaatcatctacgcgaaggggtcctaaatttttataggcatgtacaatggctagggttttttaacaccctgaaaattcgacgacaaaaatctaaactctaaaatgcggattttcaaaaactttttaaataaattgcatcatgccgattttattcgattattttattggagtttgggttcggagtttataaatcgcgaataatggataattggttaggaataaaccctaaaaagtaaatggacaaagtaaataattaaagtgcaacttaaaataagatttggtgaggatagaaatgagtaaaatattattacgaccatatttatatccatcaaatttaaaagcaatggaatgagaattaactctaattaagttcaagtaaattacaataataatatataaaacatggaataaattaatctagaatgaatccatggattggaatggcacaaatattgagtatacttcatttatgcaaaatttggaattaaagaatcaaatttaaataataaatgggccaaaatcgggttaattagaaaacggcactgttcattgcacctgaagtgttcgacgaggtctcctagtcctagcccctcctttgccgcgttgccctcgcgccccgcgcgccgctccgcctcccctctgccgacgccgtcgccatcaccgcacctggccgcccctaaccccgcgccgccgtcgccgtcgtttccgtcgcgtctccgcgccgccgtccatcgccttgcgccgcgcaccgccgctaccgccgtgccgccgcgcgtcgctcgccgccatcctgtcgcgccgtcccatcgcaccgcgcaccgtcccgtcgccactgccgagccgtcgccgtcgtcacctcgcgccccgtgccgcgccgctcccccgagccccgtgccgccgctgctaccgcgccgcgccgcccgttccatcgccgcgcgccgtcgccgttcggccgtcgcgtcgccgctaccgcgccatcgccatcgcgcgtcgcatcacctgccgcgccgcgcccccgagccccgtgccgccgctgctgccgcgccgctgccgctcctcgcgccctgccgcgtcgcgtcgtcgtcacatcgccgcgtcgagccccgcgccgcgccaccccgccgacgccatgaggccgctgcccctctcccctcttccccattatctctctcccccctcccttatataagcccccctactcccactcttccccttcatcctcacctcctcgcctctacccacgccaccacgccgccgcctccacgccgctgcgccgtcgcatagagccgccgcgccgccgccacgaagccgccgcgccgcgccgcaccttgcgccgacgtcgccaccgtcgccgtcgccgccgtcgccgccaccgccgtcggtaagctgccgcctccaccacttgctcggccgccgtcgccgccccgggtagcagagagccgagagagagagagagagagagagagagagagaaaccgagggagagaaagaagaaggaaggaggagagaaaccgggagggagagggagaaggaaaaagaaaagaaaagggagagagagaaggaaaaagaaaagaaaagagagagagaaaaaaaataaaaagaaaggaaggaaaaagaaaaagaagggaagaaaaagaaaagggaaatagataggaaattagagggagattagggaagtttagaaaatttaaaataattagcatttagttatagactagttatagacgtagaattgcgaaatttaatataaattatggattattcttggtaatttctacaagaaatcaattcgcggtagtagtttaaatgtaattaagaactaaacgattagatgaattcttatagactattatagattattttgggtaatctctataagtaattgattcacggtagaaattcggatttaatcactaggaattttagacgtatattatatttagtcgtttaatcctagactaaaatttaatcgtataatattataagataattttaggattccgtccgatatttagcttgtgatagaaatttccaacctattatatggatataatgctcgggtagattaaattaaaaacttatgataacaaaatatttatacccgcaaaatagtttaggatataaaaatcgaaattgggtttgccctagttcgcgaatagtaaagttaatataaaagaatcgacttacgcgttcgacttccatttggatttatttggatttttatttgaattctaaccgaattcaaatcaattttcgcacataactatagagcccgagggagttgcggatccaagtgaaggccaagacccgcaagactttgagcaaggcaagtcatcactattccttgaacatgttgatcccaattgcgaaattgttttgtttacaaataaaattgcatgcaatgatgaacatcctacttgtgattatgccatgccttgattattgtttgccccttattccttcgtaaccatgtttacgtatgagtccctagtcaattatgacaattgcttagaaatgctattctagaatcatgcatactcatatttatcaaatgatgcttgggcaattacttttgggaaggtaattgagatgcggcatgtggagacatgagcgccacattgccatgatgttgatgacatgatttgtgaaaggagaaataaaattaaacaattgttttcgactggggcggacggaggatttgggtggtatttgggaaaggctagtaccgtccccggtcaattaaggaccgagccatgaagttaagcatgaaacgacccccgtacaaccgtacttctcgaatgggtatagacctagcggattagatagccgagcggaggcagtatccctgcatagatggttcacccctaagtgaggcaggtgcgctacgatgggatagccgttgaggtagggccgagaggcgtgccctacatcggtgtcgccattggtaggactgccatgagtgtgagagagagagaacttaacttgaaccataatttaatatgtgtgagacttctctttcccgggagcgccagaactcctcacactgctagaaacatggacgcctagagtgcatgaggatttaagttcatggagcggatactgccaatgcgaggttatcgaaaagctttgccgtgacgcgtctcatgtgttgggacgaggctcatgtgttgggcagtcgcggagtgcgggtaaagtgtacatccactgcagtgtgagtaaaccaaatctattcgaatagccgtgctcgcggttattgagcaccgggacatgtattacacttggctagactctaaattctttaacttgtgtgggatgggatattgcatgatgatttttatgctgatggagccacttcctgagaggcgggaatatggacgtcctcagaaaaccataacgactcaatggcgggaagctatccttgggatcaaaatggatggtggacagaaccgtcattgtttaatatgaacactggtattaaaacttgatcagtctatgctaggtcttaggcttgtgaaaagaattacaaaacttgctttgtgcaaaagaaccatagccatcctttgaattcctttgtcatgtgcatcattgctgtggtggcttgctgagtacggttggtactcacccttgcaaatataatcagaagcgggagatgaagcttcggaggatccctatgcctactaccaggagggagatgaagacgatggcgctcagtaggtcttagttacggtcgttgcctgtggcaatggtgtgccgctgccttaactccgctgccttacctacttctgtttttggaatgtattccggaccgctcagtccgatgatttaagactgtgcatgcgggcttatgatgtaataattcgtactagactctcgtgtatgtgcacttgatatttcagctatgagttcgtgtgtaccagactacttgatccaaggaaatggtactgtttacacgattgattcctgttataaaaacgggggtccacagttttcctaggagagaagacgagggagtcacccgcggcgctccgacgatcgccggcggtgattcgtggcggaagggatggccttcgggagttgggagagtgctcctcggcgcgcgagagagtttttgatcaggggagggaggaagcccatggttttcggcccgatccaatagtgagggagagagaggtggaggggcaacacgtgtcgagatccaacgatggcgattttggggatcggtcgaacacctttgagtcgactctcctgactccgtttctacaccacctgtggggagctagtctcgaggagctagggttccaggacaggtggaggagattggagaagagggagacgcaaggggaggtgagagaagtggaggagtggccaagggtaggcggtggtgggcggcggcgagagtggacggtgagcgttcgaggggacggccggagtttcgcgaaggtggtaagaagcggctctccaatggcaaatcaaggcggaggatggaggccgcgtccacctttcaggccgcctaatcgattctggaggggagacgcagggggaaggggacatatccgccctttgcagattgggcgataggagccacaaggtccacatccgccacctccagatctaaatcgaggagtagaggatgggaaggcaaagcatgaggaaattctgcaagttgctgaggagaaggggaagcaggggaaggacacgctgaaaactgaagggaggaaggaagcgggtccaaatttgcaggaaacaagtgctaagatggattctatcagttcaggattggaagcaaagccaaattagcaacaaaatcgagatgagtccaaacattaggttggtgaatcccattcccagcagaggattttctgttctaaatgcaggagttacagtcatttgtctagagattgcaaattgtcagtgttctgtatgatctgtgcaaaagagactcataggacagaggattgctttaggaagaatcagaagaaacctgtagctaaagtagtgggatgtgctgccccaggtctggctgtgtgctgattcagagtgctaagggtatagtgcaaaaagaacatgttaaccctttggctattgtgacaattatgtgggtaggtgatcttactgagcaggctttggaggaaggattcactcaacacttcaagtggaactggacttggaaggccaggatgcaggagaaagggttgttccatatgagattcctaaataagatgaaattggatgagttagctgaatttgactcaattagagtaaaaggaacatctgtacatgtgaaagtgaagaaatggactcaagaagctgaggcagtggggaggttacatgaagtgtgggtgactgtggagggggtacctgatgaaatgaaggattacgaccctctacatgaagtgggttctaatctaggacctgtgatagaagtggatatggtagctttaaagacaaaggatgtggttagaattagagtaggaatgatgacattaaaaagcttgcctctgaccatgactctgatgacacctaagttgctggtttacaaagctcatttcaagttggagcagattgtggagttgggatggtttagagattgtgcacaggaaaagagagttgtggaggtggaggagcaaaatgaacctggcaacataaatcacatgcagaggaataagaaaccaagaaaagaagaagctgcatcaaacatgagagttttggaaaaggcaggggacaagaagaaagccatagttgtggaagaggattcagacaatgaaagtgctcaagcagaattggtgaagctcaaacagatggagatagatagggagatggctctgagagtacaactagaagaacattttaaagtcaagcagattcaacttgataaagatgtagcaggagggatgatagagggtggaatcagagaagaagcacaggctggggaggaggaaaatgagaaaacaaagaagacacaagaagggatggcagataaaagtggtactagccagagagtggaaaatgacagtgaggaggtgatttatgatgaagatgaaccaagagtgcaactggtggggagtgaggagaacatggaatcacaagaatcaagtgactttgctgtagcggtgggagttgttctgtctcaaactaatgaagacatgacagaggagaagaggaagaaaagtctaagacttttggagaaggaagaaaaaggtggccgatgttgcagctgaaaggaaagaggctcttaatgctttcatcaacaaaggtaacaaacaaatcccatctatagttgatgaaagtaatttctctctagctcaaatggctagtctgttaggtgttaatttaggatgtgctctagaagctgcggatacaaatctgaacctaatcaaaaatctggaattggctaggataaatctgttcttgaaagagaaactaaatacttctcagaaaggggagtgtcaaaatgttggggagaacttgagtgacataaacataaatatagatgaagtcttacattcagatgattgtatgtctgattttgattatgctgaaaacatgttgaggctttctcaaagcaattcatcaggtaaaaagaggaggaaaaataacagaggaaaccttgagattttcaaggtcactcctaaatgtagtggcataaatgagaagaaaaaaacaaaaaagaaatcatgaaaggtttattttggaatataagaggtatgggtgatcatgataaaataaagcatctcaatgatttaataaaagagcataaagttgatttcattggcatccaagaaactgtgaagcaggatttcactgctaaagacttggatttaataggaggagggggtaagtttagttggaattggaccattcccaagggtagatctgggggtatgttggtgggaataaatgaagacaaaatggaaattatggaagtttccaagaagaattttttgttgcatgttaaagtaaaaaatagaaatgacaaatttgtgtggagattaataactgtgtatggggctgcccagcctgaacacaaggaggagttcttgagggagttagctcaggattgttatgggtgtgatgaacccctgttaattggtgtggattttaacatcctgagacaagagaatgaaaaaaacaagaggggaggggtgaataaatggagtcttatgttcaattctataattgagaatgcaaacttgagagagatggccttggaagggaaaaaattcacttgggctaataacaaacaaagtgtaactcttgaaaaattggacagaattctttttaatgataaatgggagattaagttccctttggcatgtggaagggtcttagagagaatttactctgaccacactcctcttttgatcaatgttgagggagaaaagtggctatctcctctgtttaaatttgagaatagttggctcatgagagaagatattaatactgtggttgagcaagtatggaattctt

SEQ ID NO: 1589 - DNA, 35664 bp, Oryza sativa
gtcaagtctagacaaaatagagccagtgcactcttctctgaaataacaataagagcaagttcatcctttctacatctgtgctatcaagaatagtactagctattagttcaataaagtgatgtcaaaccagacctttatttttattcgagtatttgacaattgcagacttcccacctccaggagtaaatttctcacgcactttaaaagaagataatccgacaggctctcttccatcctttgcaagctccccttggactcgggtaagtgcctgctttgctagctgacttgaatctactcctaagctaaaatgacaatcattgtaaaaggaaaaaaaaatcaatgaaagtttagtggtgggatttgtattcaaaacgagaatgcagagaattggtattaactacactaagcggggatgaattgtataagtttataggattttaaggaattaaaccccaactcctaaagcaaccgtcctcgaccaagcacacccctaaatgtgcaaaagtacactaattatttatttttctctttattaagtggaaatccttagcgaagtccacatccatcgcaacgtgagcttgctgatgtgcaaattcatttacatttcaggttgcatggctaatgaattagctaatggtatataaagatgccttcatttttctagtttgtgagcatacacatctctaaacttccaaaatatcgtttgttgtttactggccgatgaaaaggtcgtaggtggttgatgcattgaccacactatcgcggatcatatggaagcattttttttttttgggaaaacatggaacaggagaacatcaccacaaacctcttaaggacgttgttcgtggtgggatcgttcaggttgaagaggccgagcgcaatgtgctccggcgagatgaagttgcatcccatgttcctggagaactccacggcggcctcgaagacgcgcttgctggcccccgagaagggcacgtccgtggccagcccgaccggcgcctgcgcgagcccttccttgcccacggcggcgcggcacgcctcgcgggcgcgctcgacgcggacgcccgaggcgaggaaccccagcggcgaccggtcctccgcgacgaggcccagcagcaggtggtgcggcgccaccgtctcgtcccccatcccgcgcgcctcccgctgcgagaacaccaccgccttcaccgcccgctccgtgaaccgctcgaacaccgccctcacgacgacgcccccgcgccgccgcggcgcgggcgcggccagcagagccgcggacgcgcggatcggtcgccctgccgcaaccgccaccgccctcccacccccgccggcccccgcaggggagaaccggcggcggaggccggcgcccgtggcgaggatggacgcggacggcaccgacgacgacgagcagcagcacgcctccatcgccctaccacgcgccgcgaagctcgctcccaactccccccacggtgtatgattgatcggatgccgctgcagccgaagccgcttcaattatgtggcggattctctcacacccgccgcaaggttgtggctgtaaaggttcgctcgcgaaatggaatagaataatcgggtgtgagaaggtggtgtggggtggggtggatggaagaacagtggaagtggaggcggcacgcaaggaaggagggggagggagggggaaccggcacggcggagggagagagatgcgggggtggaggcagagcgggagaagaaagggattttctggcttggattccaccgttggcgtgcgcctccgccgcgggggtattctccggtcgggcggccacgcccacgcccacgcgcgcgctttatccgaacggaagaggggatggctttgcctcgcgccgtcccgggggccgtgcgatcggggacggacggcgcaggctgcgtccgtaaggttaaccggtgcatgggctgttaggaaagttgtgtgtgtacacgaaaggtttaatgtgatggaaatttgaaagtttgaaaaaaaaattttagagctaaacagggccatggtattgggagagtaccgtttccatgggtgtggcgtctgggcagcccgatcagtgtctcggatcgatttgttcggttacaagtttacgtctaggtacagtgacgtgtgacagaacgggcacaacgaggcgatttcctaattggttgcactatttacatgtgcttgcatgccaaccaaaatggttaacaaaacggttggtttaaatgggcaaatcctagtgttggttacatggaaattggcagaatagcgtacctatacgatgtctcgctatccacacatttgcatgcacaatacaaacacaccgtttaacataactcaaatataatgtaatagatgatagatacatgaacataagaaaatcgtgttaaagcaattcgtatgtacaaatgtccatatatcgtatatagatatcatgcatcgcaatatgtgtgttctatttaaatcaggatatgtcaatacgtgtgaatgtttatagaggtaagtatacctccttgtacatgagtttgtaaaaaaaaaatctcagttgagtagtgttcttacttaataaaatgagatggattttttgttcttagccgaatagatattgagaattgaaatggaagtagatgaccggccataagtgatatagcagtataacccacaaccctaccacaccatttaaggcccattttccaaagctccatgaatccattgttcatggagcagaaaactcgttagaataagtctattttgcgtctcttatctcttttcttgattgaatggtttgaatcaactctctcaaccataaaatcaggtataatatctcacacatctttaaaaaatagtgcaaatcgattctttgggtagtttgggaagtgttttttttattgatgtggcagattgactacaagtaactcgctgagccaacagatgaacccacatgttagcgactctcctctcttccatactcttgtcactaagccaacagccgtgatgccttgcatgtggtgcggtgcagcatgatgaggcccaaccgacgccacccccgacatgtgggtcacacctattgagtcagcaagtcaatctcggtcaacttgctatgttagcaaactatttttcaacccaccgaagaagtcgatttgtgctgatttttaaaaattagggaggtattgtacctagttttgctgttgcaggagacgattcaataaggaggaataaatgagaaacggacaataggcttattccgaactcgttatccgggccaacaaagagcttacggaggcctacaaatgaagcgttatagagaagaaccctcacttgggcctctcattgatctgcctccaaaaggcccaaaagagagggctcgatagctctaaagcatcaaggcgcgtgatcgctatgatgggcaaaacattggatctcgtctcggcgccatgtgttctgttccgatattttttggccgggtggtacaccctcccacgatagatctcgcgtctcgcgattcataacctgatttgatccacggccccgcaggccaagtagcacagtaatacagtatactaccatgcttcatatgattgagcgcgctgcaatttgcagtagcgaaaaaagacactcccaaaaagaatcgatccaatgcaaagaggctggggaattctcccaaaaagaatcgatccaatgcaagcagttgcagctagagcacaagaacaaatatcgtgcccgtacagcagacggacagaggagttggacgcggacagaaaagcatctccatctccatatatcctgtgacggagtcggtcctccgattgtccaacgaacgcaccacatcgatctgcatgcgaaagcgaaaggaggggggggggggggggggggcggcacaagactgactcgccaatccaacggccgcgaggcgatcgatcgccccgtgtacggcgaggtcggctcgtgatcgaagcgccgagacggcgtccgagctgtgtatgtgtatatatacgtgatatacgtactgtaccatccaccacgacaggaacaaggagagaaaaaaggagaaaaaaaaaacaaacactggagacgaaacggatttgcggataggcgccacgcgcgcgctgcgacgttacatataccccggccccgcccgcgcgccgaacgctccctcgtctcgtctgctacctctcgctcgcgcgcccgcccgaaaccgatcgatcgatcgatcaggtgcggggcgcgcggtggccgtcggttgcgggaggcgcgcttcccatcgagcggattaccggaaggcgagggagacaccgatcgagagacagaggaggcgaggcggttgcgttgttgcgggcgttgttgcgggcgggcggtcaggtgagcgggcgcgtcgcgtgccgcatcggcgcggcgggttcacgcgcttgttgccgcttcggttgctatgcccgttttgctactccgcgaggcgggggcttgggactgattgatcgatgggcaatgcaggggcggcggaggcggaggcgatggggggctcgtacgagctcgtcaggacggacgacgcggcggggcacgtcttggatctggaggccggacgctgcgccgccgtatacccaaagggcggcggcggcggcggcggcatcgctccaccaccggtgccgtctccgccttcgtctccggcgtcggcgcggcagcggctcgtctcgctcgacgtgttccgagggatcaccgtactggtacgcgcagaaatcactccctttttttactttgttaaaaaaaatctctttcttttcgccggtatgtttttcctccgattattctgtcctttaaagatttctacggtttattcctgcaaatctttatggctctttcttgcttgattgccctgtttaatttacgatatatgacaaacaacctaccaaatcggattgcttgccgagtgggtctctgtgcctgctgcatgtgtatcgatcatgtggtgtggtctttggtgccaaccaaacacgctccatgactcatggactcatgatgcatggcagtggcttagcagcagcgaccacacttctcttcccttccctttccctttttgtttgtacttgaaccacagtaaccaaaagagagcagagctgcttaaactaacccaacagctcaaactttagctttatcagggaatatttagcgcatccagcgatgcctgtacgggccgacatgataggttgcgtctttctcttcatgctgtcacacacaacatctgtattctctagccacttattatcttgtccaaacagcaaaatgccctctgtttttcacgcacaactttaaccgttcgttttatttaaaaaaattttaaaaaaatttaaaaatataagtcatgagtaaagtactatttatattttattatcttgtaacaacaaaaatactaattataaaaaaattaaataaaacgaacgattaaaattgagcgcggaaacttatggttgcactgacggagagagtagcaagttagcagcaactgtagccattatagtagagctgtggaagcatagatcatcaatttttagtcgcggcacatcttgatgctatgcaagatatagttatttagaactgacgtgaattaacaatcaccggcctggcctgtcagattctgaggagtgattgctcctgagatgtggctagaatcgtcggtgctcgtggcccctcgatcacagtaggaaaatgccctgcctaccatcgtacggaatttctccagctattggactcgaactgcacggcagatttcgtgcactaatatgttcagtttctgttgctttcaaacctccattagtttgatagataagtgggtaatgtcaagtatagctcacctgtaaatatatttagataagtagatgagcggagcgcatgtaccctctatagttggcacttagaaaaagatatcacgtacggtctgatgcagctaacaacacgagtaatcaaataatcaatagaacttctgatggtagaaatatattctcctacaatgagaaacaaaaaccattatatccaaaaacttggttcaagtgctcgtagaaaaggtagacatacttaaaagttgaagatatatcttctacactaattaggtaccctaaagctcccatgtcactaactagaaatatttgaccattgattaggtgagttattctgtcatggctcttaatcatattaggattttgtgttaaatacaaatatgccattggagatattacaaactctttaatttttattgtcatggtgtcttttaatttttgtaaaaatttaataagtatatgacattctgaacccccacttttcaatcttactattgtttaattttaaaattcaaaattagcaagctattgtagatttgtagagtcaataggaaatgagcctaacttagtgagtggtagtacacattagcccataaccagatacccaccttttgtcctaaaacctttttcttacacggggcaattcaagaaccagaggaagccacattttccggacaccgtggtgacgagccgagtgacagaaaaagagcaagaatgttgatcagaaggccgggcgcaccacctgcgcggaatctcatcaccgggcatcgatccattatcctctgcagcgtccgcgtcggcggttggcctctccgcgtcaagacaagcccatgcgacggccggcgcctttttgccatgtgccaccctccccgccctgcccgccgcggcgtgggatcgatcgatcgatcgatctcgtcgtctcctattctcctctgctttccttcgacgcgcggtcggtcggtcggtgcccactcccaagtcccaatcaccaattcacctcaccggcgcgcggcgcgccgcgtgcttcaccggttggaccccctgctgccacggcaaacggcccgcccggtgcatatgcgcgctcgcgcgcgcgggggcgcggggtggcggatcggttggttccatccacccgtcgcaccagtgcaccaccggcgcgggcgggccgggtgcgcctgctgctccacgccacacccacacatgtttcccgagcactttttctcgcgcctctctgctccgtggtactgtgccacacatctcgtcacctcgagctcctttttctggctttctttggtgccgttttccctgcgtgctcgtcaccaccttccgtggcacgcgacgccgacggctgtggctccgcatagcagccgcctgtacgcgcgccgcacacggactaaccgcgtcaaattgcaggaaccggggctgcgttgcgtaataatctcgctggctctcgccgccatctttggtgtacgtgtgggcggcgaactagtacgtctctcaccgtcaccaacgccaagacgcgcacacaaaccatgcccgcccgtccctaccatgtactgtatagatcgtgtgggctaacacgtccggttttccgttctttccagggtcgcaccatcccgctgaccgtgacgcgaccaatcctagtttctttcgctgcttaattcggttttgtccacttgccctggttgccttctcgtcagctactagctactagctagagaaacttaagtgcgattttgagggagagaatagtggagactaaaacaagtgcaatgtcggattcaggcaaactcggtacaaccactgaaccgcacgaccggtggacgcgatgaccgccacggaagttcttttaaaatcttgatatggtctccggcattttgagtacccgaggatatgacctaccaggatgcagagtcaagatccactgagtctgaaccttgaagacttttttattttagattggcacacgaaaggtgagcgacctttctgatgtcattccatcgattactgctgagaaaaaaaagaacatccctaaacacagaaattagaacagttcgtagtttagggtgccctgttgcaaaagtaatgaacgacagacacagaaaagtagtaaccgataagcctgatagatatagctagctagcagtatggatggagcagcacaaatggatcatggatgtcatctttaaaggagctagatctctgcctcacgtagcagtagctggccctaaatcctaatgcaccatatgttcacaccccaactagacgtgtgtgtaccaattcctcccggaacaatcctgtccagtggtactgaaaatgatagccatgtactacatgaagaggtaccacacgtatatacataatacttccatgtgatcaggctggcctttagctaagctctagccaatctgcaccaaccacaccttagcttgtcccggaatatccagcaatgcaaaatccaatctatccgaaagccatgagagtatgagaccaacttaatactaatggcctatacctgcataatcaaaagaagttcattaggatcagagctagcttacggatcacagtgacacatgtgccaatgagaggaggtatattgcacgaacgttgatcggtgcctgggccccactatgctttcttctactccaccactacagtaggtgataggtgacaggccgggtgtttgagtgttaaaaactgttaatgtgttaatgaggtgaggccacggtactaggcatgggaacggtaggttcccgtcgctgtaaaactttggtgattcatggtctctccacctactgtggcttttactacctagcactagctagatggaaatttagtatgttgctgctgtattttggcaatgtaaactaaattgtagattggtgaagagatcagttttgcttttttaggtgaggaagagatcaatagataactctttacgatggaccattttccgaccaatcctcatcttagcaaacctggttttacactcttgcaagtaacttctatgttacaatagttggtgcttgcttcctgcttccaccatattatgaattctatggggttggtatgaaactgtccatttgtgtcatggacccatggtcgcctggccagacaacagaaaccaacggcaagggattcaggtgtccgtggttgatgttgccgaggggcaatggctaacgtgcgtgcatctttttatgcccgaaatgccggtaggcttatcatggggcgagtttctgtgttcccagttgattgctagaatatttggcttttgaggtgaaatgtactgagatggaatctgatgccagacagaaacccatattttggtgaagttgtttagcatcgtattctcccttcgtttcctaagatatttccatgggccgtcagtgttttatatatcagatcgacaatattttagaatggtaatagtgcaagaaccgatattatagtctatttataaagattgacagtggattcatatctggttattcggttttgttttgtgcttttatagcataaccagatctagtttgtactgtagcagctaacaagtgggtctagccagatttattgttgcagcatctgggtgtttcctaaatactttttttttctgaaaaggatcgtacatattttaataaccattggaaatataagtaactcgaatctaaattttccaccgatcttaaagttattttcatcataatctttcgtacaactgaaaagctctgtatacatatattgaagtcaaaatgattgcgccaggttgccaacaccatttaatctgatgttcttttgcatgacaacaatgtagtaggaaagatagattttttaaataagtaggattaagtgttgctttcctccctgcagcttatgatcctcgtggacgatgctggcgcgtttcttccagcaattaatcactcgccatgggacggtgtaaccctggctgatttcgtcatgccctttttccttttcattgttggagtcgctctagctctagcgtacaaggtacaggatgacaaggctaagatcgtgatatttaacttcctttctgaaactaacaccgtaccagtgacacttatctgaaacctaattgcgtcacgttgtgcagagagtgccaaacaaattggaggcaaccagaaaagcaattctccgtgcactgaagctgttttgtgttggtcttgttcttcaaggtatcagttaggaaattcatgaaagctactagctacaattattgtaggaaaatatgtatttaactttctcttgcttctatattatgcaggtggattttttcatggtgttcgtagtctaactttcggaattgatatggaaaaaatacggttgatgggtatactacaggtatacggcacacgccattttataccaccaacactttctccatcaagaataaaaattatagtatataatgacgtatcttcgtggttgcagagaattgcaatagcttacattgtgaccgcgctatgtgaaatttggctcaagggagatgatgacgtagattctggatttgatctgctaaagagaaaccgttatcaactgtgagtataaaaaccaaaaccggtctaatttttttgtgctattgttcttcacgttgatgagaaattagtcctcttattcaccttaaaatatcgtccacttttgtatttccaggttcattggcctgatcgtcatgatcacatacatgggcttcttgtatggtacctacgttcctgactgggagtatcggatatccgttcctggttccacagagaaatctttctttgtaagtgacactccacctttatcttatacagtacaagtggatcaattactactaacaaggatgggaactgatgaattttaaattcaaaatctttatcaggtgaaatgcagcgtaagaggcgacactggaccaggctgcaatgctgttggcatgatagaccgcaaaatcttgggcattcaacatctgtactgtcgaccggtttacgcccgatcaaaggtactaatgaaaagcaacagcttgaatctgtgtgttcttcctcatgtacaaattcggtccataataacaactgctctctcctttgacagcaatgcagtataaattcaccacaaaatggaccacttcgtcctgatgctccttcatggtgccaggccccttttgatcctgaagggcttctcaggtcactggacccttgccatcataataaatctgtctttaactatctttcaggctacaacagtacaacatttcctttgcaaactttgctaaattctcactgttctttcttgattctcgtatcagctctgtgatggctatcgtcacctgcttgattggtctacaatacgggcatgtaatcgtacatttccaggtacagtagttcgctgatatgtcagattgatgagcgtttgattttgcagtccacattgaaaatactctgaacttctctctgttctgaatcgatttgcagaaacacaaggagagaatcatgaaatggctaatcccctccttcagcatgctaatccttgcgttctcattggacttctttggtaagtaatacattgtaatcttcaacatttcattcctaatcatcaggagcgtttgaactgaccgttatgctgatgaacctctccaggaatgcatatgaacaagccactgtacaccgtgagctacgccctcgccaccgccggcgccgcgggcctcctgttcgccggaatctacgcgctggtcgacatgtacggccaccggcggccgaccgccgtcatggagtggatggggacgcacgcgctcatgatctacgtcctgatcgcgtgcaacatcctgcccatcttcatccacggcttctactggagggagcccaagaacaaccttgtaagttttgctgcaacactgacgatgaacatcattttccagatagatttcactgcaaaataacatctcttctaacacggctacctggctggctccattttgcgcagttgaggttaatcggagttggggcatgatccatggatgcagcagctagaagcctagaaggcacgtatagaggcgtatttaggacactatttggacagagacaaacgagacatgtgcaggcctagttttgctacaggcttagttattgttgcacagattcgttctctctgagagctctttgtatatggtaaacaacgagcctgtgtatatcatgacaatacgatctaaaagaaatatatagtacagaaaaaattttcagctgcacagtttaaatatgaagagctgcatgacactacctccatatttaaatatgtaaaacaatgctgatttttatcggtctttgttatacaattttgacaactatttttctattaaaacatactaatattttataattttatgttttttaagagttattaatggttaaagttttaaaattttgactgaataaagtcaacggagtaagactttttagtcaggataaaatctgtttattgactatggccctgtttctttcagctttggattattataatctagattattaagttagattactataagctagattgttataatctgtagtagaataagcggttagctgtttctttcctagattattggatttgcaagtctaaagagggagtgggatggcatggtgggtaatttttcacccaataatctggaaaaggctcacctaaatgagcttatcggattataataagctactttaataatttttctgtttctttcagcttactctcaataatctggattaataatcccaaagctgaaagaaacagggccagggagcttctgcagttttttttttagaaaaaaaaaacattcagcctttaattgatgagggcgatattttggtccaggacgtgtgggctatgaaagtatgaatcctcgtttcagtcaaggcaaatgctagccgaatagtagcccaacataaaaaaagtccagttggctagtttgggccaaaattaactcacaaatatctctgttactaattttactgttaccttcgtgttgaaatataagagattttacctatttactacccaattaaaatcccttatgttttattttaggatggggtggtaactaccttaggacgggggtagtatgcgtagcctttacggcctggaattactgacttgtacaaaatgtcaaacgcatacaattgtacacaagtatacttctctaatatgtgctgtgatacaccatttacaccgatcgtaagccgcggcagcacataaaaaagtccattttttctgacacataaaaaaatcattcatattttttttgatggaataagaatgtaatcttgctcataacgaaaatgagactctcggccgagcagaggttcctcgcgcgcgacgagacgacggtggctttagctaaagctagctatcggcgagcgcgatgagctggtcgacgacgcctggttcggcgagcgtgctggtgtcgccgagctcgtccagctgcctggacgcgatcttccgcaggatcctccgcatgatcttgccgctccgcgtcttcgggagccccggcgcccagtggatcttgtccggcgccgcgaacgccccaatctgccacaagaaacaagtgaaggtattatgcatcatcaggtgaaaactccacagttgaaaacagtagttgacgtgtgcgcgtcttccacggggaaaacggctgagagcaatgcagcaggagaacaacactgtatcaccatcagtgtaaagtctgaagaaaatacctggctgcgaacagtcataacgaggcttttccgtagctcatcgctgtaaggaacaccgtccaccaatgtcacgaaagcgtaaattccctggcctttaacctgaaacgggcattgctgatttaagacctggtttttcgtggaactaggggagagggtgcagaaacatggagccaacacaaaggagcaagatgtaggtatagggatgaacctcatggtcaattccaacaacagcggcctcggcgcattttggatgtgaaaccagagcagactcaacctctgctgtcccaatccggtggccgctatgatttttttcagagaagggtcaattacttatagcttgatttttttttctgagaaaactaagcattgaattgaaatcaagaataagcatgaatagaataggttgctgaattacctgacattgataacatcgtcaacccgtccagtcagaaaatggtatccatctttgtccctggcattcaaattacatttgccagtgtgtaaacatccggtaattctgcaaagctgtatattccactcattgaagaactatttgattgagttacctgctgcaaccatcaccggagaagtaatagccagcaaatggcttgaagtatgtggtttcatatctgtccttgtctccataaagtgtccggaaagccccaggccatgacttctttatgcaaaggtatccgctgcattctccttccatttccttccctttctcatctactattactggctgtcaatcacgtgcacagtaattacaacataagagaggtgattgaaatagtataacaaactcacttcaagtaaaaaatgtataccaaaggtcagtcattgtatacctgtacaccgaagaaaggaaatgtcgcagatccgggtttcagaggccaagcgccaggtaaaggagtgatctgacagaaataaacattgaatttcaatttgattcatcagatgcaactcactttagaatcaccgaatttctcactagatatgtaaagacacaattaccataaaaccaccagtttcagtctgccaccaagtgtctgatattgggcatcttgcatcaccaataatatcatagaaccatctgaaatgaacaaaagagaatgtaagaccttttgagtatattataatttttgacccaggaatcatcacaaacctccaagcagtgggattgattggctcgcctacgcttcctagaactcgaagagatttacgagaataccgagtaacatactgcaaatacatcagaaaatcataaaggatacacaatgagccatgaacataaactgaaacaaagcaaacatcagttataaatttcactctggaagaaatgttcttgtgcagttatttttaaaaacagtcttttgaaacttgatgaaaatttgatcaaaggcgctctgattcaaatgtggtggaatgtgtgaaggaaataaacaggacatgtggttcaatatttgtttgattttttcccttgaaaagtaactaggttcaagatgtatcttcgggttgtttctttataatcttatcacaatgccataatattacataaataattgctggatggcaacagtcatgggtagtaataacacaaaaaattaagaagtgtacctcggtaccatcacgcatgagtgcacgaataagtgttggtgcagtataaaatatcgtcaccccgtatttgtcaacaacgtcccaacaacgactaggatcaggatagtttggagcctacaagtagcatcagcaaaggcattgcaaattacaaacatggcaggactaaaactagtccgaaagacacacaattgttatttattgtgattctaggcataatatcaattaaaaagttctctgaaattaccccttcgtaaacaagaactgtggctccattcaggagaggaccatatgtcacataactatgcccagtaatccacccacagtctgcagtgcacctgatgcaagtcaaacagggaaatctaataagaaataatgcagcttgcagaaaatttcctattaacattaggaacaagtttatactacccaaagatgctaaaaaactagcatcataccagtatatatctgatggcttgtaatcaaatgcgtgcttaaatgttgttgcagagtacaccatatagcctcccgttgtatgcaatacaccctgcagacctcacaatatgttaatgtttggccataggataggctaacaaagtaacaaaccatgtggtttagggtacctttggctttcctgtgctaccacttgtatatagaagaaacaatggatcctctgcatctacccattccacatcacattttgttggaaaattgggcacaacatcctgggggacgcacatcatctcaaattttagtgatataacatgaaatggaggacttaaaaagaaatcttccaaataacacagctgttctgcagatgttctgttcctacttcctaacacatatgacgtggcgtggtactttttggatagcattgaagttgtttgttttgggcgtacctgccaccaaacgtctctgcctgacgtccattttgtgtcttctctcttcattgccgactgattttcgtatgtcaaagaaatgcctgctcagcacaacaaagataagcatgaggaaactcctcaagaactgtatccacaattacagagggattctcagcatgacatcagacgaggctaatttaggcagtgaccaactcatagaagtcagattgtacatacctacatcgactccattcttcgcactgtcagccagcgacacatctactatatctttgagagctatgagtttctttccccttttcaccgcgttgcacgtaatcacaaccttaggcttgcagtcaatgattctttgtgctagtgcgtcagcagagaagccagcaaacacaacctgaacacaattcggcatcacaatatgaaatggaacttcattaaaaaagacacatgacaattagcatcttaaactgctgtgacaattaccgaatgaacagcgccaatccgagcacacgcgagcatcgcaatgggcagctccatcagcatcggcaggtagatcaccacggcatcacccttcccgacgccgacgctcttcaggtaatttgccagctgccatgccacagattcacacgatcacaccacaacaatttagcacaggacaccaaaatcaacctcactttatacgacgccacggaggcattacgtgcaaatgtttcggcgtatctacgataggagcgcgtgtgatctttacctggcaaaccttgttcaggagctcggagtaggtgagcttcgcgtcctggccgggctcgttcccttcccagtacatcgctatcttctcgccgtcgccagcctccacgttgcggtccaccgcattgtagcatatattggtcttgccccctttgaaccactgcaaacaaattcttagattactctcgtggctctcatggcaatcgagcatcggattcagacaattgttcatcatcagtcgagaaaagtgacagtactagcttacttcgatcttgatcggccccttggtgacatccagattctcggtgcagacctcgtcagggttccacttgtgcttccagtagaacgtctccgcgatctccgaccagaacccggccggatcgtcgatcgaacgtcggtacatttcttggtactgatcgccggccatgtgcaaaaacacccggaacactcgtcacaaccaagaaccaaatcgagtaatcgataaattcacagtgaccaaattgttgcaagaaaatggggaatttaaccctggcaacccagggtttactacgactgcgccgtcgctgtctgccactcttgccttatctgcgcctctgcggccagcgatggatggatcgctgcgcgcctcaaattgaaggtacggcctttgaacgcgcgatgcgccgccagttcgagggggagagcgaattgacagcaaccgagaggaaatcggcaaagcagtaagaaaagcagagaggcgtgtatcggcgatcacctgctgcgtggaggagacgagggcctgggaggcgaagtccgtgctggggtggacgaggccgtggtcgtcggacgccgccaccggctcgcccagcacggccgccgcggcggcggagggcctcctcgcccgcggcttgccgttaccgctcgccgccgccgccaccgcggcgtgatcgctcgcgcccatcgcccaccctcctcgccggagcagcggcggcgaagtcacggacatcacccaaggtagagccgcagcggatgcctgagcctgcgcgggaagcgggatcgcagcgcgggcgcgtgcgcagccgcagctggcgtatatatgcagctgggccatgacggccacggctcacctccccctccccctgcccgcgcgcgctccaagcctccaacaacaacaaacacctttctgactttgctgccggcttcagctggtggaggatgcaaatcaggcgggatggtggtgggttgcggagaaacgaaggccccccctctctctctacactctacgtatctctcttgggtttctcctcgtctttctttcttctggtcgtacctggacgttggagctgacgagctgtgccgctagagctggacctcgcggcgtgacgctgtcgcgcgcccggtgacggaaacggagggggagacgagacgagacgcgcgcgggggccgtggccgtggccgtttatatgcaacgcgtggcgctcggaggcgtggcgatcgaggagggcctcagaaattttttgtcacgtttggttgcgttgcgtggacgaccgacgagggggtggacgaccgaccgggggcggggggacgaccgaacgggtggacaggattcgtgtggtttttgacttgggactcaccgcggcggatgccgttaaacacgagcgaacccgactggggttcacatcgtctgcctttcgggctgacggcaaacattgccgttgcatgcatctgtaccgcacattctttcattaacggttgtatatagtggtcctaccacagagattaaactagatgcggctttgccgcataatagaccagccaggatgaaatactccatccgtttcatattgatcatcatttaacacaaattgaaattttcaaattgatcatcatgttatcatagccccttcgtttgacgtgtaatattattgcatttaagcatgaaaattgagtatgcatgcatgtatgtaggaattcgaggtagtaaagctatcgtttcttagagcaagtttaataagatagtcaaccactgactccaaatcatctatagtcaatttagtaggaaattcatatactcctataaacattactacacaatttatacttggtcgcacctgtcatacacacatgtatctgggagtctgtactacagctggctacaaatctatagcccactgctcttctctcttctgttttatctcctcaaaatgtgtcaataactggacctgctcttatgtatggggcctaagaggagttaaagtgtgcatgtttcttgatttttccctaccacatactcacattaaatgaaatataggaaagttaatccttttttttcttggtgaaaaagttatatggtaatgaatatggaatggagggagtaaatgatatggtatgataagtagacttaatttctttatctatttaatgcctgaaattatggaaactatgcccttttattcatatattaatttaaagcagcgagacattgaattcatagacataagttggaagtcgaatatatgcgcacaaattccaaattccaatgaaaccaaagtaatgaaactacttactcccttcttctaaaagtctaaaacttattccattcttaggtttttccaaaagtttaagtcctatttatagtcattatgtgttaaattaaattattgatcagaacccaataaactattttattacttattggttgcatgtttattgcttttgtcacattgtaaataaattaattactccttggtcttggtgccaaaagaaataatccctccgtcccaaaaagactcaattcctgagtttttatgtctaacgtttgaccgttcgtcttatttgaaaaaaaatataaaaaaaaatttaaaagataagtcatgcataaagtactattcatgttttatcatctaacaataataaaaatagtaatcataaaaaattttcatataagacggacggtcaaacgttaggcacgaaaacccaagaattaagtccttttgggatggagagagtaggtcttacttttggatggagggagtattttcattttatctcctggcggagctaaaaagatttttttgagcccaagcaaactatacttcttgtatttgttatataaatttcatcatcaattcattcaataacatataaatttaatggagtttttgtcagtgagcttgcgcggccgcttgcgatagccaggtgtggcttcacccctgcctccacatgtctataaaaatcaagaaaatcctttttttaaaaataatttatcttcttattctttaaacataacgttctaaaagtgcataacattaaaaaattctatttgcacaataaagaagggtaaggaattaattatttgtttgaaaatttggaattgcgttgagctcaagctaaagcaaaagatactggtgcctccttattctcttctactacttaattatatcctgaatactccatcaaaaaattatatcctggataaatgattacaaagagtccttatctgcccattgcaacttgtatgtgcagccgaactgtggtctccaccgtttggcttattttctaataagccaaaacggcttattagaaaataaaaataaatttgtagataaaacttttataaatgtgttcttggtgacttaaaaaccaatgttgaaaaagaaactatgttgaaaatatctcaaaatcaatctcaaaattaagcttgaaaatttaaaatttggctttttctttggctgattaggccatctgatgggagcctgtaagtgtcaactgagagcacaatcaaatcaaatgatataataatatctttagtttttctcacctacactatttgaatgtaatgttcactgtttttttcatttagatggcaacgtcatgcaaaaaacagagccgtccgtctgtacattgatctagcgttcttagagcaggtacaatagcagactataagctagctatagacacatttcaagaatatataataggagagagaagagcagcgggctataaatttgtagccagttgtagcatgaactctaagatacttgtgtgtatgacaggtgggaccaactatgaattgtgtagtatacgtttataggtactattgtatgaatcggctattaaattgactatagataatttggagccaattgttggctatactattaaacttgctcttacgttgtcttcagttgcaggcttgcagctaaataaagtcttttttttgtccttcccagtccctagtccctgctcctagtcgtcgacgactccgctgctctccagtctccattcctcaatctgcttcttgctcctcggcgtctccatcttcgccgcggtgccgctgctacaacggacagtatatggcctcctttgcaggaagttcgatggcgcatgcgtctacaagatcaaagtagcgccgtcaacatgagcgaggagaagtctgcgatgcgctccctgtcctccacctcctgcaatccctcctgctcctcgggccgttggcgggtggttcaccgcggcgtcatagccatgacgtgtaggtgacagaggatccgacgtgacgccatcgctcacccgtgcacgccgcctcctctcctccgctagctagcgccccctcccttctcctgatccggcctccgggtcgacggccaccaccgccgctcttctcttcattgggctcaacggatcttgccgaagtttgtatcggcgacggctatcgcgtgcttgaggtgactcctgcagcatggcgacagccccgtgcgtcaaggaagggcagcagcatggcggcagggagcgcaagggagggcgaggtggccgggcggtggtgaagaagacgagcccgcgccttgagggaggacatgagcgggtggtccgctgcggcgcgcgggtggtggaggatccggtgggcggtgaggcgtgcatcgggaggagggatgggtggattaggggtcgagcgcttttgcgagaaaaaatcaagcttcgttagtccatcacagcgaactttcggggagaaagaagacacgtggcagattttcggggaggagaagcttaatttataggacgccacgtggctcaatctctaaccagggatagagccctgaaatcggtattagagattagagacctactaatcggtattattagttatttctctccaaaacaaaattaagcaaatagaatcctcttttatacgaagagactacaataatctacaggcctagaacaagctcggtatatctttaattattttaggtgggttcttcctaatacataaccgtaaattttctaaaaaaaggaaattaaaatgaaaaaaacagaaaaatctagacatttctcatattacaatttaaaaatacatataggaatctagacatttttcaacgcaaaagagctacgtcaatatattactgcacttaaaattttatacagccgtaacttaccgattagtgacctctaattaatctctctggtagggccacttcatacaaccattgatggaagaacgtgtggtacagatgcatgcaacggcaatgtttgccgtcagccccaaaggcagacgatgtgaacccgactgcgtgagatacggagacgggcgtgtgcgcccgcttcgctgggttttgtcgcgagcgccctgccgttttggtggcgcgtgcgtgcgtgcgtcctcgatcgtggcattcgtcgtcactgacgtaaacgtttgccacttgtctagaacgcgaagtaaagaattcgtagttctcctgctgcttttgagttctcggcttttctcgcggctcgaccgaggcagtggatccgcagtttttttttaaaaaaaacgtatggagtttgttaatccgcgatccttggaacggccacagacctgagcacgaagtttaaagtgttgacatgatcaaggattcaaggggctcctctgaagccgtggcaccgggccgcgcatacggtgtgtacccaacctgtgtgcgactcgagggaaaagaaaacccacggcacaaacggctttcctgcacggtccctagtgtaccagcttctgacagtaatggcacgtacagtaggcaccaacgcatgcggcgatgatggagcccgcgcggtcggtcggatcaggacatgaacacgtgtaggacactccctgtgctgtgtgcggctgtgactgtgcgtgcgcccacgggtatcttctccgaatcgtgcagtcgcggagtcgtcgtaggctagtagcaggtggcctcccttcccggcacacgctgcaacctgcgaaatacgcgatgcgatcaattccatttccatctcgcttcgcctcgcgcgcggccgggccacttgcggccttgcgggatctaatctttcccttccccgtgtgtacccgcgcacacaaacttggtggcggcgtccgctagctgctctgcccccggagactccactccctgtgtcggaagacgccgtcgcgaatttggcttcgcgatccagcgcagtacgtagtgccgcgaaggcagtcagggcccccagccgcttgcgtgaaaagttagaaacgaaataagctaagtactctagtactattataccagtatataggcagcaggattgtcacgtcgaaaaaagaaactggcgagattgatcagggagggatggtgcactgggcttgtcacgtgaggaacacataaatcgaatcgatccccttcagctatatacttaagttgtttattacgtatgttagtgataggctgatagccacttcttgatgtgtgagtgtgaccagttagatcttttctcaccaactagttgcagtcagctagcagtgctgatggtgctaacgttgaaaattggagaatatctacctccctgattttcgtttgtgagatgaacatttagatgtctagttttccaggtaggaccatatttttagcatgcatggggatagagtttgcaagcgtgtgacttcacgttcgaatcttgatgtatactttcactttctcagtgatgcactccagtaggaattctttaaggttaacaatggtgtgctagtggtctccgtctgttaagcatgcgcatgggtttttaatcttgtaaacagcgttgggccgaaggatgtgtgctgagtgccatttcatagaggaataagtctattttgactctctcatagttcttttaaaaaaaagactctcatgtctggcttccgattaaatcatctccctcaactgtataaccgggtataacgcttcacccatcttccaaagccggtacaaatagactcattcggtggttttataagcggtttctgctgacgtagtatattgcctgcggttgactcgttaagccaaaatatgggacccacacgtcactttcctctattcccctcctctctatcttcctctctcctctcctttccacctctcccctgaggccgatggcacaaccacaaagtccacaacatccctcgccgccccatcatctgtgccactgccggtcctccatgccgcgtgcacgacgccggccataccttgcggacctctccacgcctaaaatctcctcctccccccagcgttgttgccaacactgattccttgccactagtttgttatcactccaccaattccttcgacgtgttcctgtaggggcggtcagccggaggggcgtgtgcagtgatgggtaggatcaaaacagctagtgaggtcactctctgcccagatccgaggacgatcggcccaccgtgaggtccccgatttgcgcacacgctaagaacatgatgggcacgatgccgtcatccaccatggtgaagaacagtagaacggcctcgtcctagaacccgtgcctcgcgtgggtggtcaccatggttgtggaggaaatgatgtaccagtcgaccaaaggacacaaacatggcttcacccaagaacctgtgcctcacacggtcaccatggccgtgcaagaaacaacgtcccgtccgggcggaaacccgtagaagagcgcctgcgggaggcaagctcacaacgagtactcctcgaggctagccatgagcagcgtcatggtcaacatgtgccacgccaacctcgtagtccattgcaccaccacctccaagctcctacgccgccgcatcatccatccagttcatctgttgacaaccagatggctttgccgaaggagcgaacggcaggatgcactcctggacgcactccttggtgggttctaacagctttgccaccatcaatgggttcttgttgtgtgccacctctggtggcctccttagcatccaagatggtagcgaccctctaggacttcctttgcgcaccgcctcaccactgtcagccacgtccttcggcgattcagtttgtcttgcctccgctactgcttgtgaggagagagagagagagagaggcggggaaggagaaaatgaactgacatgtggggccacctgtagaaaccgcttcgcaaaccgcacaggttttctaatatggggtatacactatacccgatttatagttgagggaagcgattcgatccaagggtaagggatgaggcaggtataatagacttttatagatgggacttgttctagcgtgacaagtctatgggcccaaaattctttgctattatttggcctagcccagtccatctacaaacttagcatctagcccagctttctttagtcctttcggcccaaatatacagacgagttgggcctttagtccttcgtgtcctttgtcttatctcgtatagtcgtatgccctccggcgctgcatttcgtcacatgttttattcacaagaaagatggcagccaatcagtagcgtggacgtgtggcgtgtcttttcgcttggacgatactggggagcgtaatgctccactattacggacggcaccgttgtaataaaattgtaatgtgccaatccggcaccgcatccaaaaagaaaaggtagatatcggccgcacaacatatcctgcacgtcattgttcgccgtttcttgctttgcaccgtcgaatagatcgtacatttcgtgggatggcgccgcatctctctgcacttctgcaggacttagaggggagaaaacccacaccaacccacatctgtagccgcccacatgctggtaacatgtcaaagtgcgcacctacacaggctctgatcgactacagtggcgcagccactactacagcaccgctacaagatcatgcgatcgagcagtatgttttctcggtccaaacaatataataggcattaccgatttgaaaatatggcacacgacatgtgtttcttttaattaatcgcatcccaaaacctcactagtttaacccccagctgctgcattgtcccacccaaaacgctctccactctccactattcacagtccatctaagggcatgacaaacaatggtaaaaaatcagcgtcaaagactcagtatggaatagtagattattgagcaaattgttgttgtggattacctacttaattatagatccaagataaattatttttttagacctagaagataaattaattttttagaccaagaagataaattaaatattttgataaataaaattaaacaaatattttttataaaaatggtgcaagcaatacaatagaagaaagtattttgagaagatatattttttgaaacatggagcaaacaatccgtttcaacaattcagtaaataatctgaaaagaactaagcataagagaaaatagtacatatgaaatatcaactacttttccaataccgacacaccgagtgcaatttttacaatgtggagcaaaaagagagagaatattgtcgtttattgattaacaaatggtccaataaatatcttaatgccatctacaacattcaatagatcaagaaaccaacatgaaattggacccaccatcattatcccagcggagctgccaacaccgtcgttgatctcccttagcttgttgccgtcatctcccttgagacgcagccattgtctatctccctcgtcatactggtggggcaacaggtcctcgtccagatccgaagaagggcccccataatgcgtgctctctttctgtgcacaccaggagaggggacgtgaactgttggcacttgctgttcaagctgtggcggtggaggcatggaggatgcgtgatactagagaaagagcgagagggaaatggggagaacaagagacaaagagatagatcaagacttcaaaagatgattttggttgagtcaaccttaaaagagtcgatcgactgaatttgctcgatatctctatctatgtcggttcatataaaaaaccggtactgatgtttcacatatcaaatagtattttactgaaccagtatcgatattattagtgttagtttttttaataaaccgattctgataaaatgttattagcgtcagttcttgcctacagaggatgagggttggatgggtggacgggagacattcactatcagttccgggttgcatagtgcattacaattatactattatgttgtaagtagcggttagtagttgcatttgatcgaaaattctacaagatttaagattttttttttcgcgaacgcgcaaaaggattacacgtcaatatattagaagaatagaattttgatacacgacgcactcagccagaccggcctatgacaaggaaggaagaaaaataaagataaaaaacaaagaaaggaaaggaactcgaaacgacggtaactctactccaaacagcgagagggggcagagccactctacgctctcaacaattccccaaaggaagcgacagccgctaatgaccacatccggcctctgaaaggatggactctaggaccactgcgaccaaagagagcacagagtcaaaaaccctggagttacgtttcttccacagttgccatgagactaggaggactacggagtcgaagctggcacagagatgatcaggtaaacaagccctagaagatggccaccaatcctgtagccagctgccacggaggggagagagggcagcccagccagtagacgacaacacccgtaaccagacctgatgagcgaacacgcagtcaaggaggatgtggttcgccgtctcaagctcttgagcgcaaaaggggcaggccgagtggctatcaatgccgcgcttctggaggagatcagccgtccaacagcgctactgaaatgcaaaccagaggaagaatttgcacttagcagggcccttcgcgtgccagagaagatcggcacaagcaaaggagtgctggccaaagaagaacgcctggtacgccgaacgcgccgagtagcgctagtcactcgtccaacgccagaaaagacgatccccgacacccggcgtaagttgaatgtggagcaccgcatcccaaacaagaagaaattgggagatgaccgggacaatgagggcgccgcggatgtcagaaatccaggcgttgtttgctaggccagaagcaaccttgcgcgaaccatgcagacgcgggggcacagcgaagaggagatccggagccaaggaagctaccgagcggccacagatcgattggtcagaccagaaaagaatcgactcaccatcacctggtacgaagaaggtggacgcctcaaacatgtcagagacggctcgctcggctggggccttcaggctatcccagtagggatgccctgagcgttggagccaaagccagcgaacacgcagggaaaaacctgccaacctaaggtcaggaattcccaacccaccgaaagctctgggacgacagacattcgtccaagaaacccgacactgcccaccgtgagccgagtccgtgcccgtccacaagaaggcacgatgcttcttgtcaatggccttgatcacccaggctagaaggccgatcgccatagacacatggaccggaatggaggagataatagattggaccaaaacagagcggccggccatagtggtgagtcgtcccttccagggaggaagacgatgggaaaccttatccacaagcggctgcagggccgccttcggcaacttgtgaacggatagcggaatgccgagataagaacaaggaaaatcagagatcgagtaggaaaagcaggactgaactagctccaggtcttcagccgaacagcggatcggagtaaccgaacacttggcaaagttggtgcgaagtccggacggtacaccaaagacagagaggatatcctatgtagtcccttgatttattgcaccctattttcatttgaattttcatttgaagtggcgtttgaatatataagagcgtacggaagcaccatggcaacaacatggatgaatccttcgccgatcgatctctccagtcgatccatccgtgcacatgtcataacctaaatcctcacggcaaccgagctcaaactctgagacaaaggaaaaaagagcgaccgagtgtgtaaaacaaacacgacacgtccttccgaccttctcccgacgccacagcacaacacaccctttgcgcgactcccctacccatccacctcacccggccacacgtgtcacgccctcccgcacgtgccgcgcgccccccgacccgcctatatacgtgcaccccatcccgagctcacctctactccagcctcgtgtcagtgtcgtggcgtgtgcaagtgcaagctagtcgcagctcgcgcgcggctcgtggacagttgaggcagatagctctaggctctagcccagccatggctgcaccggtcaccttcgccgtggtcgcggcggtggcgctcgtcgcgctgtgcggcggcggcggcgcgcgggcgcaggacatggacaacgagtgggcgcggaacagggggttctacggcggcaccggcggcggcgtggtcggcggtctgctgccgcagtcggacgtggacctgctggagttcccgctgaacctggagtacctggaggcggagttcttctgctggtcggcgctgggctacggcctcgacggcatcgatgccagcctcaccggcggcggccctgcccccgtcggtgcccagaccgccgccctcacccccttcgtccgcgacatcgccacccaattctgctaccaagaagtcggccacctcaggtaaaaacagcggagatgcaaacgtagctcgatcgaaccggtgttccacaagcgtttgatcgattttgtgttaatttgatcgtacgtgcctgcagggagatcaagcagaacgtgaaggggttcccgcggccgctgctggacatcagcgcggcgaacttcggcaagatcgtggagacggcgatgaacacgacgctggacccgcccttcaacccctacgagaacagcctcaacttcctcctcgcctcctacatcatcccctacgtcggcctcaccggctacgtcggcgccaaccccaggctcctcacccctcaggccaggaaggtaaagctgcacacaccccgatcgacacacgcgcatggcacatgatcactctaccaccatcgatcacgcacacagcatgtacgtgcagctggtggcggggctgttgggcgtggagtcggcgcaggacgcggtgatcagggcgctgctgtacgagcacgggctgtcgcgggtggcgagctacggcgtcggggtggcggagctcacggcgcacatctccgagctgcggaacgtgctggggaggaagggggtcaaggacgaggggctggtggtggcgccggggcaggggccggaggggcagaccgtgggcaacatcatcgccggcgaccgcttctcgctcgcctacgaccgcacgcccgaggagatcctcggcgtcgtgtacggctccggcgaccccgccaaggccggcgggttcttcccccagggcgccgacggccgcatcgccagagccttcatcgcctagcaagccggccgaccgatggaagaaaaaggacatagatacatcggaacacatataactcatgttcttgcaagctgtagactatctatacaccttacatgtgtgtcagtgtgtgttttgttatagaacttgcatggataaattggggagtgtatacatgcatactggatggtaatatcaataataaataaaggagacatttacaaatttgtcattatgtaagaatgctactcgagtaatagttctagtggtaattttatactcctacttcctaaattgatcatcatgtaatggaattcaaattttcttaaattgatcattatataaccgcatgtaatggaatgcaaattttcttaaattgatcattatataaccgcatggatacggatttcaacataatacaattaatacagcagggaagaatttatgtatgctaaggtgtactattttacgacttcctttacgagcacggagggagtaattggcaacaatgttttgatcgatacatgcattgtgagagaatatgtgcatgttgtcttgattgatgcgatttaaattattcttggtatatatgatgctcattttaggaacgaggaagtaattttctagtgacaatcaaaccaatgataaatttgtaattgtaattttcccttaataaatgggacaatttgctaacaaatttgatagctagacacatactattttctttctattcttttagccgtttctgatgttaagcctaacgttctgcagtgcccttccgacattggagttcgatggatcaagccatcggagaaatgaaagaagacgaagccgcaaagggcgaaaattgggcctgttgtagtgttgtgcgattggcccaatttaaatgggccgcacgtagccctcaatcccgtttggaataagttcactttgggtccctctatttgtcgcccagtccgattttcgtcccttggccgcaaaaccgggtacgacttatccctcaacttacgaaaaccgggtaaacgaggtttctcggcggttttgaaggcagttttggctgacgtggcttgtttgactaggtctttgtcccacatggtattgacgtggcgcttacgtggcaattacatctcgggaaaaaaaagcgtggtcccacatgtcagctgcacacaaaaatatttttaaaatggtggggcccacgtgggccccacatgtcaacctcacacctctcttcttccctctcccttctctctcttcttccttccccctctctctctctccttcccgggctgccgacgacgcgggtggtcggcggagcaggcgagctccggtggcggcggcgggcatggtcggcgccgccccttgaccgaagcacgttggaggcagaaaaggtttcgagggaggagcagttggagattgcgtcgggggcgggccatggctggagggggaggttgtctatgctgagatactgcagtgaggtgaggccaaggaggaagtcgggtggtagggaggtgaaggcgttgccgtcaagggcgaggcgggtgagggaggccatcccggcgagggaagggacggcgccggcgagcgcgtttccctggagctgcagcgcggtgagcgaggtgagggaggagagcgtgggcgggagcgtgccggcgagcaccctgttggcgaggttgagctccgtcaccttccccgacccgccccgttcacaggtgacagcctcgaagccgcacacgttgtcgccatcccaccctagggccgggaccgacttggctaggtcgtggatggcgtccgcttcggaagccaactcagcgacgtcggcggcgcgctatgatgaggaggagggtgagggttaggaggtgggggatttggggcggagagagagagagagagagagagagagagagagggtagtttgggaaggaggaagggttggtttggccgattccgacgtcgcggtgctcgccgactccgaccgcccggcgcgcgcacttctccggtcacccgccgccaacgccgcgctgtccgcggcgctccggtcgggggcggcaccgaccacgcccgccgccgccgccggagctcgcctactccgccgcccacccacgccgtcggcagcccgggtaggggagagagagaggagggaaaggaagaagagagaagggagagggaataagagaggtgtgaggttgacatgcggggcccacgtgggccccaccatttaaaaaatatttttgtgtacagctgacatgtgggaccacgctttttattatttttccgagatataattgccacgtaagcgccacgtcaatgccacgtgggacgaagaccaagtcgaataagttacgtaagcgccacgtaagccaaaaccgccttcaaaaccaccgagggatctcgtttgcccggttttcctaagttgagggacgggtcgtacccggttttgtacccggttttgcggtcaagggacgaaaatcggactgggcgacaaataaagggacccaaagtgaacttattccatcccgtttggacttccgacaactaaacaggctgcacataatgggtaaaagtctactttacatccctcctattgtcgtcgagtttcagaattgtcgctgaacccgaataccatatataatgcatcccagatctttgcaaaaccgtttaaataagatccttcggcagtatgaattcgctaacgtaacaaattgactcggttcactcacgctaagtacacgcttacatggcaaaagcaaatatggcccacatgtcatcatctcctctcttctctccatcttcttccacgcaccctggctggcactgcttgacactgcggaataattaattatttaccactcttacatgtggtgataaaagatttgtcactgaacccacatttcatagacacataagggctcatatgttatagacagcgagtgacaaataattaattgttacatcttaaaagtggcaaaaagttaaatgtccccgacaccgcgcttgtggacatcacttggcttctccgcatctcctagctgcactccggcggcgatgatgatgacgacgacctgcgcgggccccccaacgtcgcgcggaggagagcctcgtagcgtcgtgccttcgcaacatgttctagacgttgggggcgtgcttcctgaggttgaggatggcctcctggaaggtgccatacatgtcggcgaagacgaagaagccgtcgagaagggaggaggcggtagatgagctagtggtttgggcgacacgcttcttcgggaggaggagcaggttggcaagcgcggcgtggagcgcgtggaggtgggcgaggcctgcggggcggtacggccgtgttggagagccagaagagaactgttgtgatgatggcatggaggtgggagagcaacgggtcggagcgacaaaggaagttgtccgagtagccaaggagctacgaggcagcgaccgtgcagcggccgacgaagttgcagaggaggaagcccgagtcgtttgctgacgggccaatggtctctacttccccaccgctaccacaccggccttcctcttcctaccccattccagtaagctgcttgccgacctccttcatcgcctttgtcaggcatgtcacacgttgatcgccatctcctcgccccatgattgactatcgagccacaacccgggtctcctcccagtgtgcgccgcctggctgcttgtgctgcatctagtccccttgctacaatcggtgttgacgtgtgcgccgcatcgagccggcctgctatcctcaactccgactagtgaggcagtgaccacaccgatgatttcctccagatgcgacgaagctcgacaacactatgccgagctccaactgtcgtgttgtttgcaggccaccaccctcgcccgacagcgccggtgttgaaacaggagcagaaggaaactaggcccgtgattgggtgaaatctgccgcatcatcaatgatcttcggcaacagtagctacgggaaggcagcagcagctgcagtgactggtcgatgaggagggggtggtggggagagataccaggaagaatattgttttaatgatacgtgggtctcacgtggttttgattttttttttaatttttgcttttagtaccacgtcactcaaaaccatcatctatactgccttggacccaaagtgacccggttttgaatattaggaatgcaacatatttggtattctagtttatgaatgattttgaaactcgacgatgaggagggcctcacgtgaactttttgccacgtaatctgtaatagtaccactccgggccaacaataacgggccgcgcatcatccgtaatccctttccagccctgtagttgttagtgggccgtacgcccccctgaaccccattggggccgaatataatggtctgcacatcttgaacctcgttctttgagagtttattaccgctatgtacccattcatgcactgatagaaaagatcctactactcggctcactagtattcatgtatgaatccagccacccaggcctgcaatgatcaacgattgttcttctgccctcaggaacagccacaactcttacagtctcgcgttactctcttacgtttcgagacgtatcttggtcgcttttgttgcgttgttatcatctttcgttttgatttatggacagctcctgccagaaaccagagttgctggcttctagaatagcaaaggcagcggcacgcacggaccaagccagcgattgattgtctgatgagcaaagcaaaggctggaagtgcatttcccctcatatgaacagggcattttcttcaatcagggaaaaactttcaggacaagtagtaggcttgacttggtcactttgttcgggtacaagatgctcacattgaaaagtcgatctctgaaggactgaaagcgaccaacgcgtagaagagagattctctaggaggaagaagcaacgatgcggctttgttggtaagagctgcctgctatgcaagccttcagaaaccacgcaagagggaagtggttcttagttctattgattgacagtttttctccccagagggcatatgctggattgaactatgtaatcaagtattcaagttgtcaaccattcagttacagtactccctccgtattttaatgtatgacgccgttg

SEQ ID NO: 1590 - DNA, 1897 bp, Oryza sativa
aaaatctatcagcatatcaacaaaaaaaaaatctttgcaacagcatattgagtattgttaatcttctattaccacttcatgcatgttctggacagctctaatctcttgccagtactcatctggtgattttgagagaatagagcattgttcctccttcttccttttaaatgattccatcctagctctactgccagcttcatcaattagatcaatggccttatcgggaagatgtctgtcagcaatatatcttgctgacaaataaactgctgcattgatgctttccaaagtgtatttgcatttgtgataggtctcatacttctcacgcagaccaagtaatatcttcacagcatcctcctgcagagagttcaagagaattgaaataatgatcaagtggaaggtaaccccaagagcagagagttcaagagatttgaaataatgatcaagtgaaaggtatccccaagagcagagagttcaagagattgagataatgattaagtgaaaggtaaccctaagagacaagtgatttctgaaattgaaatttgtattacctggctaggctcattcaccaaaacaggctgaaatcggcgagccaaagccttatccttatcaaaatgcaatcggtgttcatccagagttgtagatgcaatacactgcgaaaaaaatacatcacaatagggaaaggacaaataaacttggttccttttatagtagagaacactttgcactcaattgcagatgaccaaaaataatccattatacttcacagcgggtgttgtccatacagatcatgtccatgatattaatgaacattttagagactagacatccttcttcaaaggaatatccctcaagtgcacatggaaggacatcaagagtgtgtgtagcagtactgaaagggtcagttaaatactgaagccctagcaccaagtgttacttggatatattgcaacttattttaacaaaaagaattgaatatagataggatgtgcataagtattgttgtatgtcaacaggttgcaggtagagtggtattcataatacttcaatgatacaaataatggaacacatgtatggcatatttaactttatttttaagggattacctattgaattatatttatctattattttctgtttggaaactgcactaaattagccattccacaccactagataaatagatattcacctagacagtaggtaaaatgatgcaaacccaggcaccaattgctgctaatccagaaaagaatcaagtagttttgagaaacaaaatgggcaacatggattgagggatgccttttcatgacatatacctgcaattctcctctagccagtgcaggcttcagcaaattcgcaatatcaagaccagctcctttgcttcctcttccagcaatcccagacccaataagagtatggacttcatcaatgaacagtataacatcacctgcatgaaactttggagctctttgaagattgaagaccaagaacggaagttttggatcttgtaatgcatcaagtcagaatgtcagataacctgctttgcgcacttcacgtattaaactagtaactctggcttccagttcacccctctctttagcaccagccattagtagagcaacatccaatgataatatacgctttccctacataaccatgtcaatgaatggtaattatcaggtattaagtacaatcgagcaagcaaaattatgcaaccaacatgattgtatccatctcttgtagctaaaacttaccacgaggaaaataggaacatctccattggcaattttatgggccaaaccctcagcaatggcagtcttaccaacacctgcttcgcccaaaagaattggattgtttttcgtgcggcggcatataatctgaactactctttcaatctcat

SEQ ID NO: 1591 - DNA, 2649 bp, Oryza sativa
cctattatggaaaaacaacttagcaaagcttcataagaaactatgctcaggtataggctaaaatgtagaacaatccaggtgtaacatgatttaattaaagaccaagactaagaaaacagttggggaatcaagaggttcatctcatctttaggtcttgtttccctttccttttctgaagaataccccaacactacaaatggtcgtgcactaaagaaaaaaaaagtacttgcatttctgtgcagaattagataaataaacaagttaagctaatgtgctggcacagatcagctcttcaactccttgcttatttagaagccttccctttatttatcagtatatatatgtatcatactgccctttaaattatgataatttagtctttattctgaaactttaggaccatgtgagcaaaactatatgtcatgaggttacctataagtttttggatactgtgagcaaaaaaggtcagcatagttagtccctggaggaatgacacatgagtcatggctggtatgtttaaatctttgattctatgaaaccttagcatcatttggtaaaacctggttgatgtcaaagtttaaagcagagcaaagtcaacatgtttgtcaccttctgcaattctttggaccaaggtgttcagtcaagcatttcttaggaagagaatttagcagaaagtcagaaactcatatggatgtgttatgtcaatgctattcaaaacactacatgagctcaaagttgtgtattcttctacaaagaaaaagattgcatcatcaaaatatgcctggataataataagatgtttgtttgggaataaattctgaatgtaaccattaggaaatagaccgatatgaagtaaaacacaattgagaagcaaataattgacttgatgaacctgcacatacatcttataaaagaacacgacattttcacccgaattggccaatggaaggcaatgaatagcaataattgataatacttcattgcaaactgcccttagttcatcctctactttctttttgtagccatttattgttacacctggttggtcaccagctgtcaccttctgctcaagtgattcaaggattctccatgatgctctcctggcaccaatagttttcttaaaaccaactgaaaataaaagcctctcttcagcactcatatccacatccatcctagcaagtgtcttcataaattccaccatatctgcaggaacaatcatgcattgagtgaagagtcacttcaacgaaacaaggagaacaaaatatgtgtatagaacataattgatctggttgcgtcatgaaaactctaagcagaactgaaagatctgttatgcagcagaacagattcagttattaagacatgctacttcagaagccaagatcaaggcaacagagttgcaggaaactgagtcaagcattatgttgcctaccacttcaagtggggatatggaagccaagaaggctaccagaacctctatgcactatgaaagtggtctatgaattagaaagacttttttgtgttttgagccaagacgctaggagccaacaaaatggctgacaagttcagatcaacaatcatacagaacatagtggcatatatactactaagttacaacagatatgaccatctaaatatctaattgtggacatattatccaaaggtgccccccaaattatgggcaaagggcatttcaaatagtctaaagttatttagttctagcaaagagggatgataaatcaaaccacactagtacactactttatgcactgctaaacctcttttaacctaaaataaaaatgtgaaccgaaatggtgggttccacaagttccacatattccagtagatcatgtagttaggtcataaagaaatggatagaaatctctaactgtttacccatcctcataacagaaaatgtgtcatccatgattccaaagatattccctttttttcctcagaagaaaaccaaaacgcaacagaaagcgactaaggagcacccaaatcatagagttggcccccacaaaccatcacaaacatacgagcaacaataattacaaatcatccaagatatcattcatgatctcactatccccttttcaagaaccactcaaaccccacaaactggcagctaaatatcatggaaaagcaatatttttcatcaaaacatgttcatatcgcactggatacattcactcaaattggctcagagtaataatcaagaagcagccttttcgggtcaaactgctatacatccaaacattctgctcatagattttcttttgacgcaaacataatgtgcgcaatgcccggcctccgctgttcaaccaagcgaccaaaagcaaaatcatagggcagcaatcccagaagtcacaaatgaatcaagaaccccacaaatccttcctatacttaaccaagaacagggtcagcgagatttccccccaacccccaaatgcaaagaaccaagaacaagaactgcacaacagcaacgcgcaatcgaacaatccagcaatccgagatcccatcccagccataccgtcgtatctctccgcctgctcggcgagcttggccagtcgcaccaccttctccctctccttcatcttcttcacttcccagcaatggatttgtctgcagcagcagcgcttgatggcttct

SEQ ID NO: 1592 - DNA, 681 bp, Oryza sativa
atactaaatgtaagttgctgcctcaattcatcagatgatgagggatcctaacggacatgccagttcttccagttctgccaaatgtcctatcaccatctgtccaattaacgccgagggaatttggtctattcttctttcagttctgtaggatcgaatcataagaactaagccaaccagagggcggtgaatagttgatatacccaaaaaccgaaaacttttagcggaaataaaagttaccctcaaaatcaatgaaatcggtctgaccgcgcctattccgctggtctgaccggtgtagatcgctcgtcctgaacgtcccgaagtcgcctctgcctgtcgacaccgccgccggtctgaccgccctgatgcgccagtctgaccaccgataaatcgccgtttagaccgccgaaacccggtgaaacacaaatcgaagaaccctcaaagtagatgacaactttattgcttctctctatgtttacaaagtgcaccaacagcactccttacaaaaatctcgactaaactcgaaaccctaactaaactagcaactcaattgctctaaaaagcaataccgggaagcctcacgctccccctctatttatacatgaggtaagcagcctaaagccacgaaccaactcatactaagagtcctaaacaccttaggaaaccctctagtacaataaacaa

SEQ ID NO: 1593 - DNA, 683 bp, Oryza sativa
atatggtaacgccgcttcggtcggcgagcgtaattaacgcgcgcacgatacaatccatttcgattgccacaaccgcatatccactcaatgcgccgtaagcgggcgaatgggattagtggaagcgtgggcacgggaaacgagggagcgagatagcgagatacgagggagcgaggtagtgggcgcgagaaacgaggagtcaggcccagcgatggcaagggtataaaagcatcgagaaaaggatttgcttccttcctttcgccattgttcctcttgccttcgccacctgagctctaactctttctctgctacgccctactttcgccacacgcgctcgttctcaatcatctcttcctccgccgccatggcacggggctctgctctgctcgacggcagtgtactaccgccttcccgcatcgtgaatgagaggcacgccggactgccgcgccgcttcatgccggagtccgccaccggtcgggagatagtgatgctgggcgaggggcgcccggcaccagactacccggggcggtccatcttcttcctccccttcgcgatggctgggctggtcccgccatttcctcatttcttcatggatgtcctggagttctatgacctccagatggcgcacctcacccccaatgcggtgatgacattggccatcttcgcgcatctgtgcgagatgttca

SEQ ID NO: 1594 - DNA, 737 bp, Oryza sativa
aattcctgcagcccgtaaaattttaaaccctgtcacatcaaatatttggacgtatacatagagtattaaatatagacgaaaaaataactaactacacatattacgtgtaaattacgagacgaatcttttaagcctaattgcgttataatttgataatatggtgctacagtaaacatttgctaatgacagattaattaggcttaataaattcatctcgcgatttacagaaggattctgtaatttgttttattattaaactatgtttaatactttaaatgtgtatctatatatccgatgtgacacaccaaaactttacgcattgaatctgaacccagcctaaatacagccgtagtacatgaggatgagagagagagacgacgatcgatcgacttggtgcacatgcacgaaaacgagaacgagagagaaaactgatcgactcgaaaacctgcagtccgtgtttaaatttccccggcccctgctgtgttgcgcaggcaatagggcaagttgtgcgacgatcgacgacgatagatggcgaaatggaaaaaccattcatttccactttaatcctttgtttctgcatcagtggcagagagggggtgggggatgcagctagtagtactgtagtatgctcccatcggatggcctattcacctttaaaaaaaaggcaaaatttgaattttcaaacttaattttgatattttcaacgtagtttcttttttagcattggcttctaagtc

SEQ ID NO: 1595 - DNA, 32568 bp, Oryza sativa
  unsure (1)..(32568): unsure at all n locations
cacctctagcaagcttttctaaagattgggacattggggtgtttgaatgaacaaaatttgttcttcatatatatagcactaattatggtacttaagtgattaatcagttttgacttttcttgattatattttattattttctgttccttccttgaacagtttactcttgtcaactaaagaaagataaacgaaaacagttaatgactaacgccccattagttgccctactaagtcaaaacaaaagttaatttgaattttcaaaatcaattttgaagttgatttgaaaatattttcaacatagtttttttttcagtattagcttttaacccgctaaaaacacatctataaaagtattgtctaagaattaaattttattatataataaatcgttttaacttattaaggaatatggaatcgatgaggacctaggaaatggaactggagacagggattgaacactaatcaatcctatccatctgcttgacctgtcattttgtttgtgtttcaaagctcactttttaaattatcttcttccttttctccatgcacagctatcactttgatgatgaccacagagggtagcattgccaccttttgtcacctctcaatttcttaatccatggaaaggtggcctagtccatcatgcagtttgctttcagcaatactctacctctggtaactcccttagctggccaagagattaggattaattaatttcgtaatgtggtgaatggttttttctaatcaatcatggccccatattttacaacaaacatggtgcacgtgttaggcgatggtttaacaggtgttgatctcaacaataaaggagaacattgggaccaaaggaaactaggaatcactggcttttcttctgttttaggactatagttcaaaagccgtctggcccatatcttgctcttttgtatctaattttgtaaatgtaggtgtttcattgtcattggttggacaagtcctttttttccttttgattgagtaagatgtttagtcatgactgacagcgtgacataaattaaatattttaaaatataacttgacaaatagtttaaaataagtggtctaacaaagcaatgcagaagaagaattttttttaaggaaatgaaagtttggaagcgtggaccaaataatccacagcaatagcccaataaaaataagttgaaatcaacgagaacactatttccagattacttgtgaagtcctctgatgttatttacgattagggatattcaacttaagtttctttctcatcatctaaatgaacatatgcttctttcaaactgcataaaccattcagcattcagctttctagatggcagagtgacatccatcattgtgtcaaatttattatttcttccatctcaagaaaatattgttgcctttaacatttaaaatttaccctaaaatatgtaaatagctacttcgcatattctctcatctcaactaactacaaccatcaaaataaaaaactaattacaaccatattatatttttttgtctattagtttttttcagctaatcataatattcacctttctatcaaaaaataaaaatagaacataaactttccatttaaatttatcgccctctccttaatcccttaaaagtttaaagatagctacattctacaaatataagctttacaagtatttaaaatttgttcacaaatataatgattcaatgagtaccacttacccctcgatctcacttctcatttaagttttttcatcttgttttcaactactatatctcattaaatgaggaatataaaagtattttctgatcaactttaatctttgttagagaatatagaaactttaaatttaagaatggagatagtaataaaactatacggcttcataattgtcaacattaatcgtccacctatatatggaggttatgccggtgttcaaagtcgcacgaagcatgactacgtggctagtcctagtgttgacagaaatttcatacaagtactacttttaataattaatcatgcatagtcacacgtacggtgtgctaagtgctttttatgagaaaatactccaaatactccctccgtcctataatataagagcaggtataatagcaggctattaaccagttataaacatattttaatgagatagacgatgagagagaagagcagcgggctacagatttatagctagctgcaacacggactccaagacaaaatgtatgtatgacaggtggaactgtatattaatagtatagtaaacaactattgtatgaattgactatagatgaattggagatagtagtgagctatactattgaacttgctctaagggattttgagtttttttttgcttatactgtttgaccacttgtcttattcaaaaaatttgtgtaaatataaaaaacgaaaatttgtgcttaacgtactttggataataaagcaagtcaaaaaaataaataataattctaaaaaatttttaaataagatgagtgatcaaagagtgaaaaaaaacttaaaatcccttatattatgggatggagggagtaagtatataggagccacatgaagatcttttgagaggacacgtaccttgtgggatatcttggcaggagagatggaagaagcacaagtgtccttcatgctgacccctactccatagagggtagccaagagcttggctgagtcactgcctcagcgggaggaggggttgggaaccgcaaaacaaaacacctattattattatatgattaattaagtatttactaatttttttaaaaaaatagattaatatgatttttttaagcaactttcatatataattttttttataaaaaatgtattgtttagcagtttgaaaagcgtgcgcgcgaaaaacggggagggaggttgggaaagggaggtaacgagcttaccatacccaagccaatcacacggtcacaccgtccccaacacagcctcgtcctggaattttttttcgagtaaagtccatcaccggtctctaaacttgtaccgttgtgtcatttcggtccctaaactcgcaaatcgaccgttcaggtcctcaaacttgttcgactgtgtcatcccgatccctaaactttcatatcactcatttaggtcctccaacttgttcagttgtgttaccccggtatctaaacttggatttgaatatcatctgggtcaaataggacggtctaaagactttatatttaaaataattcataactttttcatgtgaactttaataaagacaaactttatatcaaacttgtagccctcaacgcgatctataactttgtagttgatttttttattttaagtcattttttgtctgaaaatgtaattttaaaattaaaatttccaaatctataaacatgcaacaatattttgggaccctaaacagtttaaattcaaaaacttttcaactacaaagttgtaggtcgtgtcaagggctacaattttgatataaaatttgtctccattagagttcacatgaaaaaattatgaattattttttatataaagtttttagaccatcctgtttagagaccagggtgacacaactggacaagttggaggacttaaacgagtgatttgcaagtttaagaaccgggatgatacagtcgaacaagtttggggacctgaacggtcgatttgaaagtttatggaccgagatgacacagcggtacaaaatttaaggaccggtggaccggtgatggactttactctttttttttatgggccctgttcaatccatcgtcagaaaatattggtgaaattaaaacttgacaataccaaaatttcgacgaattcaagatgtgagagtgatgttcagtttgataccttaccaatttttttattgttttgtgaaaaagaagttcaaataccaaatgttggtaggaattgacaatattgtaatggtgaggtcttgtttagtttgttaccttactgagatgtggtaatgctaagtttggtaaggttaattttggtaataaactaacaagctttatattttagttttaagaatgaattcctttctcagcacctagagtcggtgccagcgtcattaatgttgagccgttggaccttaacgttagattcactgacgctaagtaaaagatagtacatttctacaattataaaatatataaggtttctaaaagaacggaaatggaaaaatgcggcatctctggtcggccaagtatcctctgccataaagatattgcttaatagtcagaggtggatctaagcctagggcaccttaaccgtggcccaaagcctaagattaccatgtaatcaccatacaaaacccaacttctctatgagttggtacaagtctttggatcaagtctttggatcaattctgaatccgtccttgttacttatatgcaggttctatttttctattggttcatatgtctataataacactatcattacatacaatgatactatcttatatacaattttttttagataacacattggctccggtcctggacacaaatacaaaagtatcaagacagcaagcttttaaagtttgcatgtcgtaatcttaaaacaactgtcatgcaactttttgtcaacttccgatgaagatcacaaataggatctaataattatgtactctttatcttgtgttggtggttattagtttgtgtttacttcatgatctggactatttttataagttttctttgaattgtgcgcgctttaagtgaattggtataataatcggctataactcgttaagcaaagaccgatatgatactctatttcattattaaaaaagatgtgaatcccacttagccaggggcagccaggattataccgaaagtagaacttaatcactagattataaactctttaaacaaattttaataagaaaattagtaaattccttgtatttttttctgctccgctagcctagacacgcgcgccgccgcggacacacgtacgcgtcggccacacgcgcgcggcggatatttgttgggtttgaataatggccaatcatgacttgccctgcatgcatgccatacacatacaggtacagcgnnnncgcacgcggatggatgatggatatatgcaggcaggcgcgcggcgcggctggtggatcatcgatcaggttccatgcatccgaagagagatcgatcagctttgcccctacgccgcgtcgcgggggtcctgcaaaaattaacaacgaggagacggccgctggctacctcatgctcatgggacgtgctcgtctctcggctgatgcgattagccgagttcgttagtacagggtacagatttccaaccgggtacgcgtggaaaacggaacggtctattagcacgtgattaattaagtattagctaatttttttaaaaaaaatggattgatttgattttttaagcaactttcgtatagaaacttttttgcaaaaaaacacactgtttagcagtttaaaaagcatacgcgcggaaaacgagggagatgggttaggaaaaggaggttgttcccaaccgaaacagtacgtacggaaaacaaaacggtccattactacgtgattaattaagtattagctattttttaaaaaagatagattaatttgattttttaagtaactttcgtacagaaacattttataaaaacgcaaagcgcgtgtataaaagatgaggggagagggggttggcttgtgcactgtgcagaacccacccataatctccgtttcttatcccgtgtataactaactacagggtactttgtcccaagagaatgtcaggtacacggagagacgtaccaaaaaaaacacccgaaaagaagaaaacatccgacctgccgggattcgaaccagcgacctaaggattatctgcaacgtactacagttatagtctaatcaattataactgtgaagatctgtttttttccaagaggttttgaggtttcaaatgagccaaatcttgggtgcaatctttgtgcgacatgtaataagcacagtccggatacacatgtacatacaaccacttgtttgacaaaagaaaaaaaaaatttgtaaatagaacagcccgtttcgacataagcgaacatgtacatacaagtagccttgttttcagaaaaccaaatgagctgaaagtttttatacataaatacaagaggtcaaccagacatatatgagccttgttttcagaagagaacgaatgagctgagcctttcagatgcacaacacgcctgactagatcgacgcatctaccaatatgtatccaattcttgtttcctgtcgatgtagaacagatagcaagtttagcaacaggcatattttttgcaacatggaagttccaaacgggtccttcgattcagaattgtgtactccagtatggcgtgtgtagacagttaatttactccatcttcagcttaagaacaagcttgttcggatgttcagcaatccggttccgcagatcttccttgagcctgtcatcactggaaccatgctcgtccttgtccagccgcactgacagcgactccaggtagcggtgacacgagacggcagaacacagctcctggatgtttttccagttgatgcctgaaaccccaagcttgcgcagctgcgtgagattcttgagctctttcaggaaggccttgccacctgcgacgccgacattgacgacgcccagcgtgtgcaatgccgtcagctcctcgatccccctgggcacctcaataccagagcaaggatcaccagcatgcctgcctctgcacagatcaggcagccaggatagcaaagcatgtgttgacctgcattttggttgtgtctctgtctcagcagctgctaggcttgcagatgtgccttcttcacccaatgtgactttggtgccaccacgaatgtactgcagcttatgcagcttgacgatgactgttggcaatctgacaatagaggtgtgcctgatatccagggtctgcagctgcctcaggccacccaaggagtctggcaagcggctgaccattttgcatcctcgtaaggaaaggaacttcagacgaggcaggcttacgacacgctcgaggtcgtcatttgttacatctgatgcattctccagatccagcactcgaagaagcttcatattgtcagagatgaagaatgattcccatttcccaaacactgtcagagaccgtagccgggagaagtcgatgctcatgaacacgatcttgtccctctcccaggtgctccctatgacaaggtgccgtcccgtgcgttggctggtcaggctgcagcgcccctgcagtgagaagatgtggttgtcgtccatttgctgcgacatgatgtactcatggaagaaactgttcacctcgcaccagactattctgttgccgctccgtgaggtctgctgcataatgctcaggccaaccagctttgcgaataacgtctagccattctcctctgcgctattgttggcagtgtccctggagtagccctcggcgatccaccgtcttatcaaacgcctccgccgaatgcttctgtctcgaggaaaaattgacaggtagaagatacatggcttgagggaatccggggaattgtgaaagtaggattgcatccaagcaaatagaccccgcaaactttcaaatcctgggttagtctgtaactcgtgcataaacttcttattgaatctcctccatagcacggcatgtttactccgggtggccataaagcgacctatagcaactattactttaggaagtccaccacacttctttatgatgagctttgcttcatcaatcatctcgggagtcagatcaatgttctgtttgtaaagcaggcggtcctggccatgcttctttagtaaaggagatatttcttcagtcatcccgggagtattcgccttacctaacataagccttaactctgtatcactcatgcaatgtgcagatccgtacacctattttcaaatatttcaagaattacatgtcattttttcagaattatcatcaatttgcacgtgttaagatgtgattattaatatccgttacaattggatttagatgttgcaaacaaaattgattatttgctgctaaatcacaatataccaggataccactcaaataagcaagaaggggaagagtaaatttcaaaaaagtgatactttgaccaaattgttgcaaaactacaaatttaaggtgatgtatcacaaaactatagatttaacaataagttcatcacaaaaactatatgtctaaggctaagtaccacaaaactacagatttaataataaaattatcacaaaacaaaaaattttagggtttaaatccttagcactaatgttatgttggagttataaaatgtccaagttttgttattaaattaaccctaaacttgtagttttgtgaaaactttgttactaaattggtagttttgcgatacttcaccttaaatctgtagttttgtgataaattttgtgttaaaatctatagatttttgaaacatcatctgtagttttgcgatagtttggtcaatatgtctatagttttgtgaaatttgctcaaaagagaaatatgacactgactaactacctagcatgtcttgtttgatccacaatgtaccactcttccattgcttccttcaaattaatgttttttaacatggataggacaaatactccctctgattcatattataagtcattttgaagtttgacttggaaaaatatcaaagcaacttacaatatgaatcataggaagtatttgttctatccatgttacaaaaaattaatttatagaaaaatatatcaacatttttaacacaaaacaaatatattatcaaaatatattaaatgttagttctaatgaaactaatttggtgtggtagatgttgcccaatttttctataaaccttatcaaacttaaagaagtttaactaggaaaaaaagtcaaaacgatttataatatgaaacggagagagtgctatactagataatgtttccaatattaagcgatagaaatagctatgtcgccaaataatccattattatctgagggcctcgaaattaccacattattcaagaaaatctatgtcgttcgtcgacatgatgcatccaaattataggggtgcaaagcgattgatatagttttatacataatacaattgctcaaaatgattcaaagcttgggattcccatttttggctagcattcttaaatttaggaactactttcaattggggtcttctcagttcaaggatgattctcagattatatttttggaagatatttacctaggaaatagcctgctaaaaacacagttgccaacattgcttaacatattactccctctatcccaaaatttaaggcacgaccgcttttctcccatgtctcataatataaggcatgcatgcatgcatgcattaactatcatctctaaattggtttattttaaatcctctatcatcaatcctccaattatattgcttgcatgtatggaggtgatacaatcaatgagctaattaaattatttcttggtctttgtgttaggagtagttgagccttaggtctcctttaatggttgagctagtgcactagctcatgcttgtccaccttatacaagagatagcaaaaagtctacctttccaataggttgtctcatagcacattgttcaaaatgctttgggttacacaatccctctcacattttctttaggagcttagctcttgaagaagagatagtgcattctctctccttatcttctttctcttccacatcatacaaaagctgatgtggagatttatgagctagctgacttatccttgttggaggaggccttatattttgggatggagggagtagaaagaagcatgcaacagagggcaagttcatgcgttcaatcctgcttaatgtctcctttcgtagagctctaacaaggaataactttattgcttggaacaacttggtggcctgccttatgaatgtttgattgtcacaaaagagagatccatttaaacagaaccttcatcagaatggtcaattttgcattctctgtatgatgttcttcctagcactagtatcccaggcacaaacagactgctgtggaagttaaaagttccactcaagatcaaagttttacgtagtatttacatcatgatgatgtgttgacaaaagataagcttgcaaaaagaaagtggggaggaactaaaagttcatgacaaggagactgtaaagttttttttttatggtcaccatgctcactttgtttggcatgtggtacaaccatacaagtgcattttgattaataataggctatgtcatcattgagttaatttagcttgttatagcacttttatcattctcacagttggtactcttgtacacatatggaactagctaagtagcaagattgcagaaacaagggcaagataacgcacctcttttatgaacagataaagggccgcatcggcttttagaccattgacgttaaacacgaaattgtcttctactgcacaatgtctagcgacactttcttcatttgtaatgacaatgataaaactttctgaatttccagatagtaaggtagattttatcaagtcccattcttctgtggactgcaggccatcaataacaatgaggaatttgtgcttgtgtagaagcttatgacactcctgaattgggtctttggtcctgaacatatcaatgtccttttcccctaaccataagaaacatctgccgttttgatgcaaatccaagagtaaactgcaagccaagtcccttaaattgaatggatgggatacattgacccaaccatacatctcaaattgatcatgtgagttgtagatagttcttacaaaagttgatttcccaacaccagcaatcccccacacagagatcactccaaacctgaattcacctctacttcgaaaaattgcctcagttattaaaaacaacagctgtttattacactcccgaaggcgtgtaaacatgtcatccaagacaaggcctgtttttgcatagaaagaggaaatatcatcctgtcttagtccatccttcattaataaccaatcaattaatatatcattattacagccgaaagtcttttcatctttacttctgctgtcacgataagatccctgcaaataagaaacagttagggggaggggggagcaggatgcaccacacatgaagtagtagatgccagagggtaatcacctgaaaggaggccaaacaaaacaagacggcatgcaaatgattttggcattacttaattcttcaaaagaaacttactaaaaggatttttaccaagaatatgagggtcaaagaaataagtttctagatcttcacagaatgtgaatactaaaaattaatgtttctaggttttcacaacatttatgtttttccaaaaataaatgcctcagttgtgagactcgctgaaactaatactaagcttgttggtattcgtttggaactttaatataacctcctaaactcctggaaatctacaggttgttgatacacatttcaaactaactagtattttacctgaaactttggaggcatttgaaaggcaaatctatctattatatactaaaagttcaacaaaattcatacaaacgctcctagaccgccatgtggcacttgtcgatgaaatgggaactagggtagccctttccctgggaccctagggtcattttcacattagtaccaataaaatgataggcttaaaactatcattagttttaagggacccgggtcctggcctaacccggacctgggggccacttcttatatgccaccctagggccattttcacattagcaccaataaaatgataggcttaaaactataattagttttaagggacccgggtcctggcctaacccagacctggggcgacttcttatatgccgcgtagcctcctttagggcatgaaagcgtataagacacacgtcttaagatggtaggccaaaggccagcctgggtcgtggccttgttctggggctcggccccgcctttgccctcgtaggtcacacgttcctcagtaagaggagcatcgagacatacaagatatgcatcttagaatacaagcggaggcaagcctgggtaccggccctgtcccaggacctaggcctgcctttgctcctgtaagtcacacgttcttcggtaaagaagagcgtggagacaggtcaaggtcttcctcggtcccgaccctgcctcgggacccgagttcacccttgtccttataggaaacatattcctcggtaagaggagtgtggagacctacacaatgtatctcttaggatgacaagctgaggtctgcctcagccccggccctgtctcgggacccatgtctgcctttgctcttgcaagtcacacattctttggtaagaagagtgttgagacctacaaaacatatcttaagattataggccagggtttgcctcggccccggccctgttctgggacccaggcttacccttgcccttgtaagtcacacattcctcaataagaggagtgtggagacctacaagatgtatatctctagatgataggctaaggattttctcggtcccgactctgttccgggacccgggcctgcctttgcccttgtaggtcacacttttttcgataagaagagcattgatgcctacaaaacataccttaaaattacaagccaaggactgcctccgtcccggccctacctaggacccgggttcccccttgcccttgtaaatcatacgttcttcgacaagaagagcgtcgagacgtacaagatatatatctaacccaacttctcttcatcaaagacacctttgaggaactacctctcaaaagggcgcaggggcatgaccgttaggcgtcgagcatcacgatctgacccctccgccagttgcaagccagtatgcatggctttagatgaagcataaccattaaggaagttgtcggttgcacaaagtcaaggtgaaaagacgggggtgctgagtcagacgcgttcacgcgtggcaggacgcgcgtcgtgctcgcccaacgccacccgacctcgctagttgtgcaaaaagggggtaccgtggcgctacctcagccaggtttgggggggtcccgggtccaccacaggacacatggtgggcagggtgatccccaactggctcaagccggtgcccgaagagcccgagacagcataaataaagtaagattctgaagctgaccaactggcaacgacaagacaacaacaagatgggtagttaagaaatgttgaaaatggcattgtgagccccttccttgagctataaaaggaaggggacacgccatggagaggggagggaattttttttaaaacttagaatctgatagcttgtacctgtctcaactcacacaaagaaccaaaacacatgagtaggtttttacacctccagatggcctgaacctgtataaacacttgtgtcaatttcttacttgatgatcgaccgggagagcccgggtcccttcgtgttccacacgacacatcgctctcgtcatgtgcaaggacaatcttccttgggtcaaaccgtctttttcacatcactgggaagggggtctctcttttcccagctaccggtggagtgatccccgacaacactgctataaacgctcctaggtcgtcatgtggcgctataataaatcgtagaaattctaagaaaaaaacatctaaccgtcaattttcatttaatctggtaggaccattatttttaactattagatctatcttaaaaattaccaattaaatttctctcaaaaaaaccacatcgctacgcgtacggtacataggtatgtacgtacgtatccccaaacccatatcccccaatcctcaagaaaagtacgtacatacttccttttcttttttctttctcgcttagattagttgaaaaatcaaactaataattcaagcctactttaactatgcttgaagtagtaaaaatatatgttatttcaagttgtattcttgctaggcgcatctcatcaaaacatccatgaaaaatataaataaataaaagttgtagattatataattgtatacacttaagaacaagtatagttaaattagacttgtattttcaaaaataaaaacaactccaattatgagtggcattctcaaaatttactcgctgcctactataaaaaatactaacatgtcaaaatgacattactaaatttatcatgaacgtattttgatgtactatgtattttctctattcatatattgttaaataaaataacaatcaaatatattcttttacaccgtgtcgatgccctttatctcctgcttaggcttcattcgatctagctcattggctgcgcttatctagggcacgcaaaacgacacgtcatcaatgaaagattaattaagtattaaatattacaaacttgaaaaatgggtttatttgatttgtttaaaaaaaaagcttttgatagaaaatatatgcaaaacatgcaccgtttagttgttcgaaaaacatgctcaccataaatggagtagccaatcggataagcactttagaactcacctttatgtactaaaatgcttaatatgtagtatataatatactttgtcaattaggaatagccaaatatatcaatcatatgttcctactaatcccatgtatataagttctatatacaagccactattcaccaatcatcaaatcatattgcttacaaggcattcatgagcggtgcacctaataattagttgatatccaatgtgcacatgtgtcatcaattaccgaagataaaggacaatactaagtgggcaacaatcaacagatgataggcaagtagagatactaccaagccacaacaaacaatagttaactacaagtatattgcgactatgagtaataacgttcctacacacctatatacactactaagatgccacgtgacgctctaataaattagaaaaaatctaacaaaagttacaagaaaaaagaaaaacaagtagacatcagtttatacttaaatcagtggatccattatttccaatcattaggttaaatctattaaaataatccattgcgactatgagtagtagtgttactacactctacaaatactcctaatatgccatgtgacgctctaataaattagagaaaatctaagaaaaattataagaaacactcatacataggacaaatactcctaagatgccacgtcacactaataaattagagaaaaaaatatattaaaaaacagaatttctagccattgatttgcacttaaaccaatggatccattattgtcagccattagattatattgatccaaataatccctcactcttaaaaatgggctaatccttccctatgtatgtacgtacacaagagatgtcaagaaaaagaaaaagaagaagagtgtgtctacaatcaaccccgtcaagtagttttccatttctttctttgaagctctaaggatttcctcaaattatatatatatgtagcgaccactcctgacgaggttgtcgaagaagccacgccgccgaagcgctgcttctcaccatcccgtcaattctcttgaaagtatttttttctagtaatgatgtaaaaggaaattgcagacacatgcagacacttactagtaaaattttcgagcttacctccttgaaaaacatgcagacacagtgataatatgagaatcgcctgatctgtgatacttggaacggatgtcctgtgcacaagcttgcaatttcgaccttctgtgtggacaccacaactcggcttccatttcgcatgtttggtagattcgatctgatggattcccattctgaaacggtgttcaggtcttctaacacaatgaggtacctctttttatatacttccgtcctgaacttagtgaaaagcttgacttctgctccttgtcgctgttgtccagagtttgtgtagaactgactccgcaaagcctggaagaactcacttagatcaaatggatgcattatctttatccaggcaagacattcaaagtttctttttatttctgggtcatcatacacattcctgatgatggatgattccccatgatcgccttctgtttcccagatggagatgacctgaaggtcaccatcattgttggtgagcaattcagcaagatcccctgaaccactcagctcctttgcgatgtctctcacctcaacgagggcatcagatgctgatgagccacctgcagctggcccgacaggtttggagccggagtcagagatgaggttgtagcgcatgttcctctggctcacatcctccactctggccttgatctgctttatgtcagccaccgcctcatccaggggaagaaccggcgcaaggcaggacggcagcaccggcgccatgaacgaggggaacaaccggtgccaccaagcagacttcttgtcaaggtggattacaaactcgatgcagtcctcgacgtcttaggcaaggttacgcacctgcgttacccaggtcctcaccacattgttgttcgcttgccccctcccgacgacgttgaggaaggactgcatcatctggaactcatccgtgatgaacaccaggtcatgctgcaccctctccttgagctggttctcctccaagatcgccgactgcaccttgatcaccgtcccctccaccaccgacttggtgagcccaagcacaatgtccgccattgtttcctcagcctctactctctgatgtgtctgagtttgtggtgagctagaagcaaatgatgccgctaaattgctagatcggaatcatgggtaggagctgcatctggggtcggtattaaaaaggacagatcagccattgaacaataaatttggacattattactgtattaaactagactatccaggtcaatgaaacaagctggactaagtcctaaaaaaaattagtagatttaatctagcgaaagagcccttacgttaacaaatgtggaacagctgatgccttgaatgattggatcagtgagccttccccaacccaatatcttactcaactggagacgtattgattggtactacacgctgtaacatggggattggttgacaaaaaataaataaaattagtcaaattatcacaaacaaatcacaccgtttgataaacaaagtgggagtacattagtacaagcattcctactaattcctcagtctttcagttgtttactatgaattggtttgctaatcagtctatgtctatcatccaagatcccaaatgcgaacgcccaacgcctaactctatcgcaatccaagttgccttgcatacctcgcggctcccgggcgtgggcgctccggttcgcccacgacatcctctcagcctccgacggtggccgccacaccagccatcctcctccgcgacggcgagatccggcggtgagccgccgccgccgcctgtgtcgcctcccatccatgcctaccaaacccaccagtttgctccatttcgacgcgtggaaggccctgtgggctgcaaaagtccattcggatgggccgggccgagaccagtacgagtgagttgggccggcccaatatgcgcaattttatacccgtaactccgtttttcttcaatattgacaacttatgccctctttgtttaggcttaatattattggcttagacttttaagtcagcttattagcttatatgatttataagccggtggatttaatgtcctaagtttaatgatggagtcatgcatctacctcatataagccaaaaaagcttcaccaacctagcttttggcttaatagtgttagaatggcttatggcttcaaaaaagccaaacgaaaaagccgcttgtttgtttagacttagacttttccgtttataagttggcttataagcctaaacaaagagggcctagaactttaattgacaactttaaactacttcctcggttcctaattatttgtctcataatggttaaccaagaaaaaaaaagagacttgtcgaggataatggagtaatactctctccattcatgtgataagtcattttgacttttttttactcagacttcttaaaagtgatcaagattacaaaaaatataacaatatttatgtcactaaatttattttattaaatctaaaatagaatatattttgatagtttctttgttttatgttaaagatatttctctattttactataaacttaacaaagctaaagaaagtttgacttaaaacaaaaatcgaaacgacttataatatgaaacgaaggtagcagtatatagagatcaatagtatatatggttacaaattatatcccttttgattatttgaaacaaaacatacatgggcttgaataacctgaatacaatcctatctagaaaagtgagggttttatccaaaccggggagggccaattcaaccatggaggcgaattctcggtacacgcaaagctctgtaagctcttacttgtcatgtcccaaatacctatctctcgccaactattcttatacatgtagacatactcagatgagtcatcggtaatgtaggcacaatttggctttaacataggataatccttggttgaaatgcacattgtgctattgtatccaaggaataatgcatgatcatccaagctcttcatcttcacaagttttttccgatcaaaatcgactctgaacacttcaatgtcagttgtcttgagctctagatatggatacatgtcatcattgataccaacgataggatctaggtcatcatcgtcatcgtccacctcaagattatttggatgctccgatgaagatgttgccatcaggtcaacatagctcctccatctccgtacttgaaggatgtcaccccatggcgcccgtaggaggtacatggccgaagggtaccaccgttgtggaactttgcctgtgatctgtctcacgataggagaatctccattgagatctaaggtgtagatggatccatcgaagcatagcgcgtagaaaaagccatcatcatcgttgtgaaagaagtcttcaaagccaccgaagcaagggtgtttgtccagcgagacccacgtccatcgctcatcaccaggccgggcgaacgagagctcgccgcactccatatgggcgagcagcgcgacacaagcgcccccaccggtggacgggctacaggaaaggaccacccgatggtacatgcattcccgtgcctcattcgccgtgagtaggagtggctctgggtcgagcccaggtgtcgaactcacgaagacgttgtacatcatggcaccgttgttgcctgcaccggtgaagctcttctccacatggtgaattccggtgataggagggagacaggcttgggcgccggtaatgggattgatgaggcggaggttggagacctcgtcggcggtgacgatccaaccgtgccccgcaccgaccacggagtgttcggtgaccacgccgagtgggaaagggactcggatggactcgccagtcaaggggcaatggacgacggcgttgttcggggagtaggcctcacaggcgtagaacagacacgggagctgcttcgccgatgatgggagagggaagcgggcgcggcggacggcggtagacgcggcgcaccatgaggcacatacagcgctggagcggatcaggtctgggatgtccaaccgctccataattattagaaggacgtcctccagcaactccgcccagtcggatgactccattatcctctcctcctcggtgtcggcggtacaaaaatttgggcgtaacacagtggccagcaacaaatacatagtgcgggtgtaccccgaatccgatccacctaacgtcgtccgaatccaaaaccgtcgcggccacgtcaccgagttatcttgggccgcctgatagcctggtggtgaggtggacggctgagatcgcttaaggagcacttcgttttctcctcatcgatctctccagcctctccgccgcgcgccgccgccaccgccaccgccgccgccgccgacgacgagtccctcttcccttcctctcctgtctcctcgccagccttcctactggccacacggcctcgacggtctcctctaaggatggagggagaggatgaagagaggcagcattctgcggggattcgcggctgcgcaggtgtggcagcagcgggcgggcttgagcgagacgagggaaagcggggaggtggggggggggcaccgtcggatgggaagatcgagaagctgagcgcggaggagcgagtcgccgcagtccttcaccacctggtcggcgccgtcgatggacaggtggacattcactgcttcccgatggggtacctaccaacccgtctcgaggtcggcatcccggcggcccggtcacccctcagcacgccggcagactgagcggttgagatatattcacagtacatctctatattccctttgtttgtttgtttgtttttgttttgttttggagagagctattcgctttctttgttgttgtatcatcaaattggtcaccgttgctactgcatatcatcacgagaaatgaatcaatgatgtatgcagaagctagtagcttcaatggtagttgcatcagaaaacagaaagcatactgtggttcctcatgaggatttaggcacgtcaaattaataagtctaacttatttatggaatccccttatttatactatgtagtatcaggcttgtgcgttttggaaattaatcactgcaagaagttttaaagtgttttccgttttccattacagctatcatttggagctccctgctttattagatggccagcatgctcatgttgggttcccccctggacaacagctgcaatagttatcaatggtaaacaatatatacttcctgtgatttattgcttgaagtccctacagatggaatgtcatttgtagcaagaaaactatatgaatatgagaggatgatatcaagtcccttaggtgccttatatgagatctcaaagaatttgatggatattagatttttttaatggaaagggtattagatttaagggtggagatttgtctcttgaaactgcaaaacttatgatcctatttgatgaaagtggaactccgtgcaatagttattgctattagaggaatgatgattgtttcattgttgaggagttaatgttgtcggcaattttgtcagctgcagaagttatatccagcgcattcccaaattggtgcattactcggtaggcaccccgagcctaatttatgtaggtctcgagagtttgaggcgtttgtgccaaaaatggctttgaattggatagttcatcatctggtcaacttcacctttcactttccagaatgaaggagaagttaaaagatgatcctgttttgtttaatattatcatgttttatgcttcaaagcaaaagcggccagcataatttttttttgcacagcagacatgataagcaggagggatgattggactcactagtcaccatgcattatctgtccctctatgtacacatttcacatcaccactttgaatatatcctgatataattgttcacagaacactgaaatgcagtaattgaggctgaaagatgtatctgaaacaaaggagatctctcttaggccaaaacgaattcaacattgcaccttgtgagattatacgtggatgctttacatgcctccaatttagtaaggatgctgctgaatccaaagaaaggagcgaagcattgtctgctgcagctaagaagtttaagctcccttcctctgaaaatcttggagagattgctgaacattgcaacgaaagaaagtgcgccggccattgtgcagaagaagctggtcagaagctctacatgtggacacttataaagaggaaagaggtactatgctccatcatattttggcttctgcagctgattttatataagctttgatttgaaaggcttctagttctagttctacttttgcagctccttgttgccgatgctatagttctggggctcagaacaaagttcatgtacgtttatgtgcccaaactaacggtatatatttgcctaacctcatgggaagcactttcttttgttgctgatcgttttactttgccttgatacgattaatcttttctatgtagatggaacggaggatacattatgatgaagttgagagcctatctattgagtgcttggaagccactggaatgttggtgcttgaagcatgcaggaacaggcctcctcaaaggaggggaaatcaagtgaactggtgaagtatagagcttttgaggaagtcatcatggtgatgaacccatgaagttgctttggtggttatttggttaacccgtccgaattgatgttatctgaagaaaatgagaaatctggagcaacagaagctggttgtgacactgccaagtcagttttgctgggtgatgaagccgtgaatgctctagttgccctggctgtcctgcctccggtgatacaattactcgagcgaagttcctgtggctcttcatgcgactctgcggtggacactggagtttttacattctctttggtgaacaacagtaataaaaatgatagaagagtagcatttaaaagttccttcagagttcatcaagcaaatatcaacttatagtgttgtagatgttccattgacctcaatgtcaagtagtcttcttttttacttcaggccacttgaccaagtcccagattcagttttgacagaagaaagactctgtatcggtgatgtatttgtcagttgatccttcatcagcttgtccggagctacctgcagttttttttatagtggtgaactcttacacatgtttgtcatgttgctttgttactctggtgaagaagaaaaatagtattgaagtttcatttgaatgaacatcttcaggctctttaaatcttgagcaactaccatttgttccttcaaaaaatcaaatctgagcttgagttgagaagcgaaatatgatagtaccacctcgaatatatatagatcatatcgtaaaaatgcagcttcctgtacagtcaaacaatctcagaatttctacccaaatcctacctccatgacatcacgaaacaaactgcaaatttctgtttctaacccaacagttgtctggatttctctgcacatcctatttctaacccaggaattgtgaactgtctaacatggattctaagcagagaacatttctaacccaggaattgtgaactgtacatctactcacagaactgtctgctgacccaaaaactgttccctctgaacatttactctcctgacccaagaactgtttgctcacttcccatggatgttcttcttatgacggtagtagtcggcaagattttggaagaagttgtggcagtaggagcattccaccctgtccttgctgcgcatcagcttgcgatggcaagtacagtagtggggcctcatggagcctgacgacaaactccgtggtttcgagccctcgaagcagctggtgcacggcttctcccctctccctgcctgatcgcactcgacgaagaacgagaggagagggccgtgctgcggaggtgtctcgccggcgacgatggagacgggcggctcctcgtcttcctcctgcaatgccgcagtcttgtcggtgtcggcgtcccaatcttgatcgaagccctcccaatcttgatcgaaggcgtcccaatcaggccaatcggcgtcgtcggcgtcatcgtcgtcgtgcattggtggctgcagcaagtgggcgtcaggggcggcctcgccggcgtgggcgacggcttcttgcagtggtggctgcagccaatgggcgtcaggggcggcctcgccgtcgccgacgtgggcgacggcttcttgcagaggtggctgcagccaatgggcgtcgggggcggcctcgccggcctgggcggcgacttcttgcgggggtggctgctcaccggcgacgaggagggcagcgccgcccttgtcctccaccgccgctcccgcaccctggagctgcctcccggcattgttgttggaggcgtcggggaggccacgcttcttgtcaccgttcttagcgtcggggaggccgctcttgtcatcggcgacggcggaggcccccgcaccctggagcggcgcttcccgatcgttcttggcgtcgccgttgaacgcacccttgccatcggcgacggcggaggcgccgacctgctcctcctctgcccccaattcttggagccaccggtaagcgccgtggccgccctcgtcggcgacgaggacaagcctgtccacgtcgtggggcggcaggtgttcgtcggcgacgcccccgccaccgcccacctcgtccaccatgctgagcccttcttgaatcggcatcagcgtccccgcgtcgacgatgccgtcgtcctcctctaaaacctcgccccgctcgacgacgcactgcttgatcacctcggcgaactggggaaatggggaatgcgtggtatttgatttcttgtttgatcctgacaccgaagcagaggaggggagatttatagtgagatttgtattgagcgcttgtggctttgtgggttcctcgcggatgggagaacgggagaggctgcaatggcttgatccaccgtccaagcgagatccgacggatataattaaacgatattggttaccgttaaacttagttcatggagggaaaagcttgcgtacctgttaatttatttttgttatctgtactttgtttaaggtagtgtttgtctaattcttgcacttggtggtttttgcctactcattttttaaccaggaaattaaccagagtagaataaaggaacgagtccattttataactcctttgttttgtggtaatatagaaaactaattctgaactttataattgaatatacttcaactttcgactctcaaaaccatgaagttttttacttgtgcctgaatatagagctgttttggttgatgtggtgtaaaccaaaaactaattttgagtttttaaaactatttaaagagtagaaaaaaagtatttctcgctaagtttttttttttggtacaagtgaaatagcatacagttggcttacgaacaatagattgaaagctaaataaacactattttttgaaatgggacgaatattctttatagcattgtagattgaatttattagtttaaattttcaaggcgaataagtctattgtgcctccctcaacttatgcccatggttgaatcgcatctctcaaccgcaaaaatgggtatagcccatccccaaactcccaagaccattgcaaatcgactccacgggtggtttcgtccaacgtggaagttcactcatcatttgacccttgccattaggtgggacccattcgtcagcagcttccacctcatcccatattctccctcacctctcttctcccctctctctctctctctcatctcttcctcctctcaccttccatcagcatagaggcagggcggcggcgatggcgcataggggaggagcttgctagccgaccggcctcgccgcgcgcgggtaggagctagccgggtgaccgcatgagggaggagctcgtcgaccggccgcacgcggggaggagctcgtcggcatagtggcagccagtaccctcgttgatctcctgcaacggcccgactcgagcacctagaggaggtgggagggcgaatgccaaatggaggacgtcgaagctcgaggaggtcgcaacggctgcgtaccggctccgtccgtgtcaaaccagcgatgcacggtccgcgacccccgcgctgcaaccgttggcctctgccccggctaccgagatcactagggatgtagacggcgaccggcatcggcgagcttgcaagagagcgatgctaggagcggtgttcgaaagctattccaaaaattgcctccgccgccgggcgagcttcggcttcctctgatagcctcgggggtctcgccggggcgcatcttctccgacagagggcggagcgtgccgtcagcgaggagctgctcggtctccatcagcagcacgccttgctggttgcggatccggatggtggcgacgtggatggtgcagacgacagggtgctgttgctgtgacggtggagatgagcacacccctagctcatcctaacacctattgagttgtgatccaaattcatttgcacataataaaggccagcttctgctgaagagaagcggagacccgtcgctggaggcttgggccggatatatatacctcttctaagccgtcgttcggcgttgtaacctcaccctgatatagtgaagatattttgctggctggcgctcgtggttttttctctcttgttttggaagggtttttcatgttaaatcttgtgtcttctgtgattgatatattgttatttatcgtttatttgcctatcgtttcctaagtcctaacagcaccgtgccccaagacgctagcacaaccagcaagtcgagcgtcgggaaggccagcggccgcgacggcaacaatggccgcatcggaattagccagtgcctgcgcttttctcagtggtggccacggcggcggcgttccggctccgtccatgtcggactagcgacccccgcgccgcacccgctggcctccgcgacctcacttcaccgttgcgcggttgcgccaatcccctctggcctccatggctgtctgcgagggaggagaggggaaataaataatgtaactaatatgtgggtcctcacctattttttttttactgtgagtgacacgtagaagccatgtggaatgaagacctagtcaagatgccatgtagatagcacataagttaaaaccgggttcaatactgtcgagagtctatttgcaccggtttttaagatatgggaggtattatacctggttttgcgattaagggatgcgatttcgaccaagtgcaagagatgagggacgtaaaatagacttattccttcctaggacaatcacgaagaacttatgatccattcagatttcaggcccaccatttggaacttttggcccatttctcaatattcacttacggccgaaacatttctaccttttgctgattctagcgtccatgaagttgcaacatgggttcattttcagttgatttagttacatttaagacaatttcgtcttctttagatttcaatcccacttgggtaatgttgcccccaatttggctgagtaaattgtaggagtttgaccatttgtgacacatcaaacgttgtagctcatggtttgccataggatgtttttcttcgttgtagctaactttatttttgagccgaaaatatgacccaattaaacaaagaaaaggtatggtaatttatgtattataggggataacgatccaaacataacgagattacaatacatgagcctaattttgaattcagagtgcaagatagtgggagaaagagagagaaggaaaagatagagctaatatatactagttgtacaatgaatttatagttagtagtgagttccgagacgtcatccaagtggcaccgaacaaaatgtaagtcagtgatgctatggtcaccgtcattaaaatgataagatggattaagaaaaacgttactaaccatggaattgctatcagattttcagatttgctctcattccaattctaagtaataacgtaagctagtatatttatgtcatgtatccaacgtttgcgttcacttcatattttttatttgttggtaggtaattacaacgactttggataattcaacataaaaatgataaggtataaaaatacatgtaggggatgtagctcagatggtagagcgctcgcttagcatgcgagaggtacggggatcgataccccgcatctccaaactttttaatagtaccttttgcattttttttcccttgctaaagaaattgttggtctcttcgctaatgttttttgcattttttcccttactaaagaaattgttggtctctttgctaatgtgctctttgtatagcccattttgaacatgctaatttggtttatctctcctccagattttatccatatagctgtaaactataacattcaaaagggttcaaaattttcaagaagagatattttaacatatacaataacaaatctacacccttagcccctaggtgattacaaccacgtactatactctactactaaccatggaacttcgctggtcacctcattttcagcctaattttttagcccaacgcaacactatcatatactaaggtggtgtttggaaaggagggactaaactttagtccctctcatacaaacataagttcttacaaaagagactaagggcttatttggttctctaccctaccaatttattggtagtgccaaagtctaggcaaaatttggcactaccaaaatattggtagggtaaaattatttggctaccatttggattgctaccaatataaagtcaaattctcatagtatagtaaagaaacttctagaaaatgaccaaatagtataagggaactaccaaatatttggcttcaatccaaaataacacatatactattcaatttgccaataaattggtagggtgtgtttttggtattaaaccaaaacggccctaaaatttttgtgagagggactacattcccaaacaccacctaagtgcgatattacgagcaatcaatcaatcgagtataatgcagcttaagccagccagccatcgccttcgtttggtgttgcacgtgtcaaatccccgggcgggccggacccaccgtacagtgacagatccagccactggcagttgggccgcgagcgggccaacgaaccaccaccccagcatttattactccccttgcaccaccacgcgtaatccacccaccattaaactctggccccacctgtcatccagcgtgtggtgccacgtccgtttccccttcccgggagggagcagcgtcctgtttgtgatttacccgtattggtttgtacccgagacactgagatgtggggcccacggtgagattggtggcttgcgcgtggtttttcttgtggtcgtaggcacaccgcccgccgcgaccgcccaactactcggtgagttgacttggtaataaagaagacgtatactcgtgtcatggaaattttcgtccaggtcctcgtgggacgacgaaattcaaaccggctccatgcatggcttactccgtacaccgccacacgtactccgtaacacgttacacgtctacgggtggcatgggcgagcgacatgagcggatcgctcattccattatacgttctgtttgctcgtcccatgtgtttgtttggctaggtggatgagcttcgatgaaagatggccgtccgaatttttatattgtttatttaaatggtatgatggatagtacggtctagaaaagggaatattctcttaatatgttggatgagtgtatccggccgatttgactggaaaaagtcatacaaggcatgtgtaatgtgtcatattctgattggctgtggttggtttgattttctgttagcaagctccaaatgatttttttctcctaaaccatttatctaatttatgatttgattacaccattatatttattacaattaaatctttaataaaatctcaggtgattatattttaataaaaaaaatatatatgataaatgtgacccactaacttttggcatatcccaaccatgctatatccctccaaccaaataagaaatttagtcatcctatatacaaatcaaacaaaaaaattagatcgctatataaaaaaaaatatatgaatggtcatatcccattcatgactatcgaccaaacatgcatgcatgacatcagccacacccacacacaccctaaatactctcccggtgatggccatatagtaataatttcattttcatccaagcattgccatctccataaaagtatggacatgaatggacttgtttgcaaacagtgctagagttaaaaacttagaatggacttgtttgcaaatagtgctagagttaagatgatggcaacgaccacccaacaccaatcgatcggctatcgatgtcacgatgcagcaatgtagtcctccggtccaatttccaagcttgtctcacaaagaccatagtcgacgatcaacgatggacagtgcttgccactcagctgtgaaaatcaacgttagtactccctcccttccctcatataaccatgatctcttcatttgatgtgtggtattattacatttatatatacaaattgagtttgcatacatgcatgaaagtatttgaggtagtaaaactcttgtttcttgtgcatggtgggtgttaaagggtgcgtgtttcttgatttcttgatgtttccgccgatactttgatacatcgtccgtatttaagtctatttttaagtttattcgtttttgaaaatacataagaagttgtataaaaaatcattttaaaaacatgctaactttgaatgaaagtcggactcctaattactttataattctcgccagaccattaaaaaaataacgtacatgatatatgatcaacatcccaataaagatttcgaattagatatcaatactatcaaaataaaaatcctatatatacattttagaaaagacaatctaacaataatacgattaaactagccctcacccgttgcaacgcacgggtattatttctagttataaatacaatataggaaagttaattcttccttaatattgataaaaaaaaaacttatacgatgatcaatatgaaatggagggagtggtactgtattagagttgacctctgggaattaggttgctccggcactccatggtactctctgattttcggcatatgataccgttaatttatatatatttgtttgatcatttattttattaaaaatatacacatattaaaaatatgagttgtgctcaaagctagtactacccaactaaaacaaatcacaccaaaataaataaaggttacgtatttttctaataaaataaatggtttaacatatgcctaaaagctatagatataatctaaagttaattttaagttataaactttgattatagaattagtttagggttgttttcatcagtttaggagttgttggcatccggctctccttttttccatttctacgaccgctagtaaaataatctaccaagatcctttaaagtcgaaatcactttgaaatgtaatctttagggattccaagtagattcatagttggctctacacaatttgtcaaatggtcacaaggtcacaggtgttctaaaaagatatttatattaacttcattgactcaatctagttgttagaacacactgtacatgggtctactatctcaatttgatgcatgtcgtcgcaagaataggtgctaaagtccctttttctccaattcaatggatacggttaaagttcctaagagacaacacgttgataataggtttgttgagacgagattatggcatctagatcttcttttagaattaaaagcccacttaaacggttcagtttttttacttagaatatgagaatacatagttgtaaaattttaaaaataaactagaaacccgaagttatttttttcaacttctctatattcttaccagatgaattctaaagttcttccaaacagactttgtaaaggagttgaaagtagtacccattgcattcaattgtataattgcatcttagtagtatccatgtgaactgttgaagcacaaatgaattaaaatgactttctgttcagtttaagcttttgattgaaacagaagactcatacataagttctaggagtacatattacttttttcacatcaaatggtgtatgctcctgttcatatattcctatgtcctcgtttactggtcactgttgacccgctagtgttttaactttgatcattaatagtttttaaaggattaagtattaacctatgattagtgaaagttatatagttgtattaatggtatatgtcatacttcaagtatatatatatttttttcagaaaaaacaaacggccaatgttttgaaaaaaaacaagtgacaagtatatacaaattttgctacatgacatcgtgaccacggtttaagtagtaaggcatcacacaaactgactttggggaaatacactattaagagtgtcttcccccaaaacttcgcgcggtgttaaaaccgtgaaatcataatgtgccataaaataacatgttatagctgctaaagcacaactgcacagatgaaactacccatcctttctattcaatttaaccttttggccgaaactaaactattcatacataatacctaaaatatttcttttccatatatccttttagtgcatgttactgtcacccatcctcctttttattatcactagacacaaaaatcccaacaaaatccaattataatccaaatagtaccccttcttttcttttttattttttacaggtcaccgttccaccacatcgcacatattcttcgtcgctaattagcttcacctgcgaccacacacacaccaccaccaccgccgcgtcgccattccacaccgcgtcaagcagcgcacgccatcgccgtctcctcctcttctccggcgtccaagaacccctcccgtgccccggccatgccgccgccggagccggacaaggacaagccgctgccgaagcccaagccgcccaagcccaagcccaagccgcccaagccggagccggagccgaacacgcgctcggcgccggagcgcgaccagacggccgccccgtacggcacggtgccccccgaccccttgtcctgcgccaccgactgctcgccggactgcgtgttctaccacctgtgcccttc

SEQ ID NO: 1596 - DNA, 21179 bp, Oryza sativa
ccatttggcgtaaaagaatagactaaaaaccgaaagcctgatgtttcaatagtttgtcattttgtcattgactgtgtattttgatccatcaaattgagcaagagaatatattttttttgtgcttagatcctaaaattaacaagtccatcacttaccgtatgagtattcccaccaggacggccccatggaccagcagtgtgctgatgcccgctcctgtcactatatgaaaatccgaatgattcgacgtagtcagaactacatattgccacactttcaagtcgacatggtaacacgtcgatgtcgtgtgcctccccttcatttgcaccccatggcccaatcttaacaaccgcagcctcacaaatgcaaatagatgagaagccaaaagttagaacggaaataaaaaaaaaatgagagagagagacaggaggtgtactaatcaacagagtacctcatcttcgtgtgttgcatcctgattagggttcacatatatgccaaatgcgtctacataccaacctacacgtccaaagaaaccaacaatgctgcctttaatttgtataggaatctggaatggggttcctcctacttgaccgtaaggtccgtaagtacgggtatttgtgaccaaagtaagtgatgttataataacaccatatggtgagctagcgattgttccagaaattcccgttagatactctgataggctgaactgaatctgcaagcatttcaaggagaaaacatggattatagcagaagaaacggaaaactaagcaattagcgcatatgcgcgcgcttttcttggctttcttgtgagaattcggaactaatccctctattaaaaatcatcgcaaactttttaaagtcaatgagacgtggtttcaactatactccgatttaactcttgtttataaataaagtattttacataatgacatataatatatattatatatggtgttggacgtacgcatgctgaccgtggtccgacgactatatattttggtgtaactctgatacatcattaacattcataagcccaaaacatgaaacaacattcctttttacttattaacggggtaataactttgaccaagtacatttactcttaactgtatgtaatgaattgtctcttaatataacagcattccttttgacttaaggcagtaataactttggctaacatttacactcaccgtatggttgacacctttatcaggtccatcaccgccccatggacctactttgtgctgctgtccattgtagtcgtagtatgagaaggcaattgagtagatgacttcaccacaaccgatcatcaagcttcctagacggcagggtgccacctcaatatcacgataattacctccaattccaccccactgcccaatcttggcaatcctcacctgagcatatggtaatgaaaaattaatgtactactacgtcgtaagacaaatgggacagctagcaatgccaccacacactttttagtggcagtactacttaaaaattaacactaaaaagtgtggtataaattaatctatatttttcttcagaagaagttaatgtatattgcgaagcattatcattgtcatggtggaatcctggtgcaggactatccaccaaaatttaaatcatggtccacataattaaatatggttgtgtacttgtgtgcagctagccctagttgttatatataattgctttcttttttttttacctagttgttaaataaagagaacgaaaattatcgcttcactatccaaaatagaaaaaaaacatacatgggggagataatttatactccttcggtctctaaatatttgatgccattgactttttcaaacatgtttgaccgttcgtcttatttaaaaagttttgtgaatattattaaagaaacttgagtagtagtagtatatttaacaatgaatcaaatgataggaaaataattaataattacttaaattttttgaataagacgaacggtcaaacatgttttaaaaaatcaacggtgccaaatatttagggacggagggagtatatagtcgggtataacatttttgggaagtctgctatatgaggttttcagaaagcatgcctagaggtttagcaatacggtgcgaattataattctttttagttcatttgttacgacaatctgttgcatgccttttgcatttgattccgtttggagtgggggcacttttagtagatgatcatatataccttgttccaggatgacattgaactactagtttcgtctatctgtttcaattcacgaataatatcccgcatactaggtctattctttctctccacctccacgcaacgtaatgctatttcaatgcatctttttaatcgttggcaatcttcttcggttgatgcatagtttgatgttgcctccatcctatccctccatttcttgcatacctgcaaaattgtaatacaagctatagatgataacatataccgttgtttttctggacaaagtaacatacgaaatgtcttgtaaattaaattagcaaacattcgtcgcctgcccatggggtagaggctgtagtacaaatcctgctacctattatatataaaacctatcatgcgaaagtgtaacgtaataatggataatatttgatgaaataacaattggatctttatcaaaggtaaaaacttttcttacaagctcaataaattgttgggggggcatgtcatcacatttggaatatcccaaaggacctgctattatctgcaggattataacacctaagctgaaaatatcatacttatttgagatttggcgtctctgtatatactccggtggcatgtaatacctgcatggtagcataaatgccaagcagaatgcggtgtataatttcttaaacaggcactgtttgactgattacataaaaattaagaagattgagtttaaataagaaatttactaactcggtgcctttgcaattcctggtggtatgagtttgtgttccaccgaaaagccttgataaaccaaaatctgcgatctttgggtccatgttcttatcaagcagtatattggcgggtttaaggtctagatgataaattgactctttcaatcgctcatgaaggtaatataaaccttcacaagtccctttgattattttgtaccttgtgcaccaatcaagtccatgagattcttctgcacaagtagacaaaatgcatctaacttacgtttttgtaaaataggtaaaaccaaacctctgcatccaaccggatggacacagccaagcaaaccaactaactacaaggtaaattgaagaaatcatgtagttctttctgtaatcaaagtgcaacgtaccacatagatgcttgtcaaggcttccattctgcaaatattcaaagcagagaactctgtatatgatactggaaaaaacaaattctcccttgcgctcgatatgcgttttatgtacttgataacaatatccaattaaccttacaatatttggatgctgaatcttcataaggttattgaattcattcctaaattgtgtatcatcaatccctgacatatgataaagcttcttgacggcaatttctgtccctgctctttccactccctgtttgtgatatatatctaatagattagtatcatatatactcctggacaactttggctacactttcttactttgtggccacctagggtttatccaatgactaagccccctgtttagatcccaccctaaaattttacaccctgtcacatcgaacgtttgaacacctgcataaattattaaatatacgctaaaaaaacaaattgcacggattgtgactaatttacgagacgaatcttttaagcctaattgttccatgatttaataatatggtgctacattaaacatttgctaataacggattaattaggatcaataaattcgtctcgtggtttactgacggattctgtaattagttatttttattagtgcccgaataccccatgcgacacccaaaacaatatccgatgtaacacgccaaaactttacaccctggatcaaaacactcccctaaatatgcactgaaatttggtttcaggttgaaatcataatggatgtgacgtgttgtcgacatgcatgggtgaaacacagtggcgcatagtgtggaatttatccataataaacatacaatcacaaaataagttgtaccttgtaaacttctccatacccaccactcccaacttttctgctgtctgaaaatccatctgtaatttcttctaaataacgtaatggtaaatcacgtgccgtcatccgtgaatgatttcacttccccctggttgttattataacagtgttatttatcagccggccgctttcacaccctttttaaatccactagaaaatatttcaaatatacaagaagataaatgcacgatttgtgttttttctaggtaaaatgttgcaacatgcatggacctttaattgctcataagcaaaatcatcattaaaccatgtctctacgctaaaaatgttgcattcacagaaaaaaaaaatggtcactatggaatgctagatacgtgttaggtatatttcgggaacgtgcgactaattcattcttcgccaactcaactaggctgaaccgctatcaatactacaaaacatcaaataaatatcagcactataggtaccgaaagtgataaaacgacacatataatgtcttagccacccacgcgccgacccacgcgtccgtgagcccggcaaaataccaagaaccggcatctttatatcctaataggtgccactttataaaaaaacagcatcttttacctttgtcagatatagaaaccgacatcttttagttggtgtgagacacaccctagacacttttgtgggaaaaaaatagatgactgttcctttgtcagatatagaaacgggtatctttaagttggcgtgggacccaccaccatagaagcggcacttttattgggaaaaagaaatagatgacggttcttagaggaagtttaatagtatagccaactactagctccaaataatttatagtgaatgtaatagctaattcatacaatagttgtttactatactattaatatctaatcctacctatcataaacacattacgtcttggagtccgtgctgtagctggctacaaatctatagcccgctgcttttatctcttttcctttactggattgtttagcatatactaaggttaaaagaaaaagaatataataccccttaattaataatacatagttggatgtgggatggtggttaggggtagaatgaggagaaatttaaattggaagtggttaatgtgacatgtagtacttcaaaatgacaactattttagaataatttttaaatactagaaagccaagtatcgtgggacgtaggaagtatgcttatagaatgctattgtacggtacctgctcttagtcaaaaccgacgcttttcatatatactgtgtttagtttccccctattcccaactttccatcatatcatatcatataaaaacttttttacacacgtaaactttcaacttttttttctaaactttcaactttttttagaaactaaacacacccataatccgttggtgtctggctgtaaagtcaaagtggtcaaaggggaggggagatgtgggtcccgcgggtcccacttccttttctcttctttcttctagtctcctgcttctttccttcctcccttatctcttctctgcttctcgttcttttctctctctctctctctctcctctcgctctttctttctcttggccgagcggagcagcaggggcgggctggcacggcggggcggcgcggaggggagagggaagggcggcgccgggcaaggaaggggaggaaggtgggggcggcggcggcggtggaggccctcgcggccggctcgacctggtgagctctctctctctctctggaacacgaaatgtcgtctgctcagcctctattagggcatcgatctgatgagggcctccaccaccactttgccgagttgggatttatttcagattctacacgtacctagccctttgtgttagagagtatatagaatggaaccctataatatatagaatcgaaccctttgtgttagagatttaaaatagaatgccatctaatctgtttttctgatcttgagagatctgtcgatttttttatatgatatgatgaaaagttttagtgtcagcaggtatcaaagattattgtgatctaaatgcagttgtctaccttcatccaatgtttctataaaataaattatgggctgcactagctatgtagtgctagaagtgaaccatttaactttcgccggattgaagtgaaccatttactctgtaatggctttggtttagctagaagtcaaccattttactttgtaaggccttattcggattagaggatttctagaggatttttgaaggaatcctgttcaataggaatttttcctttcctatcattcggatagcaaaagtggatcacaggaaaaccaagggaaactttccaccgcccttgattccaagggagaaacgcaggaaaaaatacatggactctgacctctttttttcatttccttcacgtaagaccgaggaaatcaagccctaatcagttggagtgacatgatgggactaatattttattgcttaattagactataatctatgagattactgttgattggaaaattcctatagtttatatattcctgtattccgaacgctccacaccatcaaattcctatgtttttcaatcctacgttttgcacatacaatcctatagtattcctgtgtttttcctattcccatgtttttccaatcctttagtccgaacaagccctaaatgtctttggttaagaaaaggttggtaaccattaaccaatgctccctgtatttaaacatgttgtcatttaaacagctcctattttgtcatgtcctcactataagagtaatgattatgtcttatggttaaatctaatgctttgttgttcagcgagagtatggatctttaattttattcgcccacatatgcttattggtaacgctttgttggactcctgatagggcgcgcaatgcgtgcaaattgtctagtttaatttgtgttttatttggttggccttggccctatgcacttatgcagttaacgttttctccaatgcgaatttgccacgtatttggttggatgtcaggatgcacattgctgggattaatttaagggatgatgactgactgcatcacttcagctttgacttatgattttgtttaatttggatgttggcacaggggccgagcatcccgcattgcaataagcagacaactggactagtccaaagagttgtacatgagctttttcaatctctacaatcatcagaaagcatcgctatgtggagtgtgaagttgccgatggtaaacgttccagcctcatgttctgaatttgaacccacatcactaaatctttactcacattgatatgccatttctcaggtggagtatctggaataagtaaggtcagtgtttgtcatgggcattgggctggaaggcagagacccataggcagcccatatcaattaagttaggacagcattatttgttaagttgaagataagattagattgagttagagataagattagattgaatccttacttaggggtcaagctatgccatctatataaggatgggattgtgtctattatcatcaagtaatgaatatcaattagtctaacctctccatcccaataatgttcttctccgtagcctagatctacatcccttctccaagagccgacgccacctggctatcttcccggcagtgtttatcctgtcatggcctcgggtcatgacaacttggtatcagagccactcaccatagcttctgatgccgagtgagttctccgtgtcacggtgagtcatctattgtacccggtggatgagtatctactccaccaattgtttgatggctatggagtagaaaagaagattgaagtgcaccagatgggaacatatgtggaagcctctgttccgtttcaaactcgagcagccgctgagcatgcttggaacctcaacggccgtgccatctatgatggttgttggttggacatacagtgggagcaaccgtccaacaactccacgacaccggtgacatctctctccatgatcatcacggagtggaaggaagacatcaaggagttgagggctgtcctgcaggacttggtagcatttttgcaggaggagctggcaaaagaaaaggaagaagggcggcaatgggactaacggtgacgccggcgcttgatatgccatcaattcagtcaatccgtccagtggcctccatgtcgtcacaacttcaagatctccaagcgagcagatctgcgtcacaggccatgccaaggcggccatcgacctcttggagttggacttggcaacggcgtcatcgtcggcaaggtggagtgatggaggcgagcagagccgttgttgtgggcccacgaggacgacgaatgatggacgaactatttccgcgagctctagatgcggcagcggcggcgctgatcttggaggtggcagttggtgggttggatgggcggcacgtcttgctgggcgagaaagaaacacatcaacgccattcttttcacacagtaggttcgcgtcctcattgtttggaggcgctacggacgagagaagctgacgatagggttttttctctgcttctaatgggccgacaactattcatttgggtcgatcaagtggagtggccttccagtgccgcaactcatggcttggctgttgggttggccaggtagacctcggctgcagactaacgggcccatcttggatgtgagaccttggcccatctacaacatccaagatatcatgtgagataagtagtattaaatttaaatatagaaaagtggtgtttgttttgaaagagtagtgtctagtactagtttcttgatgatgtggagtttatgtaaactatgtctagtgtcttgggttgggactagccgtagaatttatatggagttgcattggttccaggcttgtggcacggcatggcctcgtcctttctttacgagacgtaggacgggatccacctcctgctagtagaacatattttttcgtattggctttatcttctattccaattaatctaataagtcgagatgtaaaaagcttatgttatcttagattggagtcatttgagtttagaagtccgtgttgcagctcgaggacgagctgctcaaaaggaggggtataatgtcattggcattgggccggaaggaagaggcccatatgcagcccatatcaattaagttagatataagattagattgagttagagataagattagattgaatccttacttaggggtcaagctatgtcatctatataaggatgagattgtgtctattatcatcaagcaatgaatatcaattagtctaacctctcccttccaataatgttcttctccctagactagatctacatcccttctctaggagccgacgccgccaggctatcttcctggcggtgtttatcccgtcatggcctctagtcatgacagtgttgttgagaatattttcttatgctttctctgtacagattcgaatgttagagagtatcaaactttatttcattgtatctcagggaccttcttgacttgtccaaagacaacctatagatcaaggagagtaaaactcaagggatctacatttctagagcaacagaagtaagaaaaaagtgcttaagatatgtccttgtgttttcaatttgacataggaaatttgcacctaggaatttagacttaggacatatatatgcaaatgttttcaatttagacttgggaaatttagacttaggaatttctgtcttaggatatatttgcaaatgtttaggatttagacttagaaggttttgaacttaggatttttagacttaggtatatatatttgtaaatgtgaatgatttggctatgaatatgaatgtgcctatatgcaaatgtgatgtgaatgtgaatgtggctctttgttggtgaatgcatgtgaattgtgtgatttggattatgtggttgtgaatataaagcatattggaattgtcaggtgctgctatttgtatgtgaaattgtcaggtattgctatttttaatttttttttacccaacatataggtgccagtttttcattacaaaccaacacctattatgcttgccacgtgtcccttttgggctaaaaccagcacctatatatgggatttataggtgccggtgttttaaaaaaactggcacctattaggacaaccacatggctgagttggaataggcacatttctcccctaataggtgtcggttctaacctaaaaaccggcatctattacatatatagatgccagttttgaaaccggcaccaatgaccgaagtcatcggtgccgtctccgtggtgccggttgggaaatccggcatctattagggttttccaactggcaccgattagggtttctgtagtagtgtatgtgataaattattcgctaaatgatgttgatatgaggattacggatagcatgtgctaagtttcaattacggaattcgaaaaagaaccataaatttatattatatatcattagtaacaccaagtttcacttaaaatctaaaaagtttagagtacatatttaattactcatacatttcatagctaggaataataataataataataataataataataataataataataataataataataataataataataataataataataataataataatatataaagaaggcacacgactataagttatcccatttatacacgtaccaaggacatgtttatcaacttatcattcattatcattgttgtaaccactatctatagcagtcttatctctctagttatagagagaggagaggggtttcgtctttttaggtctctgaaaagccagttcacatgcgatccaataaaggaggcagtacttctgcctgaattcctctagatcctacccgtcggtattaccgtggaattatgagaagcaactagttggtagccagcttctaagaatctgaaaatgctggttttctcagcttctggcttctaattaattttttggattgtacaactatagtttattaaaatctagaaaaatactgaactatttggggagcttctgattttgggagaagctacagctgccagaagttctaccaaacataccgtagcgaacgctaaatatttgcacctaggattaattcttgcctgaatatacaaaactaaagctgatttcaataattcgtaaatctttcttgacattaaccatgaatgtaaaccctacgcccgacatagctaaatcaataattacgcaaacaaatttgcagggaaagatctcttttattcccaccacagatagtaagtaggtggaatccggccagaatgagcggtcgggctagatggtacaggtgaccatactattcctctcctcaatcttttatagatgctggtttgtctaaaatcaactcctataaaaaagttttcattttttattaggattaaattaaaaacgggtacctataaaccactcactgtatttatttcagacagtattccataggacagcatttgagtgtctcctatggaaacttttccatgatatgtacgggccgtcacatacagccaaggcagaaatagcagaaaacggactagccaaggcgtaaccgcgtgagtcaacaaagcaagcgttatagcggatactaagtctagtggccgaataatccataacaaatactgtagatatactaagacttcacgactctcttagcacaataagataaacacactgagtcacattgaaaaatagcggatactacgtctagtggttgaataatccatcacaaatacggtagatatgccaagaccttgcgactctcttagcacaataagataaacactaagtcacatattgaaaaattagcggatactatgtctagtggtcgaataatccataacaaatactgtagatataccaagactttgtgattctctttgcacaagaagataaaagctgagtcacacattgaaaaatagcggatactacgtctagtggtcgaataatccatgacactgtagatatgctaagacttcactactctcttagcacaataagataaacgctgagccacacattgaaaaaaagcatgtgttgcatcactacgtataaaatgtggaactaattaatgatgaccagtacatattaacatcttaattgttacctaaagaaattcaagcaaataaatcatctatattaagctagcagcacatcggtacaaagttcatacgaaacagtggccttgatctcattcatatcctagccctattgtgtggccatcctgcaactggaatttggtattgcattcaattataatgacatactcctatgtagatatcttttaattaaacttggaccatcagtattttcataaatacatagtttaaaaacaaaactaatgatatacgtagatttgttttggaaagtgctattacaatatggtattggactttacaaacgttggccctgttcgagaacccaacaaagggggaataaagttttggatcttcgtggcacgtttttcaaactactaaacggtgcgtttcgtacaaaaaatttctatataaaagttgttctaaaatatcagattaatccatttttcaagtttgtaataattaaaactcaattaatcataagttattaccacctcgttttacgtaaaacacttaatcttcatatttattttcacgagatttaaacaaagccgttatatcaaatccattttgttaaacaaaagataaaatcttagaataaattgcacccacggtgtatcaaattgacaggtgggtgcaatttattgcaagaacttgaaaaataagcgttccagtgcaacaacttggtaggtaagtgcaatttagtataacaattttataagtgaccacataaatgcaacaacttgcagggtagatacgattttgatataataaataaattgttatgcggtaacttaattatttgcagtatatttatatttttatcctaataactaataactgaaagtcaatttaactgaatgtagaaattattatatttggttgatatttgagaaggtgaagaaaacaaaaaaaatcttaaaagataattgaatgtaaattgtatgtgcggtataattcttaaagattaaattcaatattataaaataatatccgtaggattactatgtgatggcatattgacatcgtgaaaaaaaattcacctagcatatgcttagtcaaattgatgcatcaaaatattataaattgttaagttcttgtactagaacgtacctacttgtcaagttgttgcactcggacgttcaattcttaagtttttgaactatatcgcacccacctgtcaagttgttgtaacatatatataatttactcaaaatcttattttcaacgttaaaattaattcagcagagggaaggagtagcaacaaacttagagcaggtagaacgcgcgagtcatgaaaattaagaaccaaaaaatttcgcatcgatcgacaaaaactgagcagcaagcaaatgtgtggaattaataacaactaagtaagaaggtaaaagctaagtacaaaagtctcaccggactaggctaaatcaaggcggagcgtgcagggtcggatagcgcgacaaacgaatgcaaagttgtatatataaatacttgcgcgcggctgcgatggggggaaaccgccaggcaaacacgcggggggccgcattgccttcccaaaacgaaaattttcatgctgtcacgtcaaatatttggacacatgtatagaatattaaatatagagaaaaaaaccaattacacagattacgtgtaaattgtgagacgaatcttttaagcctaattgcgccatgatttgacaatgtggtgctacagtaaacatttgctaataactgattaattaggcttaataaatttgcctcgcagtttcttggcagaatctgtaatttgttttgttattagactacatttaatacttcaaatgtgtgtccgtatatctgatgtgataaccaaactcaaaatttttccgcaactaattaacaaggccttagccacgcttctctggcctgacgctttaaggggacgaatgcaaaaatgagcatatttttttatgcgtcctctaaaaggccacataattttcacatacggacccctaagtgatacaaatgcaaaaatacactcttttctccatagattttttttctcccctccactctcttttccctctcaacacttcaaattttttttcaactcctcccctctctccccctgtcctctcttgattattctctcctttctctttctctcttctcctctccgagcaggagcagacgccggcggccaagagcagctgcagcgacgacgaatagcagatcctcacgacggtgtctgcgaaagggtcggatccactgcccttgggagcagctacggcgacggcaggcggtggatctggctgcgccaccctcgggagggccggatctgtcgccctacatagcggctatgatagcgggctgcaatggcgccgatgcagattagagttttggatttttcaaatttttatttttttcatcaaatttattttcatagatctttgagtgcatgaggatcacccgttcacatgaaaaaaaaaacacttttgaccgttcgtaaaaataatttatgtagtaatgaactactcaagagcgagacacagtgatacatctcctcagtgtatgtcgcactgtacgtcggtagtcgtggtgcctcacggttatatagctttatagagtaggctatggcttcttgtaaatcacaaattccactgtcacataagacaacaatcttaaaattatacatcataataatactatgaatttagacagctcaatcctacattgctatataaacgctgagatagtagtaaaatacaagtaaatttcccgttatctgttattgatttgagcctttagttgaattagttgatgtatataaatcaatatgatattagacacataatttttgagtttaaattttgacctgtgcaattaaataaactttttcagcctactttcattccacgtcggatgattgatacctgcaatataagtgtattgcccgtatcctgaaaactgagttggagcataattgatgaattggtcttttcttgtaagctcaaacttttgtgtgtgtgtagggctgtcaatgagctgagctcgagcaagctcgtctgcccaagctcgagctgagtctattgcaccttcgagcttctaggcaagcttggttcgagctcgttcaaacttgagctcggctaccaaactcggccataagtagtataatatatattttaatgataatctcttgataagtataattattttctagttaatcatactaataaaagagtagaaaatgattaaaataaatatattgtactaacacatgctaatttattgtgtaaatagatactaatatatatttatatttatctattagtttattatattaataaggtgaacatgcaatataaactatacacagtcaagctcggcctggctcggtagaagctcgagctcggctcggtaaagctcgcgagctcttgcttaggctcaggttcgactcgtttggagctcgagccgagctcaaatcgagcctaggacgagccaagcttgagctgctcgcgagcctcgagttttttttacagccctatgtgtgtggatcttggttagagtagtaccaacattagacattgttaacacccaattttagcatctatgtatgaaataggaaaacatttccgaatttagaaaggtggttttcatcacggtgccagtctgactagtgacatctgagtcgtactccgagcccaattacgtcgggtcttgggtttttttccttgggctgaggttttttttttaagttctaattgatgtctgctatgagtaagatgtggagaggaggtcctgtaggcagcaaaacaaacccctttgtaaggctatggccggtttaattgagcacacaatctatttccaatacaatataaccaattgaattactttttttcaatattgcatctactttttgtctagttctagcctagctttcgtttattttcattggtttgtgctaaaatccctccgttccgccctcgaaacgggtatttatccctattcgtctaaatcggctccgctagctggttttaacttacataactcatcttgatttagatttttctagatcgatgtggtaggcgacttcgtatgactgcaacatattaggtgtttctatcttgattggcggcgtgaccaaaaagttgccaacagagatcacatatcatgtctacgtcatgtatatgaaactactcgatccctctgctctaaagtacaagcctttctatgtgttcctcaaaatatttcgaatagagggatgtgcagatatatgttggaaaacccgtataaatgcttacatgttagaagaaaggaaaaagtaagaattacccctctgaactatcacaatcgatcaaattacccccataaactcaaataccagatatttcaccccctaaacttgtaataccagatacccatatattctgtgcgctcccagcgacaccgctgtccgtccactccaccgtcctcctcggtgcggaccaccgcttgccgcgcccttcccgcgacgccgctgcccgtcccctccaccatccgcctcggcgtggcccaccgcctccaccatcctccttgcccgcaacccgtcgcgccctccccgtgacgccgccgtccaccgctgtcctcactggccacgacgctagagagatgagagagggagagagcagaatgaaaaaggaagagagatgggtgagggggagagaagctgataggtgggtcccatcgatttttttttaaaaaatgctgattggactgccacgtgtacaccattcataacgaaaactgctttagattgagtcgggggggggggggtaattcgcccgattttacaagtttaggggggggggtaattcgatcgattgcgatagttcagggggtaattcgtactttttcctagaagaaacgatgttcaactttatatgcaaagcttagttaagttttactactgggctacaaacagtttgttggtttaccaaactactaaaaaaaccctgaaagggattggtcttataggtgtcggttcaataaaactgtagaactggcacctatgggcattttcccacctccgcacgatgaaaaaaatatagaaccgacacctttaagcagtataagtgtcagttttaaagaaaaaccagcactaatattataggtgctatttttttaaaaagagccaacacctgtacttgtattattggtgtcggttcaagaggaaaaaaccggcacaaatagtataagtataggtgccgttttttaacagaaccgacacctataaaataagtataggtgtcggttttaaaaaccaacacatatttaaaaaaaccggacacagagctaggtctttatccactcagccacgccagccacatctctctctctcccctcctctccctttgccttccaacggagggagcggcggtggccgacggaggacgggccgtggccctctcccagcttggggcccttcccccttctcacctactccagcggctggcccaggtgggggcggtcgacacggaggtcggcgcacgcgcggccaggttgcggcggcagcgacggtggtggttgtcgtggaggaggcgccagccccctctctctcccggtggccctccctcctcctctccgccgctctcccccttctcctcctctagatccattggcggcagcggcggtggtggtggaggaggctcgtgaggtggaggccagcgcacgcaccgcgaggtggcggcggtggtggaggaggctcgccagttccctccctctcccaggggcctctttcctcctctctctctcccaccctcccccttctcctccttcagatccgttggcggcggtgccgttggtggtggaggaggctcgcgaggtggaggccggcgcggcgcggaggcgggcagcagtgtaggtgccatcgtcttttttttaaaaaaatggtataggtaccggctttagaaccaacaccaataagattaaggcaaaggtgccgatcaataggtaccggctgcgaaaccagggggcttttaactatttgtgtaacatcccggcctagggcttaataagattaatagaatactcatattaacaagttacaacttcttttccggaagccaatctccaaagaactccagggttaagcgtgcttggcgtggagcaatttgggatgggtgaccgaccaggaaattcttcccgggtgcacacgagtgaggacaaagtgtgcagaaaagacatgtgttggtctgtgagggtagtctatgacctatgaaagctatcagacgtaagcgggcctggcttgggggaagacgggatgttacaaaatggtatcagagccgactctcgcggtttcacgggcgcgtgtgtcgcagtagcgcaggcatggtgcgcatggctggtgtagaccgggagtggttacacagcatggcacatgcgctggcactggacacatggacgtggccaagagaggacgttcctggcctagagttgatcgacgggggcgtcgatctctcttaagggggtgagggtgtaacatcccggcctagggcttaataagattaatagaatactcatatcaacaagttgcaacttcttttccggaagcaaatctccgaagaactccagggttaagcgtgcttagcatggagcaatttgggatgggtgaccgaccgggaaattcttccgggtgcacacgagtgaggacaaagtgtgcagaaaagacatgtgttggtctgtgagggtagtctatgacctatgaaagctatcagacgtaagcgggcctggcctggaggaaggcgggactttacaatttgccactcttaaaccagttcccaaccggtgccacttgtttatcggacgtaagcgggcctggcctgggggaaggcgggacgttacaatttgccactcttaaaccagttcccaaccggcatctctaaaggtttttctactagtgccacttgtttatcagacgtaagcgggcctggcctgggggaaggcgggactttacaatttgccactcctaaaccagttcccaaccggcatctctaaaggtttttctactagtgccacttgttttttctagacactaattatttccaatgctattttggttgtttcttgataagttggtttgtgtgtttttatagtgtctaaaatacaacacgtgatttgccttacacctcgttaactcttgccatatcgaacttattctaaatggtaggctattattaagtaacttctacctccgtcataaaattaaatgtaagcgttcttagtttgacacgtgtattaaaaaatataaaaataattaaggaaagactattattaattgagaagagaaagtaagcgaacaaattaaatagataatataattatgattagtggaatagaataacccgattaaagggcaactcggcattttacgagttatgaaagtgcattggatgatagatgagagggtgatgaagaaataacttactttcaaaacaaactacttcctctattgtaagacatatttattttatcattaagaccatggagaaattaactcatatctcatgtaacaaaacaaaaaactatcttacaatgcatataaccaattagtattaggatggttttttgagttctgattaacattaaagactacaaatatgatcatctcgttcttttgaaaagaaaaataaaatatgtttaatatttttgaatgaagggtgtagtatgctaaaaaaaaattcattttaaggacggatgtaataaatcaacacttgctaacactaggagtgctcttcgtaaagaattggtgggagaaatcaacgctagtctgtggtcaaccgagaaaagcaagtgaaagctatcctgatgtcactctccataagaaatttaatgagagcactacaggagaaatgatatttgttaggtcggctgatttccacaatagtgctggttctaataagaactgggactaaagattatttttagtcccgattagaaaaattttgatttgtaactccaattggactaaagatcagttcatcacctgtgagaggcctgtcagggggtcgaggatctttactaatctttagtctcagactaaaaatctatctttagtcccggttggagttaccgaccggagtaaatatttctctcccatctctgatcggttaagtcccagacaagactttcctcctcatcgagatatttagataaagattggatcgatctcatcccctctcctgctaacccttcagatcctcttcctcctcctcccccctcctccccttcgtcctcctcccctctcctccccctcttcccctcccatccggcggtcggcggggccgcgcgcgggcgtggtgagcggtggcaggcggggccacgcgcggaggcggccgtggtagacggtagcaccctttcattttttttataatttgtgattcactgagatgtataatttctttttttttagaatttgtgattcattgcatggatctgagatgtatttgatttgtgtaatttttttagaatttgtgatgtatttgatttgtgtatataactaacttaggatttgtgatgtgaatgattttggatgttactttgatttgggggatttggtgtttgatttgaggatatgcatggcattcgatttgagagaaaatacagggattaactctgtcaattagtaaagaaacaatgaaaaaaagaaacgggaaccaaccgggactgtccctaccctctctttagtcccggttggtgttaccaattaggactaaagattcaactttactcccggttatgactaaagatggacatctttagtcccagattcgtagtcccggttagaaaaccggtactatagggggttcccaaccgggagtaaaaacggtttccctagtagtggaggttgatgggagtattttcttatctaccctataattcaccaactcacttttacacctacattactcattcatcaaatccaactgcccat

SEQ ID NO: 1597 - DNA, 23193 bp, Oryza sativa
tgactgttgacttttcttctggatttagagtttcatttgtttgtcggacattgactgtttgagggagagattgatcaagggctgaagccgtgggcatgctccttcgctaccttgactcttctcgttattatcagacacatcaggtcattcaaaagcaaagaaggctcaagctcaacccaagtcataaatttatatcctgagtctacacagcccaaacaactatctcatcttgtatgttggtaattaggagagcacgaattagaaggtgggaacaatcatcatcctattaaactaatcttttgggttgtagacttacctaacattgtaactccggttgaacctgtgatggagcaggccgatgtaatctgggtggctcataattggtaggtcgggctacacactctaataaacatgactgttttatagtagcaattattgtttggtggatgtaactatatagaaagaaatgattggtcaaggaaaaagaacggtattcttttttaaaaaataaaaaagaagcaaaagaggattccctcaccccattttggcggataagattatgttattctgtataaaaaaatctgtgttcacagaaaatctacttctcaccataggaatttacaagcatagggtggataggcatccagttcttctgttaataaattatttttttagtacatatcaatacattcgtctagagttttagttttttttccttttaccttgatgtacatactcgccttaattaaaattatataccgtggggggctccctcactgttttcagtttaaaaaatgtaggaaaatgcctttgagtctagaggaaaataaggtatcatgtatgttagtttctactaaacgtatatatgaacttgatacatggtctccgctaagatatcagatagttttagccttttagcaaaagaaatacctagaaatcctattggacttagctaaaggcctaagggtgtgttcggaagtcctagttccaaactccctctccctccacgcgtgcttttcaaactgctaaacagtacgttttttaaaaaagtttctatacgaaagttgcttcaaacaatcatattgatcttttttttaaaaaaattagctaatacttaattaatcgtgcgctaatggatcgctctgttttccgtgcgcactgtttccggttgggaacgagcacttccgaatacaccctaaagcttcctatcaacatagagccaataagggaaaaaggtttcagaggacaattaataacagatgacaaccgaacctaatagcaatgaaaggtcagctcttttataaaacaaagaaatgaaattcgataagattaacaaaagggcaaaatcttctgaatgaagctcaaaatgcgtgtcacacacctcaaagattcaagcttagcaacctaatcaccaccccaactaaaaattgaccagcaagatctttacaaaaaggattatgaaatgcagtgagtgttaacggtatctattctgttcccatttaatgatgccttgcattattataaatccatcctcatccatctcccctctccaaacaaaacaaattctcttcgcaagtgtgctttgttctgtcctaaaaatagtctggattcccgtggcttttgccttttggtctcttcccagaattcagaagaacctgccctgccctaatgttgacaagatcccatatggaaagagactgaaggacatgtacagttccatcagcggtatatgtatagctggatgaccttcaagtgttcatgcacttttgaagtcctaatcaggctttccttgccccttccccccggtaaaagcggttacaaattaccaagcaaaaccgatgaaaaccagacattactacaaacttattttttaaaagttcttttgaacttggtcgacataacgaacaattgctattaccgtacacatgcggtaagcccagttaccatggtaaccgatggtaagaaaaccctattcctaatttgactatctataaaatagaagccttatagtggagcctattatagaaaaactagaggaccaaaatgtaacttattttcgtcgaattaatagtggtattctcacaccttatcttttatgaagtccactcactcatatccgatggcagtggataagactataagcagacaactagaaaagcctccaccttacaaaatacagaaagagagattcttaacacacaaaaatttacacgaatgattgccttgccattactaaaccacatagactgctttacgaatttgatacgttaggttgtagatgggtatatgcagaatagtttcaccttttgtctttcataaatactataggggtgtgtagacataccccatccaacaccaaacgtgtgcatactataaacaagctttcaattttgtggaagtgtaggggccttgtggcatcatggtagaagctaatgctgattggtcattagtcagaacaacaccttggccccaccactaatcccctttccagtttccttaatgtgagtatcacactaggatctataggtggtcatttttcttattgagtgtactcaattacattgcagtcaaggaaaaattattgagtgtatttgcatttgattgaattaaaagacggtacaattattggtcaaacagtagtcaatcgtagactttatctttggcacctttcatggcttgcaaaattcaatttgggtccatatgcatacagatacatcaaaacaagaacgaaatctggacgaaatttcatcagaagcttccaaatctcgtagaattttttgcccttcatgcgttcagacatgggtaacaatctgacactgatatcctgttcttctgcagtccacatatccatgtttatctatcatgctaattaacttaatttctcccttataatgccttctagattctttcaatttcatatgctcctctctctatgctcctttctgaattttttttcttccctgtgattgatgctgctggagatcatcatgcacaggtcatcatgcaacatcatccagtggaacaggttagatatgctgttattcgaagtagactgcaaagaataaggtgaacttttatgctcatctttctctgtcccatctgaacatttctttctcatgagttggatactgtagaacatcatgcacaagtcatcatgcaacatcactcagtagtcagtaagcaagttgatatatactacagggtgaggtttgtttggatgctcctggaaatgatctgatgatggagatgtaacaacagatatggccaatcgggagttcctatcagggagaaactctgcatgaactgaactgacatcagaaacacacgcgcattttcaggcttgaatggggcaatgccaaggttgaaaaccagcaatcaacgtagaggtttagtatacgtaagatcaagctgtaagcaacaatgattttagccagttggagctcagtactgagactgaaccaacgtcaacatacctgcccccacagcaagacggagggcatgttcactttgatgtcattttcaactatactatttttttttggcaaagttgtcaagaaatggctacatttagtttgttgctaaatttggtcaatacactagaaatcatgccaaaattttagcaatattatcatcttaccaaaatattggtattgccaaaacttggtaaggtttattttggctacaatctcaatctgaacaggccctgaaattctgaaaaggaatcattggtgagacctatccctgtaattctacagtacaaaaattgttgcgatccagaaagcagtatatatagacagagaaactaaatcactaagtctggtgatcaagtgacagtgctactacaagctctgtaatatctattgttagtccaaactctgaaattctgaatgaagtagtacaggcaaggactgaacaagaagggaaggaggaggagcagaaaagcacgaggcactttggatgtggttctcatgcttattaaagctcagtaataagttcaatggaattgattagttctgcatgagtacgaattaaattgactaaatattcaaaatcctaaatcactggacagatactctcctaggtcagagatgacatagaatgtacatcaactcatgaaatcagcaagttataatcctcaaatcccagagcaatcaattaaccggctcctctcttggattttcgatcatgttcatgacattctttatgcatcgtgaacagtggtcagtggtctccggtcgtcgccgtcgtcgtcttcttctctgatctttctcatcggatatggccatatggatggtgaaacgtgaccatggcacgaagacgacgaaagtgtgaaacagtgaggcagccgcgagacagatcgtcaatccggcgtgacgacgatggcggggctacttgcaccaagatcatgcgcatggtgatttgatggttgatgctattattaaataaaatcgatggagaaaagcaaattaaatgccaattcaatcataattactcaattcgtttcatattataaattgtcctttttcattaaacttctttaaatttaaccaaaaaatatatcaatattttgaacacaaaataagcatattattaaaatatattaaatactaattttaatgaaactaattttggtgttatagacgttaccaattttttctataaatttaatcaaactaaaaaaagtttaacaaggaaaataattagaacaacttataacacgaaacatgcaaagtacctcacaaaattttttttaaaaaatattgaatgctactttctccattttatattataggggcaattgcttatttgaccctgttttgaaacttaactaccaatatgaccctactttttctagtttgcttatttgactctacttttttaaaatgaacactccgtttggccctgttttttaacacagttaagttttcattttttaaaaaagaaagaaatgcaattatttttcgtaatgaccaaaatacccttgaccaaaccctatccatatctacgtctctccccgtattccgtctctctctctctctgtgctggcggcggcggcgactcgtggagggagagcggcggagaccgcgaggtgcagcggcgatggctcgtggagggagagcgccggtgaccgcgaggtgcggcggcgaccgcgaggtgctgcggcagcggagctggctcacggagggaggagcggaggaaacagcggtggctgccgtggggggatccgtgccggcgccgccgtcgtcggtcgtcttcctcgtcgccgagccgccgctcctccgccgccagcggagggccgcctcgtcgccggtcgtattcctcgtcgccgagctaccgctccttcgcagccaccgccagcggagggccgcctcgtcgccgagccaccgccgctcctccgcagccctccgcatccgccgccagcggcggccctccgcgtcgcgccgtcgagccgccgctcctcccgccgccctcctcgtcgccgagccgccgctcctccgccaccagcgcctcgtcgccgagctgccgtcgctcttccgcatcgcgctgccgagccgccgcttctccgcagtgctctggagagagagagagagagtagagagagagtggatatgaatgagtggtagagaatagatggatgtattaggggcattttcatcattttaccccttagttaacggtgttaactcgtcttaacggaatagggtcagctttcctcttcgattttgaaaagcaggtcaaataagcaaactgaaaaaaatagggtcaaattggtagtttgctttcaaaacagggtcaaataagcaattggccctgttgttttgtttggtttttttttttcaaattttgttaagtttgatcaactttatagataaaatagtcatatctaaaatattaaattagtttcattaaatctaacactaaatatattttgataatatgtttgttttatattaaaaatactactatattttttataaatttaattaaacttaaaaaagttttactaataaaaaaaattaaacgacttataataattataaaacggcgggagtacccgtattccctacatctcgacgaatccctgtgcttcgtactgtgctcgcaccgacgcctgaatcctctcgatcacctcatcggccttctcgaagcacccgccggcctcgaaccagtcaccggcgatctcctccggcgaggccgcggggtcgtcacgatcggccggcgccgtgaacacatagccgaactggtggccgaggttctctcgtcggagggagaggaaccaggccacgtccgccggcggcagccgcgccatcctctccaccgccgccggagacggaggagagtcctcgctctcgccgccgccagccgcatcggcgggaggcttcctctctaccccctccgccatggcttcggcggtgatgctcaccgcactttcgcctcgccgggttgtgagttgtgtgacgccacgccacctcagcagcgggagatttgggagacggttcagttgtagagtccaagtccaggaagcttccgacgagtgcgcgtgggccgtgagatccatatcttactgggccctatttgagtcgctactaatagggccatattgggctgattctatcgtgcgggatcagtacggaaacaactttggttggcccgtatgatcctgttggtcataattaaaatatttgaaaagtcctgattagaccccccgaaccattggggtcgatcgaattaccccttgaatttaaataccagatatttttcaccctcaactattcaaaccggacaaataccaccccctcacccccttgactcaatcataagtggttttggttctatgtggcaatccaatcaacatttctttttaaaaaaattagtgaggttcacctctctcacatgagcctctcacaatcccattccccaccacctctttgggtctatttgtgggagcttctagttttgcatcttctcccagaatcaaaagctcctcaaacagtccagcttttggttcagattctgagaagttatatctatagaatcctgaaaatgaactagaagcctaaagcaggaaaatcaagctttttcagattcttagaagctagctaccaatcagctgcttctcagaatctttaagctcccccaaacataccctttgtttcctccccttgctgacccgcagcaggggctagcccgtcgagcttgctaatcgggcaagcacgccgccaccctactgctctcctgcatgcgctcactcgacggccagtggcggagctagaagtcacttgggacggcgctgcggcagagcttgagctagcgcggtggcgactgcaacggtgatggagcctggaggcggtggaactgaagctaggatggaggcagctgcaacggtggtggagctggagctcatgcgaagcggcgaaggtatgccatcatctcgagttctctcggcgatatcctctcccagctaggggtggcgctatagccatgcattgggccccactgaccctgacaatttctcatacccatagtccctaacgactgtctatccatttgtcgggtgatttctaaccaaaaatcacccgacaaatggatagacagtccctaaaaagactagacgccggtatagatggccaaatgggccgcccggcaaggcccgacccaggcacggcgggactgggctgaggtcagtcgggccggcacggcccgacctacacgccgggccgtgtcgtgctagcccacgggctgcacacacggcccaggcacagcccagtaagacttggaccgtgccgggtgttggtattttttaacgacattactagaaatataattcccagcaatgacgcagaaatactcctggtatattatggttacaaagttcatccgcaagcgcacgtatataccattgtagtatatcacccgagagtattcgaagggtatcgtatttatttaatcccgtgggaagatcatagtagagagaaccggactaataatttataagttacttgtaataatcgtagcctaagcaggggttaagataatccaagggtagagtgacacacaagcagggctactcattctcatactaaaatatctaagctaagtgaaaagaaaatagaaagagaatatattcttatacttctagtatacatagtatacatacatcctagttatctatcatactagctaataccctctatccgatgccctcctggtacttcaagaagccacccctgactatcgagttccttacgacagcccgtcatgaccatacaaccggggctaaatacggaggagtaccctccctagaaaattaacttaggactgtatacacgcgcggaggaatacccgtactgagctgtcaccattagcggcccacctctcatccgtagcatataaccctaaataatgatatcccgttatctagacaccacacctaaactatcagatactactctaatgccatcgtcatgacatagagtaattgcataagcaaacactatacccgtacccatgcatctcccagataagctagtataattagtgtacatgaacataatgtaaagctagcattcatatacttggaaagtatttcaataccatgaatgtatatagaagagtattctaataaaagtacaaagcttacaaaagagaaaagaagagctactagagccatacccgaactcttccgaaggcttccggacttcgatttctactctattcctattccactagcttgagaacactaaactaacttgagagaatacgagagagctcttgcttgaggtgtgtgagtgaagtgaggataagagctcattttataggcaggtaatgacggttagaaaggtcggtaataccctccaactgtcattggggatcaatcctagccgtccatcaaaaccctgcatccattggctccacgggaggtttggccgaacccaatggttctcccgaaccatgggtcgggctggcctggcccaaaatcggcaggtcgtctcctcttttgctctcatacgcagacttgtgaattttggcccagttcatcgtgtcaattctgagttcttggctcattcatgcataagtctgattcacgacatcgtccgattgatttattgtctgagttgatgtcgattctcctccactttatggttattctctacaaaaggtaagtgaaccaaatactagtggaatattattattctaacatggatatgcattacaagcataattagttctcctctatttcggtaatattgacggtcgaaactgatcgctaacgacagtcaacaccgggccggcccaaaggcatgacaggccatcgtgcttctccacaaaataagtctattttatattcctcttctctttgggccttgccttatatggttaattaagtctattttacatccctctactatttttttcgcgtgccgtgctaggccggcccatcatgccaagggagcggcccaagcatggcctggctgtcgggccgggccgacacgagcacgagtccagtcaggctgtgtcgtgcttgggccgggccacagccctcgagctatatggccatctatagacgccggtaagcatgttttgttacagcccgattagcaactagaaacgacacgattgaaattagcaggcaacagatagaaattagctagcgctaaagattttatgtcagcccaaaggcctaatatacatatatgtttgagatttgagcccacaaccacaaggcttgtagcgggcagcccacaagtccacaaattctacctgttgcatcgttttcgtttcctccgagcgcttcgcctagcaccgccgcacgtcttgacttctcatcttgtcgtcccctagtcgcgcacacgcacatcgctgccacatccaagattccaggaggcagaggtgtggagagacaaaggcaaggatcggcacttcggcagaccgcagatggctgacggcacgagggcaattggcaaggtcgagccgccgagggggcgagctgatggcgagttgatgggtaaccgattaaccctgtcataatttctagattattatcacaatttggaaattagggttatgagatatgaattttcgattcctttatacttaagttacatggtcatcagtcatgtgcgaggagaatattaaaacatagtaattttgttctttccagcagagtggaatataaaaaatcaataattttagtaatcttagtcgtgagtattattacgcaacccctcctgctaccgaggtagtccaagagggattgcataattctacaaaagtggagacacaagatataagggtgtggtatcctttctcattcatccattgcattctcaagtgtacaatcctcctctctactcctctatttgtagccattccctcttccaccttccatgtttagtgatgggcccaattagtgggtaaccgggccgggccttcatgggccggcggtttcctaacactcccccttgggctctcactgtgtgatgcctatgcctcattaaaactccacaaaaacccagtgggaaaaatttggagaaagagtacatagcatacgcttgcaatgtcgtacgaattgcctcgttaaaaaccttgataagaaactgctaggaaaacttatccaagggaaaaagagtacaatccacccaattctctgttcaatctttctagattgattttgggtacttgattttctatatcaagattatagaatgagtcagcgaaattctccccctgaattttgcatttatctaagtctcattattccgatttctctgacacacgtattcaagagaagatgtcaataatgagttagtggacaaatctgtaagacttccacatgacttagttcgtagctcctatgtaattcatgcacatagaaaagcttgggggttcatgtgtttagtgagtatgcttttcacgtaactcatttgcatatgtgcgacatatgctgctttagtttcataaatggtggggttgagatagtttccaaatcgcgattgatgtcgcgggtaaccatctctcaaaaccatgctgaggctctgaatagttcaacgatgtttagttcggtttagttcaattagcctagtatttgtgtgctactatgacacttgtgtttgggaattccgtcccattttggcgataattgactaaccaaagctatgcaccatgaacatttctaagtgcggttggagtgatgtactagactttcatctgtcgcatgcttttagctgcaggtgtgagcatgatttgggtttggccaaatatttcaaaattaaacttaaattcaaaacgaacgagtttgcttcttcgattcttttctggtttattctttctatgttggttcgggacctagtacttcttcatgtactattatgcaagtgtccgatccaagctcctgaaatgcattcattgattctatcttcaatgcttatcaatattcaggttgagttcttcttttcaacttctagttcactaatttcattcaactccaggttgactgccaatgacttttgttgtctaaaagagacatttgcccataaacagtctcattgctaacttctattggttgcatgagactctatgtgaatatccatggatatacgaggagatgcattttcatatgcttcatcttcttctttgcttaatacttcttgatgtgggcatgtaccagcgttagtgtgcactccaatagctggttttcttccttgatggaaggtgcggtatgcctattctgaggtttcgtaccgtttgccagatctcaactggctctccttctatttggtgggggtacatttcgtgattttgagtatgatagtccctcttgccctgttttcaccagacgtctccggttactttaggggcatgaggagccagagtttcttgtccaattctttttgttcgaggcctctagacaagacgaggggtacctttactttcttcggtatcaccctcctccggtgcatttcgttcatgcaacttagtcaaactcttcgaaatcacaaaagtatttacaaagtggtttggcagttttaattctttatgcaaactgcattcactagtgcggtgtaacatgcattagtcccgaactatcatatttcctgacatttcctatctaggggttcattctctccccctaaatgactggaaataattcttatttgtcaaggaatttaggcttcataactatctccgtaaaaggtttccgactttcggagagagcctattgcaacgcattatgatagtggaatatgcacataaactaaacagatgcaatagcactagttgcaggatggatgttcatgccgatggtctgaatttgcttttagagtccgctgttttcaggactacatgtccttttctactgcggtattacaacaatgatatagcaaatattgcaattcatagcttatagttagtccgattatgcggatatttggtatttcgtgctgccagttcaccaatcatcaaatgcaatgctagcattgtcctcgcggacttctgaagatgatttagtgagttctattggagttcacatgatcttgctggatcagtcttggcaaatacacggtgtctaagagacactggatgtttgctgcttcggaagcgcatttatccatacagtaccaaatggaagccgcatatattcttcgcaatccagttcagggatgctagaacaatatgcggtttatgcattgatctcctatcggtgcatactggcacacaaatcttcatgatttaggaaaattatacatatatgtgctatgaccatacgagttgtaatatttatgcctataattctaagaccgaaaatggctgaaaatccattgctaaaagggtgtaacttaaaacatcacactttttagagagtttaacggggttgacggacaatagatgcttctaaaaagtgcacaattgttccataggtaatatgactgtggtgcattctaggccgacaaattcagttgttgctgctagcaacggtcataatattttccagttctatagggtctggaaataccttcttctcttaaagtgttatttgtggttatgtggaccacaatttattcttttcttttatgtttgggtgctacacaaaattcaaagcattgtaactatgtgctataaaagagcaacaaaatagtaaatgccttaaatatgctattttatactagaaatatttttttattgcggggaaaaatgtgtgctctacatgggcaaaggccatttattcaatccaatattctatttcacaattgcaacaagtgatgacgaagtatattgattcaacgaggtattctggtactgcggattcaattaacttcatagcgagcttcttgctggatagctatggcaattatttattatcctaacatcaattttagggccgatccaatatagcataggagattcttcgtccatagccatgcaaataggctaggagctctccccctcaattcatgatgagtgtgctattaggattgtccttttcttttagtgttcatagttctagattgtttcaccttgacctatgttctactcccccttttcttcttctccgttgaggtaagtgcaccaggctagctgctagtgttgaattcgttatcaactgcgctagttggttttggaagataatgctcttctactgaacactatcccgaacgttacgcaattccattatcaactggtaaggcatacttcttgtatgtgcactagtgatacttgcgtgcaactttcgtcgtgttcggctagaacattaagagtttcagcggtattcaatgcaatttgatgcatcgtgttaccatactctctctgggtcatctgctcggtgaatctagttgaaaatacccattcttgcttataattcttgctctatgagaggtagggtatgtaccatactcttctaaatactaacacgcttattcttctagcctactcattcatgagagtagcttggaggcactggcgagagtttgaaatgctagatcaaactcatcgagtcaatgcctatagcgcgattggattaacggtaccatagagcttcttgctctactgtaattaaaatatgtcagagatactctagattcaacaaattttctaatccgtgatgccagtcatctttcgttattcaaaaatatgcgcaaattaaatgctggtaaaatgcacaagtgttgcaatataatggtacacaaaattcccgcaaacaattccagtatatactatgaaattctattcattttaccgcaacgatattaattaaaagtaataaaagcatcacaaataatcaataatcgtaaatgcgatagataaatttcataatcatatatatcagcaataaaagtacctgaaatacaaagttgggttcgaaattcaatgtcccgtggctcttttatgcgagaatatgattttggtgatatttgcaaatttcgaatgccactcaaacaaaaatcccaatacagagggttaattgtgtattttctgaaaaatctagggtttataaaggcaaatttcctatgcagtagaatatgcacttaatttctaaaaaatacgagggcatttgcaaaatcacgggaatctttccatttttcctttttctttccttctttttttttctttccttttctcttccttatgctttccttgttttctcctcccccgattgcgtcgcctgccatacgcggcagtcggccggcggcgagcggcggcagtgcacccgtgcggcggggcgcggccgaggcggcagcggcgcgggcgcacgttggcaccgggcatggcgaaccaagggcggcgcggcggcgggggcgcacggctatgccgcggagcggcatggcgcggcggccaggaggcgcggtgcggacgcgcctgtgcggtggcggtgcggccaggcggcgcggccgtgcggcggcgggagcgctggccggcggtcgcgatcgtgcggcggcgcgagcgcgcggcgtggcggtggactcgatggcgcgcggagcggagtactagccggccactcagtggcctcggcggcgtgcggccgtgcggcggcagacgtcggtggcgcgacagccgaccgaggcgaagggcgcgcgcggcgtgcggcccttcgtgggcgcggcggacggccaggcggctcacggcgtgacgccgtgcggggcggcatgggagcggtctgggcggcacggggccgtgcagcggcggtcgtgcgtgttgggaatagtcccacatttgaaagtttagggggagtggcaccaacttaaaaagggaggggtccctcacctcatgagctagcttttggggtgtagaaaggctttctcccggttgggccaacgtctcccggttttgggccaacagtgcgagcgcaaggcagcgaacgcggccggatgcggcgcgcggtgggcttgccggtgcgcgacgtagcgacctctgctcgggatcgaccgggcctctgcgggtggtgaggcacggcgcggcgaggccgacggccggcaggggggatggtcgtgcggcggctgcgcgttcccccctttttcctttttttcattttgttttgtttcttgtttcctcgcggtgcagagcgcagatcgacgcagctcacggcggcgcgttgcggacgcggccgtcgtggtgtgaggcgtggtggccggtgcgcggccagaatggcgctgcttgtcgcctgggtgttctccccttttcttttctgttcttctttttctctttcctccatggccggtgccaagagtagcgcaagcggcggagcgacaaccgacggcttcgcagttcgtcgcttggcagccctgcggtgtgatgctcggtgttcaacggtgtgttcgaccatggcagccaacggcgagtccacgcgatggcatgctctgttgcctgtccccgtctggcactgtgtggcagaggcgcatctcgtgcggatagaacaccccaatcggcttgtgccggtgactccaagtcggcaatggcggtgttcatcgggagtcaaagaaaaccagaacgagaacacagagaggaattcgttttcgcgattgaatcagcgggatgcaatgcaaatcttcgagttattacccttcttctttctcggtctccggtagaacatcgtgctgataacgtattacgcaacccctcctgctaccgaggtagtctaagagggattgagtaattctacaaaagtggagatacaagatatgaggttgtggcatcctttctcattcatccattgtattctcaagtgtacaatcctcctctctactcctctatttatagccattccctcttccaccttccatgtttagtgatgggcccaattagtgagtaaccgggccgggccttcatgggccaacggtttcctaacaagtatttgtgcatttaatgtctactttatttacatattactatgtccggtttttaataatttatacatatatccatgccttgcaacgagagattcaattttctattagctaatgattgctcataacattatttagggtgtgttcggcacccctttttcccaaaccatctctctcgttttccgcgcgcacgctttttaaactattaaacggtgtatttttttcaaaaagtttatatacaaaagttacttaaaataatcatactaatctatttttttaaagaaaatagcaaatacttaaataatcatgtgttaatggactgctccgttttcatgttactgttccgggttgggaaccagcgtatgcgaacacacccttagttttgttgggtctgctttctccagtttttttttggtttttttataaggggcacggtatgcgcatgaagtaggtgagaagggtggatgatcaactctgtttttatgtagtagagataagtaggcaagcaaagcataatggcgtgattcttaaacaggaaaatacacatattttagaagatctaacaatgcatcaaacactaggttagtactaaccctatacaccatttatcctagcttcgcccatgtcccagcatgccgcatggatgatggtcacgatgaaggcaccaccaccttctctgcccggaccactgccactgccatcttctccgcctaaaccaccgttgctgctaccttctcctcttggaccgccatcgtcaccaccttctctatatggaccaccaccaccaccaccgccaccctagaggaaaggggagggaattggaagaaagaaggagaggggaaagggcatcttgcactcgaggaggctgcagagctcgtttgctcctcagcctccgccggcacgcgttccctcaagagttttgaatccactccccatatatggtttataactctagatattgattccataataaggcccaattccaacatactaccttgcaaagataattctcagcagctggtaaatatttccatgaatgatattatatatgtattatatgtattgaggaacgagacaagaaatataatgcgacaattgtaccattatacatacgaataagaactataaaccatgtaagggcgtgtttagttggagggaaagaaaatttttaggtgtcacatcgtacgtttcaccagatgtcggaaggggttttcggacacaaatgaaaaaattaatttcagaactctccgggaaaccgcgagacgaatcttttgagcctaattaagctgtcattagcacatgtgggttactgtagcacttatggctaatcacggactaattagtctcaaaagattcgtctcgctatttccccataactgtgcaattagtttttctttttatttatatttaatactctatgtatgtgtccaaagattcgatgtgatgtttttgggaaaagctttttaggaactaaacgggccctaaatgttaagatcaagcaatatgcatagttaagactagggtgcgggctgtaacctcttctcggcgcaattgatgtcagctgtttgtgcgccgttgttctgggccacccaagcgtcgttgttcttggccgcccgagcgtcgttggctggttgttgaactcgggatggaccctgtgaggattgtccggctgcggcaggaaagccgagttgaggtactgcatttgtctcgcccatgcatctccttccggaaaggttaatggattgaaagtagtcttcctgagcaaggaaccaagtgcattcaagtgttgggctggtgtcggttagagtcttcaggttcacgaggatcccccagatcatccgaacggatttcgccctcttcagtcttcatgcacgtccgccacaacgccatcgatcatgttcacttcacttgaaaagttggatcttgaagactcttgatcgttgaggctgtgtatagcggagggctcacaaggatctatgctggcatatgcgatcatacagtcttgggtcctgcagggttgtcgttgttcacacgtgcagctcgagattgatcttggtgtcggtgaatcacacaacaatgagctcgggtcgtagatctagtaatcatctagaagaccttgcagctagtaagggggtgactttttggtttgtgaatcaggcaccactccttctatgggatgtgcacgggatagctcgattttcgcaggccttgagttccgctttcacatgaagtatcaccttgcagtcgatcaaagggtgctgcgatgtctcgtggatcgagcaccaggtgttgtcgttaggtggagatttcctcattggcaccggaccattgtcagatgtcatgggcttggccgcttttggaattttctgtagagctgaagttgtcggcgccctcttttctgactggatgtgaggagcggccagcgctaggttgtcttccattgtccttgcaatgttgttctcgatcctaactggctttggggaaggcgagattggagttgcagtgaaaacagggaaaatgatgcatccgacttgagtccatgcaaacattggctgggtaagatctgccaggccaagaggactgtgggcatacactactacaaaaaccctcatagagaccagctcataggtgccggttcatttaaaatcggcacctatagagctttccccactcctcgaggctgaaaaattgtagaaccggcacctttaaacactgtagaatcggcacttatactataggtaccggtttttttaaaagaactggcacatataatatgttataggcaccgtttaattaaaaaaccggcacctataatatattataagtaccggttaaataaagaaccggtacctatagctttgagccgagccgtccagccgatcgagcccatccgcgcggatccacacccggcgtccttatctactccctcgagcccatccgctctcgcatctctctctcccgcatctctctctctcgacatctctcgctctctctcgcatctctctctctctcgacatctctctctctctcgctctctccatccgcgcgagctcgcaggcgatgggtggcggcggcggcgccctcccctccgtcggatctggagggaggggaggcggtaggcggcggcgccctcccctcccgccagatctggtgggaggggaggcggcggcggcagccgccgccgccgccgcccggaggaacggaggcagcggcagccgcccggaggaacggtggcggtgtcctcccctccgccagatctggcgggaggggaggcggcggaagcggcggcggccgcccggaggagcggaggcggcggcagccgctcggagtagcggtggcggcgtcctcccctccgccagatctggcgggaggggaggtggcgttggcggcccggcggcggcggttcgttctttggtttttttttatgaatgttgttttcgatgaatgtgatgttgatgcattgtttgaatgtgatgaatgtgatgaatgtgatgtatggatctgagaaatctttgggggaaatttgggatttggggaaattttgggatcggcttgacggctcaatgcatcggctcgatgtattgagccgatttttttttgctcatgggcgcctcaaaggtgccggttctatttttgctataggtaccggttgctagtattggtgccgacctattggtgccggacggaaaaccggcatattgccagtttccaatcggcatcaataggcctttatgtactagtgatagttgtcggaaatccttgagcttgaagccatctcagcgaaaccttgagcaccaagtttctctagctggtgcgccattgtcgacggggacacccgtagaccgtatcttgagggtattagggtatatcagtacgaggatctatatgaaacgatatcaaggactccctaaatagtactctgactccgattcggggagatgatttccttatacactgttaaattccattatctctaaggtaaccttcccgtatacttaagggtatccttacccatatacttcattacacaaggatagaaggtatgccttatttgtataacccttaaaatcatctatatgcttaagtggatattccgatgttgattttgctggttgtcgaatcgacataaaaaatactagtggaacatattattttcttggtacatcattagttgcatggtcttctaggaaataatctagtgttgctcaatcaaccactaaatctgaatatattgctgctgctagttgttgtttatagattttttttggcttatatcaactttgaaatattatggtcttacttttgagaaagttcctctcttttacaataacacgagtgttatttaatattgctaagaattctgtacaacactcacgcacaaagcacaaagttgggtttcaagtttagtcaagagttttgtgaggagtactattgttgcactttgtaaacatgaatagaagtaataaagttcaatctactttgagatatcttcgatatgtgtttgctcgtgtttcggtagtcacaccgacgagtgtacgacggtccgatcggcggcggcgataggcgacttcggcgcatcagccggtcagaccggtgaatctactccgatcagaccaatctacatcgtaacgagagtaacttttaattccggtaaaagtttggttttttagtagttcgatcattcacccctcatctggttggcttaattagttctttactatactgtggcgatcccacattagtagtgtgttccacttaattgattgttgattgagtgatttaacaagtgattatttcatccattcattcgcatatagtacaacgtaccggagagttgatcgatctagcatgcccgcgagagcatgcttaggtcaccagttctcaaattagcaattctctctttaccacataggtaaagcatatcaaaccttctatcgatgcaaaataaacactcatgtgaacttggcgcatctttaaaaaaatccttagtccatatcatcgaattggttcaaacttatttatgatgtttgtattatatttgggaagtataggcacatgagaaatattcccggagagatgaaaatccatctatgacacaaagtcatggctgtgtttagatccaaactttggatccaaactttcaactttttccatcacatcaacctatcatacacacacaacttttcagtcacatcgtaccaatttcaacccaaacttccaactttggaaggaactaaacacaaccaaaaacagaaggtacagatggtcgatatgatggaggtacactcaaacaggaacaacatagaaaccaattgcgtcaacatacgacgaggtgcgtccaaagaagccaactatgctgccatcgctgtgcattggagcctcgaaacgagttccggttccttgtccaaaaggtccatatctatcagcattggtggtaaagtggattgacgtgataacactggagaatttaccaaatggaccaattgtaccatatactttcgtcacgaattcggaagggccaagctcaatctgcaagaacaagattatgaacgtggttgaaatactttttatctgagtttcaagaagaaatgaacgtagaacactgaattaatggacacctaccttatgaattctgcctccattcccgccccacggacctgcagcgtgcttgtgcccattcttgtcagcatatgtgaatgcaagtgagtcgacgacagcaccacaactaattgttatactctccagacgttggggttgcatagtgatgtcgatgtcctgagcattccctccatttccaccccacggcccaatcttggtgatcccagcctaacaatcgattgcaaaaccacatagtgaactttaaaaatatttctgaaacatatatagtgggaaaaatagtctaaactctcaaaagaacattccctcgttgtatgcatgtcatccaaatggttatgaaaaaaaaatcaacaagagattaatatatgataaatcactctacaaacttgcaagttaaaatttaactttacaacttgcaacgaaaaaacaaatttgactgcgactatacgttaactagccatagtttaatttgtttttttcattgcaatttttagaagttaaattttaactttcaaaatgtttgtaaagtgatttatcacatattaatctattttgttgatttttttaaaattttttataatcatttggattacatgcaaacaacgaggggatgtgtcctcaagtgtttagaatccacacccagatatcaatgataaaaaggaaaggaagatttgaatcaaagtatatgtgtgtgtgtatatatatatatatatatatatatatatataatataatatatatatggctgtgtctcaaatggctgaattaagtctatgttggatccctcaatttcttttctttgaccgtgccatgccgagccagcccaccgtgccgagggagcagcccaggcatggcccggctgtcgggctgagacggcataggcccaatcccaatcgggctgtgtcgtgtctgggccgggccaaattcctatgccttatgccgggcctcgggcagaaacaaacacacacacatatatagacacacacacacctacctcttgttcgatcttttcttgttcagggttgatatagacgccgattgcattgacatacagatctcctcgaccgaagaagccaataatgctggcattgttacgcattggaacctggaaaggagatccttctacttgaccgaaaggtccgtaactacgggcattagtgatcaaagtcagcgatgttacgacatcttttgcaagggtactggatggaccggttgttccagaaaacccaatcagaaa

SEQ ID NO: 1598 - DNA, 2663 bp, Oryza sativa
gagacacattcagtgaaaaagaattggaaatggtaatattcttcttattcaatgccccatatgcaatatggatttagagcgagtacattatctaaccaagaattttgagcaatcttgttcaattatgaacaattgtgagcaagcatatttgctacactggagaaaaatgcagatgtgctaaataactggagtagtagttgtgctttctagtaggctagtagtaagtacaagtgctctagaatctgttatgcagttgatagtcaaacatttgactgatgacaaggacaagatgtcatatccataacacaccctagcgttctcagtaaatattgtgttagtcaaaaactcaataatgcaataattccagagtctcttgcagttcacagtcaaaattctcagattgattccattgcctcttctaatgccagccacatatgaataactgatgtagaaaatatatacatcaaagtgtaaaggccttaccttcggaatcaggtgtagcaaaatattgtatataccccagtaataacagcccaaaagctattagtttcatacttccttgaaaattattatcaatttgtttaattttcaggaacagaagcactcttgaatacactgtgtttgctttcttgatggaaaatagaagcactttggatttgaggtctgcactaaatagctgcatcaccgaagaataaaataaattgtgtgagactcacaaggcttaaagagtaaactgagaatacagatattgaggaatcttcataaattcctgccaaaattgaaaggaagtgctttaacccaaacaaggcaagaatctccttaaaagaacattcagactgtttgggattctttctagagataattattttatttttgttgcaaaccatttttgatttcttgcatataaaaaacatgtgatcagtcacctgactgtatgagtcttgcagcggtcactaaacctaaccggatttctatagttacactgtaatcgattgcctgtacaaatatggggtggtccaaaagaccttaaactgtctaaaaggttgtccttaaatatgaaaagtatgttactattgaaataaaggttgtcttaaagaaataaatgtaaattctaaaccattactggagaagttagaagctcaaaaaaaaagcccaaaatgatttaggggaataaactgagcaaaaggaaaaacagagacagacaagctgtcctcttctctttgcagttacgtagcagcttctcaaagttcacaccctgttctgaatactacttgcaaagaacctcaagacgcgcaaagtaaactcttctctgaattctctcttgatttccgagaaattttagctctggagattgcagacagaaacctctgctgttctgcagggtgtttgagctaacagcaaagcttcatccatccctccaatggtgatgcctcttctccccaagtcccaacataaacctccccaactcaaagaaccattaaattgagaagaaatagaataaattcaccagatgacacaggcaggtgattgaagcaaacaggcagagaagagggtagaagagaacagattcagaagtcaaccatgcttgctgttgctgtactaccacatatattagagagtggcaagaacttaccaagaagagagggagaaggactgtgtgctgctcctagcttcctaaaaactttcttctttcgtacgagagattggaggaagaagacgacctgaggtctcagagactgagctcaggccttatagacaagtcatggagctcagctgctgactgaaatcttgtgtgagcagtatttatgtcatgagagctcatcctggaggagacaatggagacactgtcattggagccatctcattggatgttgcaagtttgcaacggacggctcagatcagatgcaacagagaagattctccactgaacactcgatctcagccgcccaaaagggaattgtaaaactgcagataccttgataactttcgaagcaccgaaagactgtatttactagttgattaaccgaaattagccgaataatagaccatctacatctcctaacattttatagagaccctcctctgtgtgtgttggcatgagattttttcttagtactttttttaacgaactggaataaaacagtgtcaatttcactctgtacagatgtcaaaaagaaactttgtgtacaagcgtgaacgaagagttctttttgttagtatttggtgtggacatagggagtgttgaacttaactgttaggaatttgtgccttaaatattgttaaggattctctgcttccttgaccccgttgacttaagaaaggtgattacccaaactaccctgttcattctttaagcaacacgtactctcagtcaggtcacactcagggtgtgtgtttagttcgtcaaaagaaatttttcgggtgtcacattagatatttgaccgaatattggaaggggtttttggacacgaataaaaaaactaatttcataactcgcttggaaaccgcgagacgaatcttttaagcctaattaaaccatcattagcacatgtgggttactgtagcacttatagctaaacatggactaattagacttaaaagattcatctcgcgattttcatacaaactgtacaattaatttttatttttatctatatttaatg

SEQ ID NO: 1599 - DNA, 738 bp, Oryza sativa
gcaagttgaagggtgatctctatcttgtcgattttgatgtggatagagtgaatccggaagcttgtttaattgctaaatcctccatgggttagctacggcatcttagactagcccatgttggaatgcggaatttggcaacccttctaaagggggaacacatcctcaggctcactaatgtcacatttgagaaagatcgtttgtgtagtgcttgccaagccgggaaacaagttgggaatccacatcctatcaagaacatcatgactacaacacgccctcttgagctttttcgtatggatctattcgggcctgtggcctacataagtattggaggtaacaagtatggttttgtcattgttgatgatttttcccgcttcacttgggtgtattttctccatgacaagagtgaagcacaagatgtcttcaagcacttcgccaagcaagcccaaaatctttatgatttcactatcaagagggtgcgaagtgacaatggaggagaattcaagaacactcaagtagaggaattccttgatgaagagggaatcaagcacgagttctctgccccttatgatcctcctcaaaatggcatcgttgagaggaagaaccgaactcttattgaagccgcaagagcgatgcttgatgagtataagacttcggatatcttttgggcggaggccgtgaacaccgcatgccatgccatcaaccgcctctacctccacaagcttctaaacaaaacttcat

SEQ ID NO: 1600 - DNA, 18883 bp, Oryza sativa
actctgtccatgacttcacttacgacagatactttggtgactcttagtaggcttcctgagcttttctctctcattttttcacttgatgcagcaaatggtatttcaaatatcctcaaaactgtgcagaagaatacattggagtcaggtggtaaaatctttgtgccggatggggggtttacaaagttgaggttgctccgttttacggcaccagtgctaccacctctgagcttcctagaaggggcaatgccagagcttcagaggcttgagctgaggttcagaatcattgagtttgtatacggcctggaaaacctttcaagtctccaacaggtatttctgacctttagcagccaggcacctgaagatgcgaaagagaaggtctctcagatcaaaggactggcaagcaagattcgaaaggctgattcctccaacattagtgtggtgatagatgagtacaacgaattatcaaaagaacaatagattacctagtcatgatctccacagttggagggaaccagtgtgttatcgatgtgttgtacctactccatctacagtctgtttttgttttatgattttcagatctatttacaattttttgtactgtttttttgttgagctgtggcatctttgttttgtctgctgtactcccaaaactctgctagtgaaaaaaaatatatcttctgttttcctaagaaaactaatcaatataaaggtgtttcaccaattctaataccattggcctacttaaagatgctatttatttgcctcgcaaatttcaacttaaaacaaatatctgttttcagtctctaatggggttcactgatccctgacaattaattattgcctgtagaaggattcactaatccaagttactgccaaaatttttttaaaccaaatttaatttctagtaattccagaattctaattagttcctgtcaagaaaatgaattctagttaaccatgtacttgtgtttattctagtcaacaatgcgtgtaacatgcatttgtttctacatccaaatattccgtaagaaaacaatgtatttacaaatactctaccttactggaatcaacttgtatagtgtcttgattttattttcaacgctaggagttctgcagttttttatttcattggagtgtaacattttttagtttatctattcctacacacaatctgttttacatcctcacagacgtgactaaatcaaccgtcttaactaaatatcaattttagtttttctctgcaattttaatcaggtggttgtggtcttgtggaactgccaacatcaccaattcatttcagttattttttttatgttgctcattttgcaatttcagttcatgtggtgtgtagtttcctagcttgctctgtatcaacctagtcgattaaattactcccttattattctttcgataatgacctctacatccagcatgtatcagaccataaattacccccttgtgttcctagccaccacttagagtagacaagcaaaataagagaactgaatcaatcatgtgtctgcatcgagatgaaaaacctagtaagccgtggtcctcctgatgagccatggtgctcgacctgccgatggttgggtggaggccgacgaaggaagacgtgaaaaggggatccgacctcggaggaggaggaggtgcatgcgcggagatgtagcggcgacgccggcgtggacggcacagggatgccgcgcccgcgcgtgggcaggaggtggagaaggggggcgccggcggggaggacgtgcgccgtgtccctccggtggccggagcggaggaggaaggagaggcggagcagatctgacggcccagattgatcttgcgatattgggccttcaagtgtctcctggcatgatggcagcacccttaaacgggcctccttcatgggcttttgttttggttgtctatgtgggctgtaatttctgtgggccttcacatttgtgggcctctaatggccatggccgtcatgtaatccgtgtggtgagagatgctcgctctcgccgttgccatggcctccaccgccgccgctctccccttatttttcacgaccccacctcctccagtccggtgaccggagaaggggaagaaagaaagcctagaagatccgacggcggcacagattggttggcgctctctcacgcgagtcatacatggtcgccccgctttgcaatgcgtcgagtgggcgaacaggggtgtccggatcgggctggagacgtggagatttgactacgcgcacaaggtgtttgacggaatgacgcacagcttcctagcagtcgaactaccttctgttctggaccttctggtcagtgttgttctacttcgattttactctcagttttgagttgactttatactgcaatgcattccacaagtttgaactgtgtaggtagattttggaacttcaggtttggtttggactttcatgtagaaaattacgactcaatgacagtgtaacacactctagggaatgtaaatcaaatcatagtttacaacagttaacatgatattgaagataaaaaaaatggcacaacagcgacacgcatgactgaacatttacgatatatatcttttttttaagggaaaacagcatatgtgccttttcattaaatatatatcacaatgacataatttataactatagttacatgacacaatttaaagtttatagatgcaagtggctaacagtaatacagaagcgaacgcgagtggcaagttgtgtttcttggctgttcttgtctgcaggctgctattattgtcccggacgtccaatgtatagcaaatcacaataacacaggaatctgttacagattattgacttattacacacgcaatctgcagcatacagctccgaaacaatagtattactcgcagaatcaactttgaacgaacacagcgacacacaaataaaaattacatatacacagtttgctcctgatcatatgtaattacatatatacacagcgaccaacaacaatacagaagcgaccatgagatgtaagagttattatctcaccgctctgtgagatgcattgccatttgccaacaacagtacagaagcttgttcctgctgtctgctcctgaacgagctgaagcaacgcaggctgtcctattgtcttttgacatctctctcacctcaggagtcaggagaggaggacgtcattccctgtggcaacaagtaattaagaagaagttcatcaactaaatttggagttagtttgcaggtagcaatgctagacaggttagcgtgaacagtgattaccttttcaataggagctaggcatggcactctgtttcaccttcatcttctatctcgctctgaaactctgtttctctcctcggtgccgcttcatctgctgcctgaacaacatcctccggcgaattgacttggttgaatcttgttgcaccctctgcctcctcctcaccagcttgattaacttctatttgcatgcctctgatgaaaaggtcaatagggttgcgatgcttggcgacctccttgctcactgcctctactttcctcttaatattggggctgttcatgtaccgtacgttgtagcaaagagctacctctgaaagcattttaaggtttccgatacctgaaggaacactcatctcgctcataggggatgtgtgcaaattcagtcgcagatatgtgagcttcggcatagcctcttcttcgaaggtcagccgtgggacagggcaatcaagggagaatttctctagttctttgaaccctttgctctcaatcactatagcttcttcaggaatgaactccaagcctagtatcaggcgctgtaatttgaccaagcccgcgaggatcttcacatcacctgccacttgtttacagaccgtgatctgcaagaaagtaagatgctcgagcccttcaatccattggggaacattggcgaattttccggctgttactttaaattcatcaagaaatttaggtggatcacttagagaacgcaggaactccatggaacaaccgagcccacaatgaatggttaaggacttaagttgcctccattttcctaaggatgacaatagggcttgttggtaggctttgtcattgcactggtgaaaggcccatgttattgcgaggatcttcaagtcgtgtagatcaccgagatactttactgacctttcggagaattcacttaaatcaatgagaaaatgtttcaacatttttagccgcacaatttgctctggcatgtgctttatttgtgtgcctcttaggtccagcatccgcaaagatcctggctcgcacacttctgatgggatctcacttatgtgggtgtggctgatgtccaatgcattcagggtgcgcagctctttgatttgtggtgggagcttgctgacctttgtgttactgacgctcagataactcagcacaagcattttgcatatctgcagtaggtcctcatccttcaaattctcccagccttgaagatccaacgacaccagatatccaaacttgtctagagggactgttgttctgttgactgcaccagatatgagtagtgaacgagtatgagacaaatccatttcttgcagcatttctgggagctgtggatcgggatggtggagagctagacgacgtgctatccgagtgttcttgccaccacctcttggtgctgagttgagagttgcgctggtaatgacataacccttctctgctgctctgtaagcaagaaacctcagtatgaaaggattgacctgccacaggcacaagtcatcttcatcaagattgtgtccacagttccttgctgctggggtgattatattcctgtcaaccatctcagagaaatgcaactcagacaacagcccttcgtctagccatttcatgacaagacgatccttctcaaacacatatccctgtggcaacatgcttaggtagagtaacgattgtctcaactcatcactgtaatcaaatgatagccagtgttcaaactgtttcagcagcaggcgtacttcttccaccctaggaattgctgagctgccgtgttgctgttgatgttgtttcaaccaatcagccataccagttatgaacgatggtattcctctacatttcatcaatatttcatcacataatagcttcagattttctggagggcaatcgtccatggaaccaaaagcttttatgtggagcagcttctctgaatctgagtgactcagaggcttcatcttatgcacaatcccattataatttgacaaacaccaccctgctatccgctcatcgccagccgtaaacaatattctgctaccacagttattattaggaaatgcacccttgatcaattccaaatctgattcgttgaatatattatcgatcaaagcgaagtatctggagggacaatacgaagagaaaatattaacagaattcgagctctgatgctgtactgtaagagaagtcgtaaataagtagtgctatataattatagcagctgaattaagcaagcagtaaatgttgtttacctcttatccttgaggcgttctgatatgttgcgagccaacagctccaggtcgtcccccaacatcgtgatttctgagctgtttggtgatgatggtgcctccagttgctctatgatctgcttcaggatggtttgaggaacaagcttgctcccgtgaggcctccgggagaagttagccacaatgtggcactggaaatgagtttggcaccggagtcgacggtggagctccatggcaagagtggtcttgccaatgccggcaggtccagcaatggccatgacccggaggctctcgtcggcggccatgagccatccgagcagctcgtttgccgtgccgtcgatggcaacaagatgatcatggacggtacaggcctcgacttgggctgcttgaggcggtgatggcatgagctcagagcgtagaccattgaacacaaggtagagagggtataccttccgcggaatgtcatagccgaatgaccttcggcggcggaagcgccgcgtggcttttcgcagcggcacgcaaggctgattagatagaaatttcacgatagccgtgaccgtattccgcactccgatcagaacactcatccaggtcatcaggtcataatgggcaccatcatcatgatccccaatggaaggcgacatcggcatcctcaggtatgcgacaatggcgcccagttccatctccaggaacgccaaaccgtgcctttcgtgggcgtcggtgaagcgtccactcttcagcagcttagagacactctcaaggaggggctccaactccttcaacgccgcctccttcttctccatgatggaagttcttcccatcgctccctccgacatgatccccggccgcacgcctgcaacactgtacggtaagtactcaagagatagctagctagtgcggcagaacaaaattactgcatcatgtaaacaactgtattgcagaatgcagatgcatgccgaatgcgagctaggcagatctatctctagcttgcctgagagttctgctacttttacttgctttgcctcttctctgctctcccttgttgtctgtcatttccagcttgcaaagcgaagtagtagcaattaattaacactgaactctgcatgcatctcttctcaattactccagtagttttcttcttcttatagcactttacacattattcttgccatgtgcatgtcacgttactaaggatgatgactttgcttccactttcgttcattcctccggtgctatgttccaaaagaagatcctccagtgctattatcaaattaaaaagaagatcctctcacacaagttcttttccaggaaagtaccactccggcaagttaaaaggcgcgcgattggacacaaaacctctccctttggcaacatcaaggtacattggcattgccatttatcaactcctcactacaagccatgcatacacatattcgtttcttctatctcaagcgacacattgcgtaactagtcatgcatgttgtgtgcacctgcgacatggaaaggagtgaagagcaaacactgccgtgaccaagaatggcattcattcccttgtgaaaagaaaaaaatccacatgagattgatcgattgatttggccggtgattaagcgagccagatcgacgatggacctcgtcgtcggcgcgtcgagcgaagccgtgaagtcgctgacagggaagctgggcagcctcctcgcgcaggagtacaccctgatcgccggcgtccgcgacgacatccagtacatcaacgacgagctcgccagcatgcaggccttcctcagcaagctcaagcgacgggacgtcgaccacgacgagcagcgtcaggactggatgaagcaggtgcgggaggtggcctacgacatcaaggactgcgtcgacgatgtcggccaccgcctcggccgcgagccgcgggggagcggcgcggccatctccttccaaagggcgtggtaccttctcaccaccctctacaagcgccgccgcatcgcagccgagatcggcaacctcaagctccgggcgcagcatgtcagcgagcgccgcaccaggtacggggtggagaacctccagggcaatggtggtggtggcggcagcggcagcggcctcggcgtcggagccaacgctcctagagaccgtctagctcctcttccccggctgattggcaccatggagcctgtaggaatggatgctgccattgatgagctccaggagtggttttccaaagggaaggatggcacccagcagaggtacctcgccattgtcgggttcggtggccttggcaagaccacgctcgccatggcgttgtaccgcaagcttggggacgaattcgattgccgagcattcgtgctcgcgtcgcagaagttccatctcccgacggttctgaggagccttgtcaagcagttccatgagaagcaggcagacgcttctgaggataccctccatggaattgagggttggggtgatgaaatgctgaagaagaagctgcttgaacaattaacaggcaagaggtatgattttgggattgctaatatctatctcttcaccacatttttattgtactgtcttactagtcatcactccgtgcgtttgcatactcggaaaacctccaaattattgtatataaagatatttttttttcgctgagaagaccgaaggaggccatccgaatgtattaagaagaaataaaagttacaagaaaaaacaccacaatgcaccaaggtgcatgaccacacaccaacgcactaccacctaagcacaaaccactgagagtgaacgccgctaggcatacggcaacaccacagagacgagactccgaaaacgatgccaccaagatggtcacaacatctagaatgtcaccactgcccatctaaaaagatgtggttttctcccagaaaagctcatcaagaaggggagagggtaaccctcgacagtgccccaaggaggttatgacgcccgaaggcgtagccgctgccggtctggtgaacaccggactagcctttcgcctaggaccctataaccttgacagcagatcgccatccaccacacagaaccaccacatagacaaaaaaggtagcacgtagcttccaccaccgccggcctcctcgtcagttttggtcgaaggagaacccgggattgggtggcactgcttcggtagtctgagcttcccccgttgacaagctgccgcctcaatccaacctaggaactccccgcaaagaaggggaggagatccaggaagggcgagggtgctgaccggcaacgaggaagacgacccaccgccgccagctccctttgcactaccatctaggcatgtgccgacgccggatatgctgccgctccggcaccggcgccacccttcggcgccccctttgtccggcctctgcgccccacctggctgctaagggcaccgcaacggcttcccggctgcccgggcatcgaggcctggccgagccatggggctgctcgcgccggcaccagcgagacacggctgccgcgacccacgccgccgagccgccaccgccgctcccaactgtcgagccgccacacccgggttgctgcaccagcaccacaccgggcaggctgcgccagcactgcctccacgcacctccgcacgctgccacgccccacctccgagcacctcacccgcacgctgccgagccgccaccgccgtgcacctcgcccgcacctcgccaagccgccaccgccgtccctagccgcctcgcgccgccaccacactagatccaggcgcgggatggccggatccggccttcaaggcactggatccgccgcctccccacaccgccacagcgtcaccacctccgaccgcgatgggggcttcgtcgttcaccccgtccacgtcgcgccgaggagggagaagccaagaagaaaggaaaatattgatattcctagttggaaaattttgattattcatttgtgcctggaatgagcactataaaacgttattttataactagctaattacttccaaacaatgcttgaagcaggtaccatatcttggtagatgacatatggtctgtatcagcatgggaaaacattagggattcattccccaagagtgataagggtagttgtgtagtggtgactacaaggtttaactctgtagctgaagcctgccgccgtcaacaaggtcatgtgcacaagctcaaacagctcgatccagagagctcctacaatttgtttcttcagataatatctgctaatgatctgtgtcccattagacctattaatgctcgcattatcatgaaaacgtgtgggggtctgcctttggcaattgtagtagtagcagggctgattgctagtaaaatgaaatcaaagattgacctgacattggatcagcatttggttgatgtagatgaggctttaagtgcagagttgggaagcaatctcaccaccgaaggagtaacgcaaataattaaccactgttacaaaaatctgccacctgatcttaagacatgcttgctgtacttgagcacatttcccaagggccgcagtattagcaggaagcatttgataagaagatggattgctgaaggattcattactgaagagcatgggaagactgctgaggaagttgcagaagacagcctcaatgaactcattggcaggaacttgataaagcctatcaaaaacagcagcaacggcagggtgaagagctgccaaattcatgacatggtcctccagtacattgtctccaagtctagtgatgagaatttcatcgccgttattggcggccactggcagacaccacttccaagctacaaggtacggcgattgtctgtccataaaagtgataagcaagaaacagacatggtagagaggatgaaattgtcccatgtccgatccttgacagtattggagagtttcagtgctcttcattctactatgctcaagttccagatactgcaggtattggaccttgatggctgcaaggacttgtcccacccacatcagctcaagaaaatatgcaacatgtatcagttgaagtacctgggcttgcggcggacagatattgacaagatcccgaagaatatagggaggctggagtacttggaggtactggacattagggagacaaatgtcagaaagttgcctacatcatttgcaaagcttcagcgaatgacccatctacttgctggcaacaaaagcaagcggacagcattgaaattaactgaggaaattacaaaggtcgtagctctacaaacactttccgggattgagatcagtggaagctcaactttagaagaagaccgggagcagccacgagatatgcccatcagacactctacaaccaccagagccgaggagagaggcaacactgccttgcatggtccacataaagaagctagcaaagtggaccttccaaaacagctgcgtcctcttgaagccttggagaagctcaccaaccttaagaaacttgccatttacaagcttgtaaagttccaagcgaaagacgatgagttactgctctctgctattgagcatttgagcagttgttccctcaagtttcttgcaattgatgacagtttcacaggtttccttgaaagctcactgagttcttcgcaagcagcaccagaacacctgtacaccctcgagctttctggcatgttatctaaagcgcctggatggattgaccgcctgcacaaccttgagaagcttactctgtcattgacttcacttaagacagatactttggtggttctgagtagcctgcctgagttattctctctcactttttcactccatgcagcagacaatgattcaaatgctctcaaaataatacataggaatacaatgaagtcaggaggtaagatctttgtgctggatgagggatttgaaaagctgaagctactgcattttgcggcacctgtgctaccttctctgagctttctagaaggagcaatgccggagcttcagaggcttgagctgaggttcagaatggtggactatatgtatggtctggaaaacctctcaaagctgcaacaggtatttttaacagtcagcagccaggcacctgaagatactagggcaaagacatctcatatcaaacaactggcaagcatgattcaaaaggctaagaattcccctaaccccagtgtggtgatagatgagtacaacgaactagcaaaagaataatggatgatctagacataatccgcaattgcaatgtgccattgtattatcgatatgttgtacctactccatcagttgtgcctttttcttttatgactttctgatctatttacaaattattgtactttttttttatgatctgtggcatctgtatttcgtttcatctgttgtaccctaaagtctctgcaagtataaagacttatcttcagctttccttagaaaactaatcagtccagaggtgtaactagttctaataattatctttctaactcaatgtgctattttttatctctctcacgaattgcctagtataataaaaaaaaactttgtcttttgtcactaaggaagtagactaattcacttatttctatctacttcaagaattaattagtattgtaacaactaatcttgaattcttgggtgaatgaattatgattgagaatcaagcacctatcctttcctcctatgtcaagtacaagaattgctcggtggcagcagctctgcaagattatgcttgggtggccactggccaatatcagaggggggttatccttgcaaggtactgccgattatttcaagatttgggatgtggtctcagagtatccctgtgccagggattctatgctctggttggcataggctaatggcgatttctctgtcaaatcggtgtattcgctgctctgtgctcggtgaacaaagtgtgccttgggcagaattgggtgcaaatccagggtgtcggcacgttgcaaattcttcatgttccttgccatgcgaggagcttgtcttactgccaacaacttgcagtgtcgcaggtggcatttggtgagcttctgtcaccttggttgctgtgatctggaaacctgcttgcacatctttcactgttgcgcatgcacggtgcatgtctggaatgcacagccgcctgggattcatttgcccacagcctacactgcatttgcttccctggtggctcgcagtccgcaagacgatctgcaagcaggagcagagagccttcaatgcaggtgtgatcctagtgacatggcttatctggaaggaacagaacgcccgtgtttttgaggggaaggccactatggtgtttgcgctatgtgtggtcatcatagatgagtggcggatgtggaaggtggctgctctttttacgctgggcctggggtgcatggggcactgcgtgttctgatgtgagaatttttggcattgttgttgttgcggtgttaaaatctgtgatgtggcttgtttcgttctctgattgttagggcgtgctccggcgctttggtctgtaagccatgtgtcctgtaaattctgttttctcccattcttaataaacttcggccagtttctgccagcgcggaggaaaaaaaaatcgaattcttgtctcaaggattcaaccatccctgacaacttcctaaaaagtaccatttcgaccagaatttcatttttaataattgtagagttcaagtgaactctgtgtgtaacttttatatgtttatacatctaatattccttaaaaaattaaacaaaaactctttactgcaataatcttgtatagcatcttgatttgattttcagtgctaggagttctgcactttttagttcaccggaatatgacttattgtttattccgacatccaatctgttttaaaactaaatcctgatatggcaattcctcacagatgtgaacaaatcaaccaccttaactaagcacaaaaatttagtttttccctgagattttaatccagtggtggtggaactaccaacattaccaattcatttcaattaaaaattttctgtttctcattctccattttcagttagctggtgtgcagcttcatagcttgtttctgtactaaacatattgattaaaattacccccttatgttcctatgatgtgttgaactgtcaccaccatttagccacaagcaaaacgagaaaactgaagttttgcatcagatcagatgaaaaacctggggagcccatgatggcctcttgaagtcttgatgagccctgatcctcgggctagctggtagctaagccgcggcagttgaaagatgagagaagaaagacgcatcacgccaaataactgtaattttacttccccatctggctatataactgtaatttttagtgtttttttcttaatctcttgtaataaacttccttcactatgtatttatatatttatggtacactcgttccctacattctcctaaggccttgagtaggcttctgtgtaaactgaaatcaagtagaatgaaaagtaaactggaattagttgcaggagttaatatgaggaaacttacatccaaggcagaagcaaagggtcggtttcctcctcggcattctatcaaacagttcgtgggcaacaaatatttgtagccttcagaccatctgcaactgcaagctaggccccaaccttcgatctgcagaatgcatctgcagcagagacgagcgaatcaaacattgagtgatcgatcggtcggtcgccgcacgacggcggcaacgcacagcaaatcgggatggacgtgtgtcgcctgggtgagaaaagaggttttacctggagatacatgatactcctggaagaggcaagatagcctccacattccccctcctccgggcacacggccgccggtcaccggtcgccggtgaggtagccgacgcccgacgcggacacggcggcggggaggccggaaggccaccgccggtgagagtggtattggaggttggaatcgacgtttcgtcgtagccgtccataggaaaacggacggttcagatcgtggtgtacgcagaacgacaaatcaatgctgatggttaattgagttttaattgttagtattagtactataaatttataaaaatatatttattttatatacttttaaatatatatagatatatatactccatctgtttcacgacgttttgagtttggtcaaagtcaaactaattttatagaaaaaatagtaatatttttaacccaagacaaatatattataaaaatttatttaattatatatttaatgaaactatgctggtattgtaaatattattttttttaaattaattaaacttataataatttgattttaattaaagtcaaaacatcttataacctgagggagtatataaagttttatcataataaaaagctcgcggattaattaagttttaattgttatagatttatttgataaaaaatctatatcgttttgtaaaaagtatactactactaccgtttaacagtttattactaacaaaatcaatctatatctaaataagaaaataacgggaaagcagcattctgcgtggagagagagatgcttgctcgccgttgccatggcctcctcctccgccgccgccgccgccttctccccaacctcccaccactctccaccgccgctatctccaccccgtctccgcctccgcctccggatgctaccctcgatggtgccgcgcccggcgaccccggcgcgctcgcccccgacgacgccatcgcgtccctccccaccgtggcggactccgcgggctccgcggcggcgctggcgctgttccgccgcctcgcgtcgcgcccggacctgcgccgcctcatgcggctctacgtcaccgcggccaccgccttcgtcgcgagggggagcctcccgatggcgcacgaggtcatgcgggggatggtggccgccttcggcgaggccgggaggctccccgaggccgccgacatggtcctcgagatgcgcagccacgggctcccgctctgcgtcgagacggcgaactgggtgctcagggtcgggctggagaccgggagcttcgtgtacgcgcgcaaggtgttcgacggaatgacgagggccggtgtgtgccccgatgagcgcagcttccgggcgctggtcgtggtgtgctgccgggagggaaaggtggaggaggttgatgccttgctggcggcaatgtggcgttatgggttctcgctggataacgcgacgtgcacggtggtcgtgcggtcgctctgtgagaagggacggttcaaggatgtgtctgagttcttcaggaggatgttggagacgggcacgccaccgaacgtggtgaattacactgcatggattgatgggctgtgcaagagacgctacgtgaagcaagccttccatgtgctggaggagatggttggaagagggttgaagcctaatgtgtacacgcacacaacgttgattgatggtctctgcaagattgggtggacagagcgggcgttccggcttttcttgaagctcatcaagagtagctcgtacaagccaaatgtccacacgtacactgtaatgattggagggtattgcagggagggcaaacttgctcgtgctgagatgctattggtgaggatggttgagcaggggttgaaaccaaacacaaatacatacactacgcttattggtgggcattgcaaggggggcagttttgatcgtgcatttgaactaatgaataagatgaagcaagaaggcttcctacctaatatttacacatacaatgctgttattgatggcttctgcaagaaaggaaagattcaagaggcttacaaggtgctccgaatggccactagtcaggggctcaagtttgataagataacatatactatactgataactgagcactgcaaacaaggtcacataacatatgctctagatttgttcgatcggatggtggaaaatggttgctgtcctgatatagaagcatacactagcctcatttctacatattgtcagcagagacaaatggaagaaagtcagaaattttttgacaaatgtcttatgataggactactgccaaccaaacaaacgtatacatcaatgattgcagggtactgcaaagtgggaagatcaaccttggctttgagggtctttgaaaggatggttcaaaatggatgttttgcggactctataacttatggtgctctaataagtggtctctgcaaagaatcgaggctagaggaagcaaaggctttatacgaaggcatgcttgataaacgtttggtgccatgtgaagtaactcgtgtcactttaacttttgaatattgcaggagggagaaaacaagcattgctgtatcagtcttggatagattggacaaacggcagcaggttcatacagtagatgtagtagttagaaagctcagtgccttgggagatgtggatgctgccagtctttttcttaaaaaagttttggacgaggattatgctgttgaccatgcaacttatactggcttcatcaattcttgttatgaaaataatagatatgccctagcttctgaaatgtctgaaaaattctcaaagaaaatatctagctttaaagaaaaaagatgatttagcaacagccattgcttgatcagaaagggtggtgcattgcttctactgatacagacaagaaattctacagtaggtcctcaatctgacttttttcacatgctgccatattaatcagtttttggtaaaaatgtgtcctttcttatttctttactgtgctcctgttgaagaaatctttcccagttctagttggtcaaaattttgttcttatatacttactagtcttaaaatctccagttcaaggtatagacctgactttctcaaatggagtgggggagaacttgaagatagtaatggcatcttctttgcataaaattctgtgagaactgagaagaaacaaggtcattcgttgatttgatggagaaatggtaacagctcagcacttcagtagtgttttagtttgatcctagtgtttattcttctaacacatcattgtatcatttgcctacagaagaacaagtctttcttgaatacttgggagatagtagtcactaacaaaatccatctgtgcattgtataatgaaggttatttcattaaccattatactggttctgaacaattagttcaattttgtacttaagcaacaaggatgttgtttcatagaaaagttatccattattcctaccatctgaaagtttctgctgtgtggatggttaacaatttgattttatgcttattccagctattcatgtatattgctatattgttgacaagctttctaggttttatcattacatggccaaactccagtctgttttaattcttctttttatttttctttagtaaacatgaaggcatggaatttttgcatgcaccatagactacagctgtcagctttaacttgttgccgttcatggttttctatttttacattgtatattacttacaaggaatcctcaggttatccaatttccctgcattctgtttcgacaaagaaaatgtccaggtattcgtaataggagtcacactattttgaagataaattatttttacaataatctagaaatgatatgtagaatcaggctccacaatacaatttacaaatctgattcatgcagtgctgcaggtatgttacacatcaacgttcctgcttattttcattctactttctgtagacctaaatcttatatgagcagcactaactttttcctgtcttcagtggttctggctgtgtgtggctggatatggcttttaaactaccctgtctacccacaatatcagggtgtttgggactataggtatcaggctatcatctaatgtcctgcaaaaaatggggggtgattagttatgttgtctgttaacaagcaatacagaaatttttttagatgaaagctcaaccagaaaactgaccaaagctggtgtggatgctggtaagtccaggaaattactttccagctagcaaaattggtgcttgattgtattggttgtcaaacgtgggctgcctcgacgatgctgaagatgtctgtcttattttgttatccttctcttattggttctcatgggatatttctggcctccatggatctttctgcatcttgtttgtttccatgcacattgtcgtatgaaatccactctccaccactccaggtttgtgccttatagtttcattaatttttcctctctttctttggttgcatatttgctaatggtcagcttcattagtcctgtcacgctcacagctttagcaaaaatctgtgagaaaaactgttaacttcatttctttggttgcatatttgctaatggtcagcttcattcctcctgtcacgctcacagctttaacaaaactgtttacttcttgagattttattaggtcatttattcagttcacactttcatacttgtctggattttaaaaaacgtgtcatgccagaaaagaaagggaaggccaccaagacagttccggaaaccaggttaaaaaaaaaaagct

SEQ ID NO: 1601 - DNA, 2631 bp, Oryza sativa
  unsure (1)..(2631): unsure at all n locations
gctccttcaccctttcttgggaaacaagtgaagctcatgtgatacaattgtatgatcttccagttatctgccactggatagctgaatggcttcctggatattgagagactcctcactgaagctgaacagcctgcgctgttggttcatctcatgctgatgccgccgggcaagttcagccacctgccactcctcccattgctccgctgggacaacattgccttccagcatctgcacaacctctgacatagcagggcgaagatgaggctccacatgagtgcagaggagtgctatttggatcatcttctccagctgttgcaaatcgtatgcagtgtccaggttgtggtccacaatgtctgtcaatcgtcctccttgcaccaaccttttcaccttcacatgtaccaaagagtcaatcccatcagggtcatctatgtgaaaagaatgagnacaccaactttcntaattcttcagaaaatttatgttgcattgttcatacaataagtcaagcatcattcatagttatacctaacttctactcatatcaattacataggtgagaagcttttgcttatctgatcttaatatgcttccattctctagtttaataagatattattaatggtgtgcaatctaaactttctttggtagctataaacgatagtaaggtaatgtaattatatcttacttgatcattgagcatgatctcactgtctccttccgagaattcagggaacactgcacgctctcctgtcactatttctaacaacattacaccatatccaaatatgtctgtcttcactgatggccttcctgtcttcaggtactcaggagctatatggcccattgtcccgcgaaccccggtcgtaactgtattcctctctctgtctatcatcttcgccaacccaaagtctcctaccactgcttcaaagtttccatcaagcaggacattggctgccttgacatcgcggtggataatcttggggttgcagtgctcatgaaggtattccaagccacgggcagcgccaagggcaattcgcactcttgttggccaatctaatgctggttcatttagtttgatatctgcatgcataggtgtcatcaacagtactattgcattagatatttttagggtttgtatcatcataaaaggacctatttttttggtagtaacctgcctaaagaagtagataattcaacgattcaattgcctatacttcctttttatcaagacatagaaaccacatttccttctatttcctggcactgttttaactaatatacctcaattgacattgtaaatgaagatgaatcatgaatgcatattctaggaacatgctaaagtgatattcttatgttactgttacctctcaaacgggaagcaacactaagattctccatgtaagggtagaccaagagtcgctcttttgtagtcgtgcagaatcctatcaatcttaatatgttcttgtgcacagcaatgcttatcaattcaacttctctcaggaaagctatttccccttcaggtttttccacttcaaacagtcttttaactgcaacctttctgccatgtggacctgaaagcactcctttgtacaccttaccaaaaccacccttgccaagaacattttgctcgctgaaattgttggttgcaatttggagttctcgcaatgagaaccgctttatctgtccaaactctagattgtgatcatgttgacctgaaattgttgcacatgcttatcatcttggtaaaaaaaggagtctttattaatctgtttcagtccatgtgaattgtttctttagctgaatatgtttcctacagtaaccatcacacaaatgtcatgctgctgaactaacctggaacatcaacgtatatttcaggtcggtggcgcattctttgccaccataacagaaatagtactatgataacaaggagagttactgctccaccaatgcttgcaaccaccttgagtttggagttatttgatccacctgttgataaaaagaatggaattgtttattgatccaaattaagggggcaatatagattgccatgttgatttctatattacctgtatttatattgtttccttcacaagaaatcaagtgttggccacaattcaaatggttacctatataactggaattacaattgtcagtattgtgaagcactaggcgtaaaattgtttgtagaatatatccttgcccatacctgtagtgagacacctgaagcaaccgtttgggtatttcaccgctcagattgttgtctgctagattgctgcaaatcacagtgagatgtgatacatcatataatgtaactgtaatccaagcggtgatatttggcaaggtcacaatgttatcaacacagaaagacttacatatcattcaatgatgagagattagacaaagaagttggaatattcccgattaagagatttttgctcatgtccctgtcgaagatgtcccattattacggttattatgatcaactactacactattgactcataatcttacttgtattcttagaaagacacagagtttgacttacagattttggagttttgaaagacggccaagagagtcaggtattgaaccatttaagctatttcctccaagttttagtgttgttaagcttga

SEQ ID NO: 1602 - DNA, 638 bp, Oryza sativa
tgggaggattgtttctcatgagatgcttgaagaggaggcccgtgagttgaggcaaatggtgaagaatgccgccatgatcaagaatcaagaggtggctttgaaagctaaacaagaggaagactcaagaggtggtaaagaaagtgaggatgaggagatggccttaatagtcaagagattcaagagctttcttcgcaagagtggttatgggaaaggaagaaaggatgatgacaaggggaagagacaatccaagcgtgcatgcttcaattgtggggattgccccaagaccaatgaagccaagcataaggttgtcaagaaaaagcctgatcgcgctcacgttgtggaggcacacatggccgaagtgtggtactccggagatgaagactctcccaagacaaaggacaagaatgatggagatggtggtgtggctaccgtcgccatcaagtcctcttcaccaactccggagcgtctctttgacaacttgagcgatgacgacaacgactcctatcatcattcgtgcttcatggcccacgggcgtaaggtaatgcctaatctaaagcccactcatgaaaatgatgactctagtgatgaggatagtgaaaatgaacttgatgaattgtttaagagctttagcaaaccgg

SEQ ID NO: 1603 - DNA, 713 bp, Oryza sativa
aattcctgcagccccgccgtgcggccgggcgcaaggccggtccggcagaaagtgcggcggcaagccccggaacgtcaagccttcatccgcgaggaggtggctaaacttttggaggccgggttcatccgtgaggtcatccatccggagtggctggcgaacccggtggtcgttcccaaggcgaacggcaagcttcggatgtgcatcgactacaccgaccttaacaaggcatgtcctaaggatccttaccccctgcctcgcatagatcagatcgtcgactccactgcggggtgcgaccttttgtgttttctagatgcatactctggttaccatcagattcgcatggctagggaggatgaggaaaaaactgcgttcattacccccgtaggaacctattgttatacatcaatgcccttcggattaaagaatgcaggtcctacttttcagcgtactactcgaatttctttgggtagccaaataggacgtaatgttgaggcgtatgtcgatgacttggttgtaaaaacgcgcaaccaagagaccttactctcagatctagcggaaacttttgagaacctccgctccgcccgcataaaactgaaccccgataagtgcgtgtttggtgtacctgcgggcaagcttctcgggtttttggtctctgcccgaggcattgaggccaaccccgagaagatacgagctatagagcggatccgcccccc

SEQ ID NO: 1604 - DNA, 769 bp, Oryza sativa
tgcaaccacctttctcccaaagagaagttttttcttactcattttgttcgtcttttggttttttcttctgcttcagcgatgtcccgtcgcattcctcccgccaccccaaatccggccagtccgaggccgaagatccagcggccgcagaggagcggaggcgagagtctgaccggcgtgaagccgcagcccgccttcgggaagctgaagaggccgcccgggaggccgcccgggttcgccaagcggaggaagctgctcgggaggaggccgcccgggctcgccaagccgaagaagctgctcgggaggaggccgcccggtctcgccaggctgaggcgacagctgctgctggcgcgtcacttgggcctactccctcgggcggccctcaggcgacatcctccgaggcggcttgcgacgaggccgcgggcgcatcgcctgggcctacctcaccgggcgacgcccaggaccaaacgggcccgggggacatccccgagcccagtgcatcctccggggggccaagccacgtcgccttttctccaaggcggctcttctcctcatcttctgtcgccccgctgagcgccgagccccttctgcaggccctggccgccgcaaacaccgcagtgctggatgggttcaacacccaagtggaggccctgcgtgcagaacgagcggagctcgaggccgcatgggcgcgtgttgaggaggggcggcgctcggtggacgccatggtggaggtgggccgtaaggctcaccggcgtcatgtctcggagcttga

SEQ ID NO: 1605 - DNA, 697 bp, Oryza sativa
ttcgactatttagggtcactttgaatcgccggattgagaaaagtaggaataggaaaaaagtaggattttgataggaatgtaagtgtaaaacagaggattgcaaaacgtaggaaaaacacaggaatgaccgtttgattgaaccgcagaaaaaatgcaggaattggatgagagaaatagactcaaaggaaagttaccaagagattgaaactcttgttaaatttccttcaaaatctctaaaggatgtccattccataggaatttcaaaagattggatatgattcaatcctttgttttaaagggctttatgggaaatatttctataggattaaaatcctctaaaatttcaatgtttttaggctgtgggatcagctgaccagatagctttttcgcaaacatgtttgcgagtctccatttttaaatgtaaatttattaaaaattatgaaaatgacccactaaaatatggataatggtatttgatcttatagaaaaaatttattgctctgccacttacgatctacatccaggttatactcctcatatttccgccaatgcatatatatcctctagctacctggatacagagatggcaatgggtctccgttcaccgtttccccacggtgaattcatctattaggtggcggcgatgggtaatatttatccttcatagggaatgaaatggtttcatacttatcaccat

SEQ ID NO: 1606 - DNA, 3047 bp, Oryza sativa
cggcatcgggctcgccgtcgacggcggcggcggcggcgggggaagctgcgcggtgtgcctcaccgagttccgcgacggcgagacgctgcgcctgctgccgcggtgccgccacgcgttccaccgcggctgcatcgacacctggctccgcgcccacgtcaactgcccgctctgccgcgcgcccgtccagatcagcgacaagtccgccgccgccgccgcggcggcggcggccaacgccgcgccgggcgccgccgcggccgttcccggcggcgcgcccgcgccgaacccgcgcaacgcagctgccgccgaagccgacagaggagagctccagggctcgccggagcgcggcgtcaggcgagccgcgtcgatggtgacgctgccgaggcggccatggccggaggtctcgctccggtcgccggcgtcgaacagtgggcgcatgggcgagatgggcctcgccaagatcgctcgactgatgaaattctcggaagtgttggagatggccggcatcggagcgaccaggtcggtgtccttcggcggccacggcaggtccggccagtccgccgccgccggcgccggcaacaacgccgacgagatttcacggtgaattgctgctcttctgtgaagggatgaatcgctgaaggtttcagattttgggagacatggaggtgtttggtttggagagttttgtcacaagggaaaggtaaaaaaagtttatctttcctaaatcttatgtgtgattaagcaaataaataacatgagctttgtgcatacaccgcgaaacgtcagaaattgtaaatatgaattcctgacaaaaaggagatgtctttgtatgcgagtttgtaagatataaaagagatcactgctgcctgttcattacagttcatgaaattatatgaactatgtttggacttgtctttgcatcacctctcttctttacttccaatcatgcaagatgttaatttcaccaagatgattcatgactgtcggtgcaggatatggctgtgtcttgcctctttgatcttttatcaatctgtgattgttaagagattttgattcactcatcaagctatgggacttgccgacttggtgtttcttcatctctcttctttacttccaatcttgcaagatgttaatttcaccaatatgatggattcatgactgtcggtgcaaggagaagggttgtgttttgcatctttaatctttcatcaatctgtgattgttgagagatttttattcactgattcactcatcaagctatggacttgtgtttcttcatctctcttctttacttccaattttgcaagatgttaatttcaccaagaaggttcatggctgtcggtgcaggagaggggttgtgtttgattcttcgatctttcatgaatctgtgattgttaagaccattgattttgattcgctgaccaaacaacaaccttctcaaacctcatgttcttccagtttatcacaaggttgttgattgttgcataaaagtaaagcaagcaacctgcacctagttttaattccagtacttttcaatgtggttgaaacatttttgatgactgtgatcagaccaaagtacaggaaatgtgttgcaacttgtgaggaatttgttctgctgcaccaatccagaatgaactggatcctgttccaatcctgttcactgaaaaagaaaagggaaaaagaaaaaagaattcagcattgcatctggagcctcctgatttgctcatccaatggagtgcatcaatatggctgaggattctcaaggaagttgcaacgacaagccacctactttttttcccatgtcaccatcaagctactgacactgcattaaaaagatgatgctacaccatttggaaatgctaatggtgtgacaaagcaaaggagggatgcaagttaggcagttaaccttcagtcacctcacaaggcactagagcagtagtgagtagtgaccatcaattatatatcgacctaccattagttgcaggtcattgttgataaccaagtaatatggggttaagttagcattgtgttattctcaaggctcttgagaaaatggagtagtagaaagcaagtacctttcacaagttattcatgcttttttgttagatgaggggatgggatcatggtttacaaaaaccaaagaaaatttgtcggtttttgtgaaaaccggacttcttggactggcttaggaacatggaccgctttgtttacagatcaagttcatgaaaaatttaaactgagttttatttttcttataaaattttaccggattttattaggagtcaactgcttccagatggttttcatcaaagccatgaaaacctctaacctctggaatttttttttctcgcaaacggtctagtgaacctggatatgattggtgaggaatgtctgtagtacagctgatgtagtagcagacaccgacgtatgcatccggatccatatatcagccaccgctaaaatgtatcagtcttactacaaaggatctgcatccgtatgtgattggtgaggcaaaagtaatgaaaaagtttggcttggtttggtgtacctttcacaagttaatttaggctttaggataaggccatggatgattggacagtcttgtgtccttgtgtagagcctttagtagatattttggttttcttgaggctatgatatccctgtcattttttgctcagagtgagaaaaatgattaaacgagtgttgttagtggagtcccgacacgcacggcagatacttcactcgcacagtaccactgaagtgctgttttctttgcatgcttattcacactcgctcagtgctgtctttccatgcttcacacttgccagttgcctgtctctgtctacatcaaaacaaacaaacaaaaacaaaaaagtaaaaaagaagagtttttttattgaaaaaaacagtaaaaagaagagctgagagacagccttgcatcttcactgtggaaatcaaaatcttaaaaaaattggcattgttggtgacactgcgaatagcgcgtgaaatgcctgagtgcaaatatgctttctgtagatgactcacacagatat

SEQ ID NO: 1607 - DNA, 1819 bp, Oryza sativa
aatatgtaccgcaaggcgcaaacactggaaaatccattattcccccacaccgttttgaacatgaaatttggtctcaaatttctacattatactcgagaaattttcctcacgagagcagctagagggcattataactcacatgagcccttcaattttacaaaactcttgacaacatggccatttttgtacaagcgtgacaaagggaaggcctggatcttgctatgttcagcggacaggagaaatttggacagttctcctttttgaccctaagacaaaaatgatctcccagacggtatcacatatatctccagtagacgatcagatgataaattaagcgatgaaaatcagagcctggacaaatttctcaatgtagaaaccttgctaagagatcctctttatgctgcatatagtagtatgccaaaattgcaagaataataaccagtatcatggtccatatacttatacctgccagaacaaagcaaacatatttaggaggacatgcacgactggcaagtataaaaaacaataacaaataaagatgtggcataccacgactcttaggtgatccaattgaagtcaccctagcagtagaatcgaaggaagtcgacagcaaggtcctgatataaaatagaataccaacattgagaaatcacatctgtcacgtttgtaaactccaagcagatcgagagtctacggcatatatactgaccttgaatcttgagagaatgccaatgtagtaataatgccaagatgtgcctttttaactgttacaagcgaccgcatattttttgaacttagtacaataatgcttccttcaatagttccactggatatggaaatgcaaacaaattaggcttctagaaggtgcatccacataatctcaataagcttaatcataaaatgcagtaagctgttgattgaatttgctcacattgcaagaagtgtacaatcaggcgagacagcaaatgctgaaattgcctcacgtgttattttatttgacccaattctcgtccacgaggtcgtattccaagatattattttcccataatcacctaaggaacaggtttatgttactgtcaggacttaccctagcagatagtattcgatctataacatggttaaataaagtcttgggttaccttgcatcgctgtaacaaagaggatctgactgttgtcagtctgattagagaatctgcagaaaccaaatatttctccctggaaatgtgaaagcaagaaactcacttaaaacaaacacaatacaccaacatatgttttcaaaacacataaacacacacatactcactgcttctcttgggagattagctacaacttctgctgacttcaagtcccatactctacatgggccactgcttctgttcacagcaaggaaatgttcatcggagctaaaagcacaacacgaaacagaggaaacccatcagtatcacgcaatcaataatacctaagttgcgagaaaagaaagagaatttttacctgaaggttaaatccttcactgatgttttcgtatcgggttcttcaagaatggaatccatggaaggccatttgaagacccttaaatgaccatcctacataattgacagaaaattgatttggcaccctaagtagaaatcatcaaagaattcccaaggcacgattgtatagtacagaaatcaaattttgtaatgaatattttgccttgaaaaaagtgacaattggaaatattacagctatagacacaaattaatatagcctcgtaagtgtcccgatttgcttttaactaaagtgaaggtgaggatgctacacataaaacaacataactgaa

SEQ ID NO: 1608 - DNA, 11544 bp, Oryza sativa
ccctttgaccaacacaaagtcaccaacactatatacacttctggtaagtgacctcaatctctaatgaatcattataaatagtaaacagaggcacgcattgctattgtcaagttcccatgcgaattccacaatttggttctcttaatcatgtacacaaaattgttgctcatgtaaaccttatcataatttgcttgccaaattgtttctgcatgaagctctgaagtagatgactatagtttattacatcttctttaccaaagacactgtaacgtttatggcagtcagattcagaaagaaagtttttgtgtgcataagcaatggccagtaaaaagtgaaaaggaaagaaatttagcaaacgaaaagaaggcaataaacagggcatcttccaaagtatataggccaaagtacctatagggtaactggctacacgaggaatggaatacaaaaatgaaaaaagtaatgcataaagaaaataataatctctaatagaaagcaagttatatccacttacctcaccaccagtcgcaagtattgaaccttctccactgaatgacacagctaactgcaaaccagcatcactcaactctgtcagtgcctcctgatcagccctcaaagctatattatcaggtccctctccttcctgtgattcccatcgaaataacctatatagttgttacatggtcagaaatcagaattaagaagtgcaaaataaccaggaaaaattctttacaaaagttgaaccttctctcctaaaaagaagacatccactatcatcgcgtaaaaaggtacatttcggagctaatactaagatataatctagcaattcatctacagtaagcaaataacaaaaatatgacttctgacatgttatgggcgttgcccataacaaacaattcaacaagttaatgacaagacaattaatacttacaaaagcaggaactaaaatctacatgccccaattctagcttcatagtaaagcacggtctgtaagttggataaagaactccacaaacttgtacccagccgtcgttgtccaacctcatcataatattggtttctacaagcctctcagaccacacatatataatcttagtgtttacatttacatgattaaatcttagtaataatggaaaaggtctacagtaccccctctctcctctaattcttcccgaagttaagcttcaaacagttcaacccttaaactggataaaaaaaaacaccctcaattttcaataccaaatagattacacctaccgtaagcacaaaacaaggcttgttttgtgccacgtctactgccacgatggcaccaacacaaagcatgcgcagcagagggacctgcaagctgtaactacatttttctttccctctaccatcttcttcccacattcttcgttccctgaatccctaaccgcattgaagaggtgacatgaagagtgatcccccgtactcacgtggcgttcgttacggagaacctcaaaagttgttcaaaatgtggttgtatgtagacagtacgagttatctgagtcatgaattgaattgacaccttttgaagcattttgaacaattgggctaactagaattcatagccaaccaataccacccccagctggcactggcggcaccatccgcagtagtagcatgaacacaggtagtagatggtacagaaggacaaatttgattcgagaggagagtaacctgcagccattggggaatgcgcagaggacgccgtcgccgcgcgggtggacgcccatcctgtacggcacctgctcctccgtccccatcctcaacacctgcactccccacccccacccccaccaccagcaacgtcagatcagcacgggacgagatcgagatcggcgtggaaatctggcggagatgaagaaaccggatcgctcaccgggtcgggggacagcgccgccgccgcggccgccccagcggaggtgtcgagcgcggccaccaccagcgcgttgggcacgccgctccgcccctccccgccccctcccccgagcgccgccatgagcggcggaggcggaggcggcgtagcgggggactccgacgaggccgcgcccgcgtccgcgtccgcatccccctcctccaccggaggaggcggattgaggatgtgggcgaggggcagccacgaggcgcagtagatcgggaacccgtacgtctgcccgccgccgcgccgcgccatcgccggagttggaggtggtcggcggcgcaagcggatcggatcctctctgactttcgcgtgcggttgggctcttgaatcgaatgcgcaatccaacggcgagcagcgaacaccggtttattccggtttgcagaaaaaaaaccgagaaaatatcagttcggctttcggtttcggccgaagaaaaccgggagcacgccacctccgcacggccagcctccctccgtcgcgtgaatggctagaggctaattttcggttttatcggtgggtcggtttattagtggagttgaaagccgagccataaaccgaacacggaacagaagaaaaaaaaaaaaaggcaaacaacaaccgctggccaaaaaaaatcgaactcagaacaaccgttggctggatacacctggctaccatccaaacacgcccacgtattttcttcgaatttaaactccagtgcagtgtagttagcactagcatgctaagaagattgtgtttcatacaacttgatggtctttgattagatcttttggtgtgtgtatttaaaacagagactgaagatctactacttcatttcactgataaaagaaaagatacagaccgatcgttcacacacacacacacacacacacacacacacacacaagaacaccgccctacaagcacatcaggaactccctaaagctacactaaatactttctggaaaaaacaaaagcaaaattctagcatttttgtgccatcgtgcaagccacctgatccgatcggactgttaagctttgatacatttgctactcattacatgctgatcaactactgaacaacagatcatcctctgactcatcttctgacgatgatggcgaggccgtactgtcacaagtgaaacatgagaaatcagaatgtagctcacaaatcctatcttactataaagttaccccccactaactacttaagcttaacatacaaggatgccacatcatcatccactaacaagatgcatgccatatcatcatctactaacaatcatcacatttaaatatcatgcaaacatgttatatctttatagagcttttcaaagacaaacatgttaaattatcatccaatataattcacataatgtttcagtgtatatctttattatgttttatgatatcatatatacttatatagttcatcatcacttagttaatgtttaaatgattaatttatggtccaaattatctttctctttttttcctcaaattaagtcatatcacatcaattgtttttagcctttagatgattaatctacggtccaaactatctccctacttttcttcttccataaagtcatacctccttactttttacgtttgaatcaccattctacatactatttaaatttaaattatcataagccacattaatttacttaatctgatgttatctagctatcttacacgttatttttttttcgttgttatcatactaaattcccgcagcaatgtgtggggtttcacctagtactacaattttgaaacccagtcgctagaaaaatgaaattatttcgggacagagagagtactaaaataaaaagtagtgtagcgacaagcgagagacgatgaacatacattgcttttcggttctgccacgaccactgcagccacttcagtcgagtttccttcgaatcgaatctcttgaagacggtgcggcgtgttcgtgaccttagtagctctttggcaagatgatactgctccgagttcgcgtcaaccccgtcctcccttaaggtcttcagcatttgaagtctctcatctcgctctctctgaattctgttgattgattgttgaattatgttggatatgcgaccgatgtggtattcgatgaatgatctcttcttcttcttcttcggttcaaggctgtcaaccacttgctccttcgcgtcctgcaattcctgttcattcaggcaagaattttgaaaatacaatcagtagactagactacattttgtgatttggatgaacaaaatttgggttgtgcgtgtctgaatgcaattcgcacgaacctgtgagtaataacaatacttgatccaagttcagcaagactggaaaaaagtagcacatacaagggaacatgaaaagctagttcagtcaactaactacgtaccattctaatcgaaacaaattcatttttaactttaacaggaaaagctactgtctggttgtcttattttccagcaattcaattttttttttcaggtagaaaatacatcggcatggcctccacattccatttcagtgttgtgtatgggcagtttttctttcctcaatgcatagttgaaggaattaaacaaactattgaataatttgatccaatggctgcaagatacttgccgtagtagcgcggtggagacgacgagcaggagtcgaacgcaggctgtagcgcggcggcggtttaggaggcgagcacgacgaggtggaggacgccggcgagctcacccgccggcgtggtgcctggcgcaatctctgacggtggggaggcctcatggccgtcgacctttgtgatgccttaggcgccaacctctgcttgcaatgtaaatctgcagggaaagaaggatttttttttggttggtgattttggggctggattgtttgcagcaaactggagcaatgattcacctgtgcattttgcataatgcatcttatttactagtaatacacaatgtgtggttcatataaacaagttcagctctgccaaactgcggttgtactgaattaatggaaaacaaacttgggctgacacaatggctcaacattaactaagcaaagttgtgcactgtcatacattgatacatacattactgcgtgatgcaacttcaattggcactgaattaaattgtgaaccgatcgaaagaatcaagtggagcagaatcttggatctccagcaatgcacattggaccaacgacagagtacacatgcgtttctgccgaaggacaaaacgcttatcttgcctgaatggggtgttacctcgttccggctgggatgtggtcaccggaccaccggcgctggcgacggagcaacggccggcgcggcgttccgccgtcgagggaaagattgagtgggggattggagccgaggaggcgcctgtagcaatggaatggagtggtggtggcttcttgaataagctttgcccctctctagaagagcaacgttaccctgatacggtagattaccgtcgtatcagtatctgatacgcctccggatacggatacgtgcgggatacgtccggatacgtatcccatacgtatccctcatttttcttatttttagataattaaaataaatatggatactctcccgatacggtgggatacggacctgatacggggtaaccctaaatcgcatcgcacaggaacaaaacacgctctccttctccacccgcgccgcccctcgctctcacaagtcacaactcacgctgcccctctctcctcgcttccccgatccccatctcagcgccgccgcctacgccgtcgctgcgccgcctcgccgccgctagcggcaggcgccgcgctgctgcctacggccggcacagcgccccctcctctgcgctctcctccgcgactcctcctccacaaggtgccgcgccgcccgctccaagcctccaaccggcgcccagcaccgtgttggcttccttcgatcccggcctccgacgacgctgaggatccttaggtaagtgaatatcccctccaagtttgatctgcactgtgcgtagtgttccggttcaatttttcttagtataattgctgtcatctttggtagattcaatggattttagaagtggaagctcgaatgatagtggtagtgctagcaatcctagtggtaatactggttttgatgcatcgagaccatctagtgggagtggttcaacaatgggagggcatgcaaggagcattttgaatgctgctcgtgtgattccacccaatgatgatgaaaagaagcccttgtggaggtatgttgagctgctggaaaagacagggaaaggtcaaggagggaatgcaaggttcagatgcaggttttgtaaccaagttatccatgggagttactcaagagttaaagcacatctcttgaaaattggaacaattggtgtggctacatgcaaaaaggtgacagtagatatacttgggcaacttcaagatgaaatgactagagctgaagcaatctctgcaaggaatttgcctaaggacatcccactaccaacagagagtgtgagtagggggaagagaagggctgtttcagctattgagtcaagcttcaatttagatgctcgtgccaagcttgatgctttgattgcgaggatgttctatacatcaggtcagaatatagcatgttttttttcagttctaacattatcaattttgttttgtttatgacgtgcaactaattatatgtgtgcatttggtttgcaggtattcctttcaatgttgcaagaaatccatatttcaggaaggcttttcagtttgcttgcaacaaccaacttggtggttatacccctccaaatttcaacaaattaagaacaacacttcttgttcaagagaggacaaatgttgagcgcttgctgaatgctctcaagtcaacatggtctactaaaggtgtgagtattgtatctgatggatggtctgatgctcaaaggcgaccaatcttgaattttcttgcagtgacagaagatggaccaatgtttttaaaagcaatcaatactgaaggagaaatcaagaggaaggaatatattgctgagaaaatgtttgccatcattgaagaggttggcccaaataatgtcgtgcaagttattactgataatgcatctaattgtagggctgctggattgatggttgaacaaaagtacagccacattttctggacaccatgtgttgtccatactttgaacttagccttgaagagtatatgtgctgccaaaaactctagtggggatgcttttctagaattccaatggattagtgaagtggctacagatgcatctgccataaagaatttcattatgaatcactcaatgaggctctccatgttcaatgattttagtaagctgaaatttcttgccattgctgatactagatttgcatctactattgtgatgcttaagaggtttcgtgctatcaaagagaacttaatcttgatggtggctagtgaaaaatggaatacctatagggaggacaatcaagttcaagcacaacatgtcaaggagaagattttaaatgatttatggtgggataaagtgaaatatatcattgatttctgtgagcctatctactctatgattcgtgctgctgacactgacaaaccatgcctccatttgatctatgagatgtgggattccatgatagataaggtgaaaaaaatcatctatcgtcatgaagggaaagaactagatgagcaatgttcttttttctttcatgtgaatgagatcttacacttccggtgggcaaaaagtactacccccttgcattgcttagcacattcactaaacccaaagtaatgatgttctacctcttttcaatttttatgtgcataatttataattgttgctagcagctcaataatcttttttacaacatgtaggtactactatgagacttggttggaggaggctccaaaccaccaagcccctcatatggatgaggagatttcagatatgagaaataagtgttttagaagatatttctctggggatgaattgagaaagatcaaacaacaatttgcagatttctcattgtttggcagtgggtttaattcctttgactcaattgaggatagagcccatatgaatgcaaagcaatggtggggaatctatggtaactctgcacctgagcttaaaaagttggcactaaaattacttggacagccaacatcatcttcttgtgccgaaagaaactggagcacttatggtttcatccatagttcaatgagaaacaagtttagttccttctcttacttatttagtttcctgtatgttagtaatgcatgaaattaacacaattgcattttttttagtcttaggcctgcacgtgctgaggatttggtgtttgtgcaccaaaatatgcgtcttctttctaggagatctgaagaatactacagtggcccatcaataatgtgggatgttgcaggagatagatatgagttgtttgatggtggtgctgattttcttcaacaagctgaactgacacttgatgagcctgaccttgagagactactggaagatcttggtgcattggacatacaaggcgataacgggccttcatccacttcggttccaatggatgaaatcaacaatcaatttatctagtcttgcaatctagttattgagttgaatttgaagtcatggacaagttaattaattctaattagtttagcgctgtggtgatgctctactgttgatttatctactatgtgaacaattttatctaccatctatttgaagaacacatgtgttgtgattcctattttttaagtccatatttcacacttagtttttttgtatttttaaattgtatatatgtatatattcgcgtatccccgtatccatgtttttaggaagacggtgtatcccggtatcaccgtatcgcgtatccgtatccgtatcagcgtatcggggtaacgcagtagaagagtcggcggcttcttccagaatccacagacttctcgtctgcaagcagtcatagttcaaatttaaacttcaacaaacttaaattttaaagttcttttggttttttaatcatagttgattttttacgttaactttaataccagttaaatatagaaatataaaaaatttactgcaaacttttttcttcgtttatgggtgtgtttagttgaggaaaaggaaatttttgggtgtcacattaaacgtttgaccggatgtcggaaggggtttttagacacgaatgaaaaaactaatttcagaactcgtctggaaaccgcgagacgaatcttttgagactaattaagccgccattagcacatgtgggttactatagcacttatggctaatcataaactaattaggcttaaaagattcgtcccgcgatttcctccataactgtgcaattagtttttctttttatctatatttaatgctttatacatgtgtccaaagattcgatgtgatgttttttgggaaaaaattttggggaactaaacaggccctatttctcaacgataactctatctcaaacgattggggtatggtgacaaaatttgaagagaaagaaaaaaaataatttaaaaagacacttctaatattcgaaattgtttgtgacttggaatatggccaaaatttgtcagcgttgggagatttattatacaattgattaggtctataaaatgtcccatatctctctcaaaattcaaaatccatccatttgctccatcgttatattatttgacaaaattaaccatctccattcttttacctcccatcaactttcataactactctcaatcttaaaccagaaggacaagaattactctcatcatagtgattactacagttttattgtgccaacccttgtaaaccttcacaaattttttttttagagttgtcactcacacgttcatcaactatcaactagcaagcgcaggatagcccgccacaatcacctaaaaagactagagcccaaaaatactatatttcttcgtcccggaaaacttgtcgttttatggttgagtgaacaaattaactacaagtaaaaattaccatattacccttatttaatcattgcatttgtcacttcagataatcacttctagtagaccatctatcgcattgtacacacatagatagcactagtagtggcacggttgtatagggaaatagtatgccaaataaatcgatggaatagactaggctcagctcgttggtcaagatgctgtcaagatgctagaacgataaattttgtgggacattttttgaatagcggaatgacaggctttccgggacggaggaagtattccacttactaaataccaatatacctaaatctgagaaaaatataaacccatactagtcgaataaaaactacattttaaccctacattttatctgtttatcttactttttcatcacatcaaaactttcctacacacatgaactttcaacttttccgtcacatcgttccaatttcaaccaaacttctattttttgtgtgaactaaacacaccctagttcgaagatagaacacacaagctcatgggtgtgtttggctgcaaactgtggctagtagccattggctgtgcgccgcagccgcatacactgcgtgtagcagcagcagctgtttggaaacttgcagccaaacacaacccatatcatcagtacttgagtcggtctcactgcttataaaaaaacatgcaaatcttccccgacctctcattcaagagttgcctttatgcaataatgttggctgccataatcaattttagttttttttttgtctcctctcttaagagctatcactcatttcatataggttgctttattgtttctgattgcgttttataccacttctcttatactatactcagatatgaaatagggaagatggataaatttgataggtttcgtgatagcgatgtcagtaatttgacgagttttgtgataatgatatatatgtagaatgatgtgttttttttactaagacaattcattagtactccatccaatgtaagtcattctagcattttccacgttcataatgatgataatgaaactatatagatatatatgtctagatttattaacatcaatatgaatatggcaaatgctagaatgacttacattgtgaaccggaggaagtagttgattaattaaatgccaaattcatagtaagccatatgatagaagattgaaaatttgtgaaaaagggaagcaatttcgcctcgtttttggatgcccacaatcttaaccaagaacttcaactcgtgcgcccccaaaaaacccccacctttctcttatcccctctatccgccgctcgccggccatctccctcccccaccaccaccaccaccgccgcctcctctccggcgagatgctgacctgcggccgcttcctctcctcctccgccgccgcctccaccccctccctctcccccttccggaacctaaccctctccctcctccgccgtccccatctccggctcctctcctcctccgccaccgcctcagccgccgccgccgccgtagagccggacaccaagggtaaatatcctgaaccttcaaactcgagggaacacctcgcggtttgacagcgagagccgttctgagctgtgggtgtatgggtggtcgcaggtggcgcgggtggcggcgccggcaaaccgcagtggaaggcggc

SEQ ID NO: 1609 - DNA, 1030 bp, Oryza sativa
gcaatacaagttggatggataagatttaagcttgcgctgtaaaattataatgcaaagctcgtgattcgcaagacttttaaactgttggataagacttttatggagcttgtcattgactcattgctgctgctgctgtttgtagtttctgattctgctcttgcgtgactgcctgcaatagaagttggatgaattaagattaagcttgcactgtgaaattatattgctttagtttgtgatttccaagagttcaataactgttcgagatgattgatagaaaaatttgcaactttcgtgtgaacttagacatgaactggttcttaactggcctattcatatggttaattcattggcatgtgttatgttactttctgactattagtgagttgtgcctattgcaaccttgtaattttgggggtagcaaaatattaggaagaaccaaaaattgaaactagaaactactctttttggccagtagtcatggctattaattggttatttcgttgattatattggatcactgattgattctgctttactgatcttgtgaactcaaaattactcatggcttcatggacttatccttgcctggacgacacttttgtttatggcgtaaatatgatactgtgttactgcgatttaacctattttggcatcaatgtctcattgttctaccgaagacacgtgtgtatctgcttgtgtgtatgcttgcagtgattgaacatagttggttatttaattctggactgagatatggtggcaacaattcctaattatgacagatggcaggaagttgaacggctccgagctgaaagaaatgcagttgctaataagatgaaagggaaattagaaccatctgtgcgtcaagcccttgttgaagaaggtagaatgtttatgaatttattttctaaaaaaaatgaaacagcgataccaacatagtaatttttttttataaaaaaattggattgttgcaggcaagaacctgaaagaagggcttattgccctagaagaggaccttgttcagctgactgat

SEQ ID NO: 1610 - DNA, 756 bp, Oryza sativa
tcctgcagccctgcgagatgaaagcatgtatcagcataagaaagattttcggacaaaggggaaataaatttatggccatgataacaaagataaagagcagttgacactaagttaaagagagcatggtgagagtcataattatcgagagtttccaatacaccaataagcacgtatccagagctaagtgaaattttctgacctccatacagtaggatatttaggaaaataaaccatgcagtgagaggtattcgatattattcccattctttctagtcaaatatcctatgaaaaccaaaacttgaataggtctcgaaactaatagtttcatggaatttaatcttaacttctaaaggaacttcacaccgaggttttaagccatgagggaagtacctggactcctctgtggagaggtgactccaatatctcctatcatctatgcctgtgattgccatagcctttgaggaaatggatatgcaaagaccacccttgttcttctccatccaaaattcctacacacaaatatatttttcaattagatcattgaaacacgacatacaagaaaagcaagaacaagcatcatccaacatagacaagcaaggcaaaccaaatacacatgaaaaaaaattcctcaacttccatatgattatttcatattttactactagtgctccgatctatcctactagcgctccgatatatcaaataagatgtttgagattctcaacaatcaagtcatcctaattctaatatcaccat

SEQ ID NO: 1611 - DNA, 8163 bp, Oryza sativa
ttgaataagacgaacggtcaaacatgtgctaaaaagtcaacggtgtcaaacatttcgaaacggagggagtatctttttagatttctctaccatcggatccatgccaagattattggtggatgggtcctcctctggctcgagcgagctcctcgtcttctctgttaccagtgatactccaactatgacagagtacatacatttctaggtgtagggttagtatcctaaatttcctgatttttgtatttgatcaagtattgggagtattatttgatgtgatagttgaatttaaatttgatgttctaaaatcatgtggatgttaggaattttagtaatcgcaatattgttggaattatagctttcgagaatattttgcaaagaatagaaagaagagtgagaattaggaggatttataagggatatgaactttggggggggggtagggggtttcaaattcaatattttaatccttcattattccatggattcgaggaaaggatttttagtgaggttttggattttaaatgagtttgaataatttagaaatgagaggaagaaacaagggatttcaaaggagtttgtgttgattgggatttcgaaatgagaatggaccttaaatttctagtaactcagggcatggactttagaatgggacattggggacagggtttgaatcttggattaatttggttaattttagaaggagtgggatcaagggaattttatggattttgaaatgtatttttagtagatttaaagaaaggagtatcatgacagggaaatagaaggatttcaaggaatttttggaatgactggatgtttggaattatttgaataaaaatttgggggaaaagataagaaggagaggacttcaaggatatttgaattcaatttaatattggaaaaccttgataatctaatagggttcaaaggagtatttcgttatttcagaaatttttcaatatataggatatttgaattcaactttgaggttttattaaaaaatcaaatatcgtatttttttaatttatttaagagagtacgtatgatcagtaaatccataaagaatgctgacaaagaccgctttcaactcttctcttggtcgttacgaaacctaactactccatccgtttcaaaatgtttgacaccgttgactttttagtacgtgtttgatcattcgccttattcaaaaaatttaagttcatatcatttgatttattgttaaatatactttcatttacacatatagttttacatatttcaatatttcataaatttttttaataagacgaacggtcaaacatgtgctaaaaagtcaatggtgtcaaaaattttaaaatggtgggagtaataaactacatataagaccctcgagcgagcatatctgagtattgacggatcgattggtttcaagccggccgtacgtacaattagaaatcacgacctgcggcaaagtcgtcgacgtcggtgccagttgacctgtatatcgaactatcaatatcccttcattttgacgtgtggtttcgatactactactccgtgtgctgtcgtttacctacgtaacctagacgtatacgacctccatttgtcccataggccataaaggaaaagaaagtccgcaaggaatggtaatcatgtcgtggtattctcggaattaacttgcagtccagcgaccaagaaactattaaatatagttttcatacttatcatatcgtatatatcgtatagaactacgtataaaaactatatattcaattgatggtgtattcaaattaaattcttatcaaatcacctcttctctttttattcacatatcccctagtttttattcttagttattgtgtagagatggtttcttacgttagaaatgatttcttctttttaccgctctttattattaactctatcgtcacatcatatttttgctttgtgacaatatattaaatgatgtgtacactagataatatggagagttaagcatgaccttggttctcttacgttgttgatatgtgggcctgttggaaagagtgcccacgtatcagtgacccacgtcatatatatacaaaataaagttgtgtaccacaatcccagtccaactctatgcccagacggtagagcagtcattggtcactgcatatgtagcagttagccgacggcctgacgtggtttgcacaagcgtcatcacgttggaattaatgcatactccctccgtcttaaaataggcaaaatttgctaaggacatccaaaaatcgtgtaattagccagtgggtaccgtaagatcacgaattcgctgcagggcagcaaaaaaaaagagtaattagctggtggacactcgagccattattttattatttccgaaggaaaagaggtgagagaatttttaaaatgccaagaattcccccggtgacgcaacaccttatcccgactgggtccggtcgaaccagacctaatcggtcttgtcgcctcaccacatagccgaaccacagccctagccggtgactaaggtggccgcggcggcgaccaagatctgcgacggcgagggcggcggcgatgaagctgtgagctgggcacggcgttgcactacacagcccaaccacaaccctagccggcgactgaggcggcggcggcggtgacccagatctgcgacaagcgacggtgagggcggcggcaacccagaccggcgagcagaggcagtggcttccgtggctgcagcggtcgagcggtgcagaaagatggatggctcggcttcatcctcggtggttcgtcgccgcaatggtgagttacccttatggaagtgcccaaggtgtgtgacacagctagaggcgcgaacatcgaggacaccaaagaatccaaacaagaactttgtgaagtgtccttaccttgaagatgtgagtatatgattttacggaacttttggtttacttctgtaggttgttgtcgagtgagttaattcaatgaaatttgcctttgtagacaccgtatgcgtgcagatttttcatgtgggaatctcagtatgagcagtatttggcggatggtcgcgtaggagtgggacatcagtcagggcgagaaagtcatgttgaagcaatggcatctatggggtttggggtctcagaattgaagggatgcaatgcagtgggacagattttagtgtacattagagttttgcaagctttattgctactattgatattggtaattgtcattagcaagtaagcaatcaagtaatgagtagttgataggttgtagtgatctgtgaaggcatgtcatttcttaatgtaatatggatatctgaatggaatttaattttctgaatggaatgcaaatttatgagttgaatgcaaatgtgtcttccagtgagaaaatttggcagcaaatctatacattggaatgaaatgtgtgttgtaatgacaaattttggcagcaaatctgttgaaaatgttgtcccaaattgtagctgtacaataattagtgagaaaatttggtagcaactatgtacaattcctgaaggcatgccattcctaaaagttaaagagccacacaacatcaaaatttggcaattacaggcaacaactttactgaatatgattcaacagccacacaacagcatttgattcaactttcatcagtgattacacaatccagcacacttataagccaatatggtcttaaacaaaaggcagacataacatggtcttgggtgaccttacacaaaaggcaaacattcaggaaacataacattgtcttaaacaaaagccaggttttgctacctctaaaacagttaagttatttggcattcttgcctctagtggtctggctcctagtgctaggactagcaacttccatgcttagtgatctagccttgctccttgtgattgggctactttcggtgacctctgatgtttctggaacatccaaatccagtgaccttgccatgctcctagtgtttgggcagctttgggtgacctctcctgtatctgcagcatgcatgttcaatgcctttgcactactccttgtgatagggctgctttggttgacctctgatgcttgggtacccatgcaaaaaaaaaagcagaattgttaatttacaaattgagcaaacttaagacaacacaatttttttcagaacatgaaaacacttacaaagctgctccaaattggtccgtggtaggatttgtaatagggttaaccacaactttctttactctcttcctcttaggctttggggaagctggtggtggggcactagaatcgtcaactggttcattacatgttttcatgatgtgaccaaattgaccacatctcttgcatctatgcttccttttccctgaacacccttcttcaactcctttgagcctcctgcttcttggtctgccagcagaccttttcaatatgggaggatataacttgaagccaacattcaccttttgccattgtgagttatctgtcattgggacaacaaaacctgcataagcacgcttgaaagtagccacagagtaatagtcactgacaaacttttccaattccaaacccctccttgaaatgataaggaaaattgcatgggtgctaggaattccagtcaattgccactttttgcagttgcattcttgggcaatcaggtcaagagtgtgcctccaagtctttaaatctctgcatgtacctccaatttctcctgtatggctgtgagcagagtacagcttgtaccctaggttcttgctcttagcatatatggctttcatgacactagggagaatctgtccagttaacttatcagctagccttttcctcacacttaacctctccatgatcatttgtctaatcttatccatcaaatcaacaacaggaagtgatttctcatgccttatccaactattgaaagtctctgctatattgtttgtgacatagtcacacttgctagcagtagagaattcacttctagcccacaggtgtttgtggaagtcttcaatccactcaactggtttagggcatgcttccatcatctcattgtagtgaagctcaaaaatatcgtgtctatatgccctagatgctagccacaggttcctttcaaatacttcaccactaaatctcttctgaaaattcttcaccaaatgtctcatgcattctctatgctctactccatttgtgaatactctactcactactgtatcaatcccttttcctgcatctgtggatatgaccaacccaataggtgacccaatagccaaatgcagcttctccatgaaccatgcccagttatctgtagtttctgaatcaaacaccccatacacaactggaaacatccagtagtgaccatcaatgccaattgcagatgctagttgacccctccacttgcctgtgagtacagtggagtctacacctaagtatggtctgcatccatttaagaacccatctacacatggtttcagtgccacaaacatcctgctaaatctgttcaccccatcaatgttgacatgttacacctcaacaattgaactagggcttttcctctccaattcagccttaaaattgtaagctgcagcaaaactatcttcccatttgcctagaatttcatcaagtgccatctgtctgccatcccaagccacaaagtaagatatcttgatcttatatttctcttctagtgtacccttcagagcagaaactccaattgtaggatctttccttagcttgttgatcacacggtctctaacccaagaatttttgtgtccatacagttgttctccaatccagctgtgctagcacaattgtgttggtatggaagcttctttatctgcaaatattaattgaaaagatcattttatttaacagattatgaccaaaatcaccatgcatttaaataatgtaaataacttacctgccatgttctgccatcctgtaatcgtgacgcatgaattctccacttgcacctcttagccttgcaatatgctctgtacctcctcgagtcacaatagggaactgcaagttcgacctcattcaataatgcatattatctaatgcatcttttaaaacattgaccatcttcaaaagttacatcaacatctatgttaagatcttccacatcggttatatgagctacagactcacattcctcctcatcgtcgacagctaagtcatcatcgtcttcgtcagaatcaggctcataatctggatcaacctcctcatcatctgacaccaaatctttatacttctccttctcatcagctacaccaacatactcaacctcatcattctcaccccaagtgtcaactagttttggtttcggtttcggagtgctacacttagtagaaggctgagatggttatggtgattgactttgttgtgtaaacaacactatgtcagtacacacattacccggtgcctcaatcgtgccctgctctacacaaggctctgtcctattctgtgggtcatcactcacctcaacaaccaaagggagcctcctttgctcccagtacaaatcacaagcatgaagtaaagcactgtcagatgctatctgagcaaatctaccagcatttatgtccaaaaattttacacttaattcctgagcaggaccatgtttaacctcaacatcaagatcactcatgagatcaatccaacatatcgtatctttgtctaacacccagttaattttcttagtgacatgaaattctggcctaccgttgtcagtaaactcgacaaatggaccaagctcaacagcaactctgcaagctgagctgccatccatcctatgggaacgcaacaagaacagagaggaagcaaataaaacaaatgcaaacgacatcttcaaccataaactcattccagtaagtcaggacccataaaattagaggaatagaaaagcttacccttcggggacctatgacacatctgtcagcaatggggatccggtggtcctcacacggagcggcttcttcaccgccaacttcttctgaggcgacatcaccttagtgtggtgcgacgccgtgcctagctcatagcttcatcgccgctgccctcgccgttgcagatctgggtcgccgccaccgccgcctcagtcgccagctagggttgtggttcggctgtgtggtgaggcgacgagaccgactgggtctggttcgaccggacccagtcaggataagatgttgcaccaccgggggcattctcggcattttgaaaattctctcacttcttttccttcggaaataataaaataatggcccgagtgtccaccagctaattaccgctttttttggtgccctgcagcgaatttaatgatcttacagtgcccactggctaattacacgatttttggataccctgtagcaaattttgccctcaaaataactcaacctatgttgggattgtccagattcgttgttctaggatggatcaaatctcatccttggttaagttattttgggatggagaaagcatgccggtggtcaggtcatcggttatactagtatcacatagcacacacctgcaagccagctaatttctccgaaggtagagatgcaaataaacgcaacacgtacaagtaatccctttttgagataatgacatgaaagcgattaatctactgctacgtgttcgtctaggtttcctggccggcagatggaatcaccttaaacaacttcaggtggcactataagtcaacgagaccggccgtgtgttggcggttctgaaattgctcaccggttgctgggttagtcaggtcatcacttatctgatactgataattctactgagaaagatttaattccccaaaaatttttccctaaaacatcacatcgaatctttggacatatgcatgaagcattaaatatagataaaaagaaaaactaattgcacagttatggagaaatcgcgagacgaatcttttaagcctaattagtccgtgattagccataagtgctacagtaacccacatgtgctaattatggtttaattagtcacaaaagattcgtaatgcggtttccaggcgagttctgaaattagttttttcattcgtgtccaaaatccccttccgatatccggtcaaacgtccgatgtgatacccaaaaatttccttttttccacctaaacacaccttgtacaacgactctacctgcagcctttctgtcgaaggaatggcgacactatcctgatcgaccgggaatatcccctactatggcg

SEQ ID NO: 1612 - DNA, 4091 bp, Oryza sativa
ttttcgactagaaatagggcctgctttggttgccaagttaccaatacaactgtaatagagtttatatccatgccattataactaataatttagttaggagcagatctaatatagtagtcttggggtaggtgatccacaacttttggcacaatgcttggcaaaacctaattgatgggagaagagaaaatgaaagaggggtaaggtgcaaaatttttgcagtgccgatgtgggcaattttatgtagaaaaatggccatcttggatcatgcccttcggattaaggtcggacggtgtacattccgcaagtgcatgaaagcaggggtgtatataggatatgttgcccttataactaatatttttaattattttcaggataatttaatttgcagtcagttttaagcacttatataaaactagtctctctgcatgcttataacttataagctactatatgcaacacaatggttaattattgtcatcgcacgaaattaattttaacctaaattacggcttgcttaaaagaaaaaaaaaaagatcactgcggaataaaatgtatcattttagttagattacaatgagcttaaaagtatttcagagcgaaatagttcagatggtttcgatgcttgtaggagtaaaaaaaataaaatagtaaaaatgattatttttctttgcaattttcttatggcggatccgcaggtgcatagactaagttttgactatggcatgagcaagacgtgatttttgccgacaaacgatcaatatgtcacgtgtacggaagagcaagtgccacatggtgatatgggagatggagacccacacgaaatagatcgatatgcttgtctgtcgttccctgttccatatgctgcttacgttttctgatctcacggatatactcccttcctgaataacaaaactcacacaagctacattcaaatttaaatccggccggtaagtttttttttaacggatgaaacgctcccttataaacatttgatttgatgtttaacataggattcgtttaaattttaaaaatccgatcatcaataatttcttaattagttagtttaaaaagaaatgaaagtggcataaacatagatttgtatgaaaagtaataccgtaatattctaaccttatgattttgtaaatccattgtaatacaaaaccgacagtaggattttaaaattttaaccaaatcttataataaatgctaaatatatgtggtcattgtattgttgtagaaagatagttatgggaaaatatgtgcgtacttataggggtgagtgtccatgcgtatatgtgagtgttgcatttatactagtatgactttttttatataaaaaaagatagttatgtattattagaaaaataggattcacatgataaatattccaagtcgacattaacgtcagcaactagcggacggcatggtaatttgacaactagaaagggtaagtgaatagcctccacaaacaaatctgatggatgaaatcagagagggaatagtcacacaaattaggagtagattccagctctcaaagacaaagacggaatttgtgggtgtatgcaatttcccacgatattaagatgcaacaaattaatgttacggtaaaaaaaactaagcagtcatgaaaaaaatcgacggcatgtgaggagaccccattgcgaccttggtgccactggacaaggcagaggccagtccactggctagctaggcagtggggattgtcttcagtattacagctgcagtagtagtggctaacaggtgggaccgggcccacatgtctgcgtctactactgctactgcagtactgcagaggatccatgtcccattgtcggtggaaggggacgtaagaaatattctccaaggacaagtgtaactatatcatttgaaacaaatatacatgtaaaaaatattatttatctttatttgtcaagatgattgacggtccaaattagtacttaacgaccgtcaacactaccgctgacgccaccgtaccactaccccgcctcatcatctatcctgaaggcatcaacagcaccgacgaggccccctcggtcggcctcctcccaatgggctaaagttaaggacttgttggaaggagattctaataccaaatattttcaattggttgccaatggtaaatatagaaaaacaagaatttttcagttgcaggatggtgaccatataataagtggtgatgcaaatttaagataccatattacaacatatcataagggttttgtttgggccatctgaggaataacatttcaccttagatgagcatagaagggatgatatcttgtatatgtctcaaatggaaaatgaagcattaacaacaaattttactaaaaaggatgttagagaggcaatttttcaaatggaacttaataaagctccgggtcctgatggattttcagctgaattttctcaagtcttctggaatgttataaaggcggactttttagatttattcgtagaattccataacagtccattccctaaatttcgctaaatttcaatacaattattttggtacctaaatccaaagaggccataaagatataaaaatatagaccgatttgtttattatatgtcagttttaagatatttacaaaggttcctactaatagaattattggtgtgtcccaaaatgtaataagcccaatgtagatagctagcttttatacctggcaagaatattatggagatggtagttatttacatgaaacgattcacgagttgcataggaaaaaacaaaaatggggttattttttagatcaattttgagaaagtatatgacaaagtaaattgatcttttgtacaacaaacccttacgatgaaaggcttctctactaaatggtgtcatttcttttattcaaagggggcgcattggtatcaacgttaatgatcaagtaggaccaaattttcaaacatggaagggtctaggacaaggtgatcctttatctccaattctttttaatagagttgttgatatcttagctttgctgatcaagggcaagggcaaatggtcaaatagctagagtagtccatcatttgatagatgatggtttgtctattttgcaatatgcaaatgatacactcatttttatggactacaacttagataatactaagaacaagaagttactaatgtatgtggttgaaatgctctccggtcttctaataattttcatatgagtgaattattctgctttggtgaagcaaaagaatgtcaagaacaatactctaatatttttggtgtcatattggaacttttcttagatatcttggcattccgatgtatttcaaaggttaaactatatgggttgaaaagtaatagaggaaagaattgaaaagaagttgagcattggaaagggaaatatatttttgtgggaggaagattggtcctcattatatttttcacacataatagcatatatattttatattttattattattaaatatattaaaatggcaacatagttttaaattaggaaaaagtatgaactacccagcccccagaactatcgcagtcgtccgaattaccccccccccccccgaacaacaaaaccggaaattcttcacccccaactatgaataccggacgaattaccccctcgacccaatccacggtggttttggtctacatgacgtacacgtggcagtccagtcagcattctatttatgaaaaaattgtgggacccacatgtcatacactacactgtcttctctctcacacactctctctcacttctctctttcactcttcctctctctctctcaccggctcacggggtcagtggtggcgggggacatggagcggcggcgaccgcggcgcgtgacgcggagacggcggcggcggcgcgtgacgcagaggccgcagcggcaggggatgaggagctcagcgcagcttccaccctccctctcgtcggcagcggcgacgggggacacggagcagcggcgcgtgacgcggagacagcggcggtgggggatgaggagttcggcgcggcttcccctctccctctcggtgtcgtacgcgcggggaggacgagggtgcgagacaagaaggcggcggcggcgaaggcagat

SEQ ID NO: 1613 - DNA, 1856 bp, Oryza sativa
ttcccctcctcgccccctccgccgccggccacgacgagtgatgacgacggcgccgatgcggcagctcggctcctccctctcctatgtggggcagtggacaaaggagagccctggccacggtgcccgtggtgaggccggcggcggcgcccgtggtttttttattatttttctgagatgattttcgcagcggggcccgcctacgaaaatgatctattttcgcagtcgacgtgttagcggcggtcctcctccccgcttgcgaaaatggttttgggccgtctggaaatatcgttttttctagtagcgtcaattttccagccagcgctcctactcaagcacatttctagtacattactagaagcaatatttgatctggtcgcttccaacatatttgatccggtggttacttttggcaaacaggaaattccagtcttacattggccaattcccaagccaggtaaattccttacttaagttgcttcagtacataataagttggtcgccatccagttcatcacaattagagcaacagcaattcttgtcctcttccttaatgtattaatagatactaagttggcatgaaaaaataaatttgtccctgcattagttattttttacacatatatattacctccagtaatttgcgcagcaacgcgtaaggtattttctattattcctatatttccaagcacgaaatcgacgtggaagctaggagcatatatatgctttgtcacgagaggtcactaactcgtcatttaatttacaagtcaacacaaaataagatttatatatccctctttaattttttaattttccatggtttaggttaacgctgtacatattacacgtagtcgttgtattatttcaccaacgactacgtagccatgcgtccatatcgattgtataagcacatctaatttagtcagagtacgttacacgctaattaattagggtagttaagttagaaaaaccgttttaggcagctagcctgttaattaaataatcaacctcaaatttttaatagtaaaacagattgacctaggtagcagtagaaaagcttcggatatgtgtattcatggtgcatatatacctcaactaacaaattccttttttctttaagttctatacttgcactttaatatatcctaccccacttgtatatgacctaataatttttaatcctaccctagctattaagaaaattttaggtttacattattataaataaataaaacgaaaaaaaatgtacactcgtactccctccgtactcgtagaggaagtcgtttatgacaatgtttaaatcaaacattgggaatataaatcatgaataactctcaagttgttgagtttgaaaatgtaaaaattatatgaatatatttgtcttgagaaatattttcataaaaatataaatatatcacttttcaataaatatttttatagaaataagaagtcaaaattgtgttttggagaccgtgtcgctgtccaaaacgacttcctttatgagtacggagggagtacaattttgtattctttaaagttttcacatgtttttcctttctaccataaaatacaatgaatttaaaattgactttttatatatattcatgtagaagttctatgggagcttttataacactagaaccgtgaaattaatcaaacattgtgtatatataatacgttgcagctatagaaactggatagcaaattaaagccttgctttacttcctgtaaataaaatttggatttgccaaatggcattcgacaaaaagttgagaaatactccctccgtttcaaaatatttgacgccgttgactttttagcacatgtttgaccgttcgtttattcaaaaaatttaagta

SEQ ID NO: 1614 - DNA, 579 bp, Oryza sativa
aatgagaatgaaacatcaggctgatttaaagagatcggagcgctccttctctgttggcgattgggtctatatgaagcttcaaccgtttgtgcaacagtcggtcatcactcgcactaatcgcaaactttcttttcgtttttatgggccctttcaggttttggccaaggtgggaactgtggcttaccgtctggcactgccagattccagtttaattcatccggtggttcacgtctcccaactcaagaaggctttggctcccgtagaacgggtacagtctcatttacccgttttgcctgctgatgaagctgcagacatttcgccttgtcaggtgttgaatcacaggcttgttcgcaaaggagctaaactggtgaaacaagttcaggtctgttggtcccgccaagatcccgccgccgtcacctgggagaatcttcaggaactacgtcaacgctttccacaggccgaagcttggggacaagcttcatttcaagggggggagaatgtcatgacgactacttcatctgatccacccaaaggcacggatgatcaaggcgacgaaccaatctcacacaatgggtagag

SEQ ID NO: 1615 - DNA, 24413 bp, Oryza sativa
  unsure (1)..(24413): unsure at all n locations
gtgaaatgagtggtgaagaggtgaggataggataaggatgggggaggagaggataagcaggtaggtacgatttttgtaagcggaccacctaacatgcgcctgcgaaaattgattttcacaagcgtcgcttaagtggtccgcctgcgaaaataattttcgcaagcgtcgcttaagtggtctgcctgcgaaaatcaggcggacagctagtttcaccccgatttatatttttataggaggtcgtttggcttcaaatgttatgtccgactgcgaaaataagacccctacgttgggaaaaatgctttttctagtagtgacgtacgcatgaaatctagcaataccctatgggagcagcaaaccccatgggctacatgatagaattttaaaaggagaaagtcaacgacaatgtatgtatagtattgtttgttttgttctaaattagtatcagtgaaagcttaataatgtggcaccgtttagttcgcgaaatgaaaatttttaggtgtcacatcggacgtttgaccgaatgtcggaagaggttttttggacacgaatgaaaaaactaattttataactcgcctggaaaccgcgagacgaatcttttgagcctaattaatccgtcattagcatatgttggttactgtagcacttatggctaatcatagactaattaggctcaaaagattcggctcacaatttcctcctaactgtgcaattagtttttgtttttatctatatttaattcttcatgcatgtgtctaaagattcgattcgatgtgatgtttttgggaaaaaaaatttgaaagcagggcctgtattaatgattggtatgacgtacgtacgcccagctgggaacgtgcgagctagattcgccaccggaatgactgtgcgtacgactgcatctgtccgaccttcatacgactgcacatgataaattttaacttattttgattgggcccacgtgaatgcttatgaactcctatgattggttggtttggcgcagtcgtatgagagttgtatggttcagtcggatgtacagcactactcattctctacatactactccatccgtcccaaaataagtgtagttttgtactatttatgttcaacgtttgaccgtttgtcttaattttttttatgattagtatttttattgctattagatgataaaacatgaatagtactttatgtgtgactaaatatttttaaatttttcacaattttttaaaataagacggacagtcaaacgtggggcacggatatctacggctacacttattttgggacggagataatatctccttagaccacggtaaagactgatgatggaggtaatatctccttagaccacggtaaagactgatgatggagacattttactgcttggtcgctacgaaacttaacaaacgagacgtggccccctatcatatggattgctttgccagcatgtgtagttagaccaaggtccggagatcttgactcgcagtctacttatatataatctctgtgctaaaaaaaactcaatagattcattcctaagattttttttttcagagggagtacagtcagctccgtctcgaattataagacggctttgttcttatatgaaaatcaatcttaataatgggttattaataattataatgtgtttaatgccatgtgtgtacatcattaaattcatatttttaaacactttcatgttatgtaaattttaaaggtggtgatataacatatttttgaaagaaaaaataatggtctaagatatatatggtattggagatttcgagaccatgtagaaaattttatggcttgcatgaaagctttgatttaattaactgctgttttagtagtactaactaaattaggtgccctgttcattaaacgacggatataattaactggattcggaaacatttgacagtgagacgggataatatatgtactgagagatacattgggaatgtatcctatagacgcaagttttcataccgtatacatcaactaacaaatatcactaaaaattttagaaaactttgtacatgtactttcaatagtattatatctacatataaagtcacacctttaaatttattttacataaagagcaataaaaaagataaaattaagatagacttgtagtcttagtactatcatattttttttgttttttttacgcctaaaatgtattaaatttgatgttaagattttacacgtagatataatactatatattgaaagtgtatacccattttttctagatttttcgatgatatttgttaattggtgtatacggagtgtatacactttgtcagggttatagataccacatatctaattgtagttgactaagctcggcagggctcaccatataccatgtcttatacgaaaaaaaactcgtatatagaaggaattccggataaggaaggataaatagagttttgtacggaaacgacaaggactactcggatcatatccatatttatctccctagttctacttggacaatggggcatctatgcgtataaatacgagccccctaggaggagagaggtaggaggagagaggacaagccacaagacacaacagatcaatataatatagatcgatacaagccaacacacgccaagacaagctgctggatatcgatatcagagataagcctagacatacccatccgatgcctacgaaggctggcaagagggatctagtgccatctctgatctcgcggagtgtggattcgaggaggaagactaccccaccgtcgactacgagttggttatctagccgccaagtcgataacagctatattggttatcccaaatattgtacttgtgtgattcaaataaataaaggagcaacaccggcttcggccaacaggagtagggctattacctgtcagataaggggcctgaacctgtataaaatcccggtctccatcttttttacctcaatctcgcatattgatgacgctctctctcgtggcccgatcttctggtgaggggataactctcgctttgatcaagtgcgacgtttgcgacgtggctaccaaccagaacaagtccaggacgccgtgcaatcgctacaccacaaatgatgtcgtaccaaccgtgacgcgcagttgatgatccttgcaatgcaaacgagagaacactacaagaataagataagatacaatctaaatattgtgaataggtgattaagcacaaaggaatagttgcgattgaaatggtagatataatcgacccggcaaatcaacacaccaactattgggggctctgaatcaatagtcaccgactaatcgagcgataactagagacaaagtgaagggcactttgcaaaattcaactaaacaaaacccaaatgtttttgaggatgtacaaagctatttatagaggaaaataaagctagagttaagtgctaattagtggaggtggagggagacacttccgagatgggcctagtctattacagggaccaaggcccaagttctgtttcaggaatagcactgtcttgttttggcgattcccattgactcgagataaatttggacatgagaccagttgcatttgaaaggtagcgagataagcttttcacaaagtctaagatcacccaaatcggagttcgcatgaaggcgctaggttcatttgaagtcagtgctgtctccggaggtcgaactggattccaaaacccattggactttaatatcttgtagatcctctgttcactctatgtattctttgtccatgttttatatttctcatgtttgggtgtatgcatatatttgatggtcacatcacatataccttggttccaacggtccccataccatacaaataccgtagtcgcgatctcaaaagtcgatacacttgtgtgcacataatatattcccaaatacatttcatatatatatatatatatatatatatttatttaaactgaaattgtaaagaatttacaagatggatatagtatctcgtgactaaaactataatacgaattacaactaaattaaatttgatttttaaaacatggtatcgcaagaaccgcctacccgccaccgctgggcgcggcattaccagccgccgtagcgcgcagcccccgccgccgccggccgcttgcctgccaccaccgggaggagaggggaggaagaaggggaggaggggtaagatctgtgtaggagaggggaagaggaaggggaggagaggaggagaggggaggatcgatcgatctgtgggagaaagtggttgcgcgattgtggaggagaggataagtgctagggattagaattttagttccggttggtaatatcaaagggactaaagtggtgatctttagtcccggtcggtggcaccaaccgggactaaagatcctcggtcccctgacatgcctctgacagggaatgaaccaggattacagatcatctttggtaacaccaaccgggactaaagatcgtagaatggctatggggttttcaaccggggctaaagatcatttttagtcccggtttttttggaaccgggactattgtgattttgggttgacccagcgaaaattagttttccagtagtgtcagtcaggcactgacgaaagtacgtaagagatcaaaaagtacagtatagtagctaagtatggtccaagatgtgtagctagtacgtgcaacatactacatccgaccatagccaccgtacatagatacgtttatatattatatccgggggaaaatatgtgatggaaatcatatatttggtggaaacttgaaaactaacgttggatcgagaaatagacgtccgagatacgtccacgttatcacaaacgtccatttttcgacccaacgatagtttccaccacatatatggtttccaccgtatattttccgctacatccgaccaaggagtacggttttatttatcacagattcacacaggtatatatatgctacttggtcgccaagctaccgaacgtataaaatagagctttattaatctctgttcttatacgcatacgtgtaagaagagggacatcaattgcaatgcaatgcatatggtctcaatcaagacatgtaaatgtatttctaattagttgattggtgttcattgccctgggcatactgacttacagttttttttctcttggaggaatatatacattacgcgtttaatttggcactattttagactttcaggcgagtaagccgcgttggataaatacacacactttttttcttgacacggcaagcacttcgcagaaactacagggaaattttcatttcttctggctaatgatcagttgacttataaaataacacgcaggcagtacgtacgcttggtaattaagttcagtgaaatcatctttataaatacctattagagcttgctagatttaagaatctacttgtttcttcctcttaaaatctcaacttttccttgctatatatttcgaatatattcttgatcgcatacaatctgtgctttgaatttgttagagatcagggcggcttgattaagcaagattaattcattcaagattcaaccatgaggctgttcgaggagccaccggcgaagctcacccactgggctcacccggagcacgagctgacgctggccgccaccgccggggcgccgttccggtgcgacgggtgccaggagcccggcggcgacgggccgaggtacaggtgcgcgccgtgcaacttcgacctccacaccgactgcgccctcccgccggccaccctgcagcacccgctcctcttcaagggcggcggctgcaccttcgtcttcctacgagagccccccgggcccgccgccggcagccggtagtgggacacgtgcggcgacgacgtgcgcgggttcgtcttccactgcgccgaccgcgacctcgacctccacccgtgctgcgcgagcttgaaggaccgcatcgtcacggcgggggcggcgacggcgacggccgcgtcttcgagctcaccaagcggcgtcgtcgtcgtcgtcgcggcgccgctgcggcgtctgcggggacaagtcgcgcaggacgttctggttctaccgcggccgcttcgacggcgaggacgtgttcatccacgtggcgtgcgtgaaggagctccccgtgcgaaggtggaaggcgagctaccgccgccgcagcggcgccggccagatcgcgctcgccggcgcgccgctcatggagggcgccctgcagagcctgccaaggagaacgcggcggagcggcgggttcgagcggttcagcaagatcgtgggtgtcatcgtgagcgccataatcgccgtcatcttcgggaatccgatggggttgatcgccgcggtggccggccctgacggtcttctccgcgggtagaagacgagtggaaaacagtgtgctgctaattagcaacagtcaacgagtgcgtcacgtgtagagtgttcttctctatgatttttttttcttcgtataaacccgaatgttttatttttaatcttgtggtgggtttggaatattttgaacaaagattggttcgttcatttatgcatgtttcgaataatttcatttcatgttatcattgatgtactcttctatcctatttacagtttatggtaaagtttttttttcctaaggggcacattaccattcttcgccattcatatgctggacaaaatgttattttaggcgaatattcaggatgagataatatttcaaatctatattttttgagttgtacatagtaaaaataattttggataaggtgaagaaaatggtggttttttggtgttatgagctgaccatccaagaggagagagcgaggaaacgagaggacacagtattttctctgtaaaaaagaagaaatgatacggcatcaaagcaaatggaaatgagataaatcccaacatgcatttggaaagatacccaatcctttacatatgctcttgaaatttactcaatatcttccataccctaatttttttattggatcccttacacgcccctaccgtttaggtattcttcagatatgccagtgcatgcatgtgttagcttgttagtattttaaaaaattatgaaaatgctcataacaaccctaggtaacacatgttctcatctccgatctccaaatcatactctagcacatgcatagagacttcacatcacaatccgtgctttcttagttgtcgagttccgcttcctggcagcgacatcaactatacatcccgtcgcggcgaaggtccatatcccgttgtagccttggctcagcttcttgttgcgttggcggaggtttgcatccagttggtggcggtggtgattgagcatattgattgtgcaagaagacactgcctttggagaaaaacaatagatccccaaaccaaatctcactctcttgcggcttgggatattgtttgcagactaacgaatagaggatgtatgggtattatcaatttggaacatcagaacattgcacttcttatgaagcatcttgacaaatttttcaataagagaaatctcccctaggtcagatttctttggagcaaatattatcataacaaacccctccctccacaacctatgtatgaaaacggctcattttggtggaaagatatcttccagctaattcctctattcagggtaatctccactcttcaaatccatcaaggaaacatagctttattctagaaagaccattggggtaatgatatcctaaaatctagttcccatcactattttcatttgcaatcagtgaggacatatctgtctctgccttccatcaacaagatctctgataattttcaactacctctcaacactcaagcattgcaagagtttcaacttctggctataacgctagagagcgtcagctggtctgagcaagaggattcttggtcttacttttgggaaccaaagtttcaatcaaaaagagtctatgatatcttctattcaaacatcattccctccccagcaatcaccacaatctggaaaagtaagtgcactataaaaatcaaagtttttctatggctcctcctaatggaaagattaaatactagacttatgcttcaaaagaagaatcttaatattcctgatggacctgaatgcgttatgtcctctcataatcatcttgaagataccattcatctcttcttcacctgccaatttgcacatcaatgctggaattatctcaatatacattggaattccaatcttcaattcttcaacatgatactcatttccacgcaaagtttctttgtggaagtaattggtcactcttgttggaacatctggacttgcataaatgatttttttttttcttttataatatcccgatctctttccagtgtgggaagaatctctttaagagagattttgctctgcttgtgcatagagcaaatttgttagaccaaccagtttggaaatcatggcttgacactctattgtaattctctccctgtacatatgtatttgtaactttattattttaatatatcgcagtaggagtctctcgtgttgttttaactgtcaaaaaatagttggtggcggtggctccccttcccatcgtggttgtagctccgcatctgatcgacaacgacggcttctgtcgcagcggtggcttgccatcctgtcggtgctcgaggtccctttcccggcccccgaacgctcgagctctcgacgcccccactctccttcacatcgttgaggatcatccatccttggcaaggagcaggttgatttcttctcgtccttttcttcattacattgaaatcttcttcttccttaggtagtagtagtggataagcgagtcctcttgtattttggatattttcatgttcaatttgtgtaggtaagtgcaaacacttggatagaagagagagcgaattagaggcgaccatcccctttctttgcaagagaagttcactcagtgcactttaccgtcaagttggtgcaccacacatccgcatcgaatggaagattcaaggtctagaactattccttcatatcattctttggggtaattggcttaattagctatcatgaataagttttctatggtttatgagtatctaggattcaatttggttgatagatagattaattgataggcaactattatgctcatccacaggatggaatccttaactacatatctgttgaaaatcaaactaggtgagggatcagaaataagctagtgtggaatatgattggtttatgtcagtaaggtggtagactcaaatgcaatgttctgcaaagactttgttggtcatattatgaagttatatccatggagggctaaatgaaactgttatagttggctatgtgcatatggttcattgaagttctcatcatgtcacaactaactaactaggatatgatggaaatgattgaaaagtttgttgataccaaggtgattccattgattatccgtttgcatggtattaatgaaaatgttgatgagttcgatcaaccacactcttgttaaagtaagcgtagaagtgcttgatactcctcttttgagaacctcatctcaagtgaatttcagccaacctagcagcagcactaaccttctcatgcccttgtgccatccaacacatacttagaaaacccttatcctatggctaaacatgttggtgttgatgagcaaggcatgtacttagatgatggtgatgaggttgcagcatgttgtcatgctgagaaaactagacttcaaggggttgtcagtgaagaatccaagtatgaatcttaggatggacgtacatgaggataaatctcaggatggacttgaggatgaatctcaggatgattgtgtggatgaatcgatggtatcagatggaataccataacatcttcctacagcaacttatgataaaaacgatctaccaatgatagtagaaaacatatatcctaagatgaatgaatttagattgaaaatagtacaacacgcaatgaaaaggacaataggacaaggagcaatagctcaggttcaagtaaatcggataggcacttatactgcaccatccaatttatttacaactctctttgttcaagtctagatcacttaccgactccaaccaaccaacatgagccttctaacatgattgtagcactaccatgccttggaggataaacgctcctatttgcacctaaaatggctctaagagcaagacaaaggaaaggccaccacttgatattgttgctcctaacagcctagctatgagcacaaggagtaaaagtaagagccctacaatgagcactagaagtaaagaaaacttatggactaagtaaacaaaactatgggtataactagttgatttagttttcttttttactgtcaattaatttaacttgtgaactcttcaatatgctaatgcatttcctgaagagtgctaaagtgttagcaacttactcatattttgctactgtgaagattgtttgctattgtggtaatgtggtggtgtacttttatgagtcttgtgacattatgctcatcatttacaaagtaatggattttttgtgtgtgtatggtataatttgatttttctagctaatttggtttgtcaattgctcagctattgaaatggatttgtggtgggtgatggtatgaattgaattgttaatcttgtattgttgatggtgaataaatgtcttttcattttcttcctgttaatgggtgctatcgatgctcctaatatttttgtatggatgctccagatgaattgcattggtacttctcagatcaccaaaaagatccattgaatgctataaaaaagataataaatgcattaaaattctttttccacatttatattaaaaattttatgcattaattatttagtctcataaaacacataccgtgcagtcatgaatattttaatttttatcaagccaactgccaaacacacgctaaatttccaactctaaccccaacggtattatggtaactttcaaccaaattgaatagtgaacggaactaaatctaacggttgaggatcaaataaaaaattcagggtataaaaggcatcgagtaaattcagaggcatccaagagattgggtaacttatttaggggtacatagggaattttctcaatgcaaataagatatgttagatgatgagaccaaacatactgtgagaacgataagaaacacaaacaatgagcattgggcaaccaggcttgacctaaggctagaggatataagtcttggattacaaaacctacaccataaagatatatcttaattttcaacaaaagaaaattaagatcagcctgccagactaggtgaagctcctggcctagcccaaattaacgaaactaccaaaaagtttggtccaagttttttaattcaagattaacaaattttcttacctatattttctttagcgaaatatttcatccgtcccaaaataaatttacttttttacactatatttagattcaagtaagaaaaataatttattctaagacggatgtagcatatactagttatgtataggattcacaattacgacgaaatcaggccaattccacgaaacatcgagattctgatatggcttggaagttgttgccatctggaaattcgataggtttcatccaaattcaaatttgagttgataaataacgttaaaaatcaaatgaatccctataaatagtatgatattggttgaatatattgggatataattttttcaaaagaatggtgaattacattctttttgtgaactgtacagagaaaaaaaaaagataatgatttgggaaaaggaaaaaaaaaaggcctttcctaggagaaattccatgtaataggcccatttcgcacttagctagcccagttaacataatggagggatgatgtgacctgaagaatccctgatcgatcgatccctccataccccagtagctgaccgaagagaaggatgaggttaatgttgctttctacatgtggattgatgtttagaaatatttcccagttttctaacatttccctctatttttcacatttttgaataaataaataaatttggtattaattgtcggtttctcgacaaaaccaaccggttttcacttcggtcatgctttttaagttgtcatttagaatttcgttagtttctttgctactttcggtagcaccgatgatcggttttcaacgcaagatcagttgacctagaaaattcgaatacaaaactttgatttatcaattttgttcaaaatctgttggttttcgtcgggatttcaggaagaccgatgtcccaccagcacccgaaatggaaaggaagtcttggaaacagtccatccgagctgtagtagctagcgtgttctagtgaaatctccccgtgtaagacctcgattggaaacagtccatccgagctgtagtagcgagcgtgttttcgttatgtatgtcatccggactggatctatagaccgtgcattatattagtgcagttaatttattcctgacgcaacatatatataacttctccgtatatacttcctccgtattttaatgtatgacgccgttgagtttttaaccaatgtttaaccattcgttttattcaattttttgtgcaaatataaaaatatttatgttatgtttaaagaacattcgatgataaatgaagtcacaataaaataaataataattatatattttttttaataagacgaatggtcaaataatatattaaaaatcaacggcgtcttaccagctgtcgaccggtcggctttgctaacgaacaacgactactggactaccacagtacggccacacgcaagcaagcatacgcacgccagctgatccatcgctgatgcgcttgcactagcgtcatcaccgtatagcattattgtctactcagttttcatattataagacgttgtgatgtttcaagtttgatcaaatttataaaattctaacaacattttcgacaccgaacgaaatactatcaaaatatattagtttaatactatatttaattaaacttattagatgttacaaaagttacttatatttctctataaactttaattaaacttatagtagttcgattttaattaaagagtcaacacgcgtctttatactacataagaaagagagagaggaagttaatgtaacttatacgtaacgtacgttcatgttagttgctagtattgtcgtgttcatcctacattcctactatatatactcggtcaactctagatatgtggtgtgaactgtcatgttatatgctgcatgtggtggtcggatacgctaattgacctgactgtcatgtattatctgatcttgggtgccctacaaacaaaatggaacaaatccaggcatccagcaccgttgtaaaatgcccgttaatagagttaaaagggttatgtctatctttggtacgtgatgaacactcggcactaattcagtacttttttttccgtgggccaaggaaaaatggggctcagcgtgaaggaggagaataccgtaagagaagtacatatataggtcaactctttttaaatataaagcatggattccgaaaatgtaacatacttgggtcctcatatcaatccaaatgcattaaattaagagggactgtgtagggttagtgtatgagatgagactatgcatgaggcagcagatgttaattaacattttctttggaaagaaggaagcaataaaatggagaggaaaaaagtacggcaactggtggagaaaccatttatactcctggttagtaacccctttagtcccggtttttcaaccggaactatgaacctgggactaaatatgcccatctttagtcccggttgaaataaccgggactaaagataccttatcacaccaaccgggaataaagagagggtagcgttagtcccattaggtctcttttttttcattattttttagctagagtttaatccctatattttctcccaaatcaagtgggatacatatccccaaatcaaatctcaaatcaaagtaacatctcaaaatatttacgtcacaaatcttaagttacttatgcacacaaatcaaatacatcacaaatcttaaaaaaattacacacaaaccaaatacatcacagattatacatctcatatcatacaacaaatcacaaaattatacatcttagtgaatcacaaattgtaaaaaacaaaaaagatgccggcagcggctgccacctgtcgccgctcgccactgggcccgtgcgcggcctagccgaccgcctgttgcgtgggaagggaggaggggaggagagggccggggatgggagggaaaggggaggaggcggagggggaggaggagggagatcgatctgagagggaggaggggaggaggagagggagatcgatctgagcggatgggaagggaggatggggaggagaggcccggggatgggaggaggaaggggaggaggcggagggggagcaggagaggaggagagggagatcgatctgagaggataagtgcaaggcggttgtggaggagaggatagggaagaaggattatatattaagcgttgaattttagtcccggttggtattacaaacggggattaaaaatattctagatctttagtccgggttgataaccccaccgggaggtaaagttaggatttatagtcccaggagtaaagatcccaggggcctcacaaggcctgacaggtttagaactgggactaaacatggtctttagtcttggttggtgtcaccagccgggactaaagatcaaatatgtccactgtagccaccaaccgggactaaagatccggtttttagcggaactggaactattgtggattttggccgaccgaccaaagatggtttctccaccagctgccacggtgaaataaaatcaaataaaccaagcaaaaattacccatttcccccgtacaaaccaaacaattaattagccacaaaatcaaacaaaaaggcaaattattgtatatatacttcctccgtttcacaatgttagatttttttttctttcgttcatgttaatgaatctaggcatatacacatgtctagattcattaacttctatatgattacggacaatgctagaaaatcttaaaatctgaaacgaagggtgtacctaatatataaaaaacaatttgattgtaaaatcctgtcccatgaaatccatcacatcaactttacatgatcacaaaggcaaacacacccacgaatactctctctccgttctaaaaagaatccaaactaatatgagatgggatataatctatgtagaacgaaccttgatatgagcatatctagattcattgttttttttatggaggtaatacccgccaagaagtaattaacgtatcttgttccatcagttaccggccaacacaacactagaccagcactcagcttttctagccgtagacgacgttggagatgaaggctccgacgagaggcaccgccaatcccgttgggtccccgaacagcacgctgacgatgacggagatggcgaagttgaggaagcatttcaccgccttgccagtcctggaccgcttccgcttcttcatcgtcttctccaggatggagacgctgatgatgctcctgccgccaccatcgccgccgccgccgccgtggccagcagccaagatctcctgcaccatctccttcacgcacgccacgtgcaggtacatggcctcgccgtcgtagcacgagcggtaggtccagactttgcggcgcagcgtccgtgagcagctgcagccaccgtcgtgtcaaccggtataaaactctctgtcaaccttctcttttatcggaatatcacgtatgtcctgatatcagcattacttaaaattttttacatttatataaataatgttctagtacctttaaattaaatatttatactccattaaaagcctatagtggtggtagtgaattggatacccctattgctttggtaggtttacaaattgcccttgatattttctgatattgtggaatagctcaacatttagttcaaacaagtgaatataaatataatcaaataagcaaatatgtaacactaacctgttcttttctgcaacaaaagttggattaaattttagatactcgtggcacgcttttcaaactgctaaatggtatgtttcgtgtaaaaattttctatataaaagttgttctaaaatatcatattaatctatttttcaagtttaaaataattaaaactcaattaatcacacgttattacaacctcattttacgtgaaacacttaatcttcatcttcatcttcaggacattcaaacaccaagatatttgataaaaaaatattttgccatgatatattatgataattttattcttctagcttaaagcattggtattttacgaggttgtaaagttattggtaatcaaggctataaaattttaatcttaatcctattcaaaacatcaaaagttatgaaaccggaaggagtaggtccattgttttttccaccgaaaatcgcttccgtatttttgcacctgaaacggatccttcgtttacgcattagcgacgtgcgtgatacgcgaaagcagataacgaagctcgcagcaaactcgaaagaacacaatgcctcctcctgcccgacctcacgatgacgattcgcaagctcgtgctcgacctgaggccacacacaacgtacgtgcgccttctcctgcgcgagacgaccgtgcgtcgcagccttttcgctcattcgcgtgctcgcctccaataaaagagaagaaatataatgacaatatacggcaacatgtgtattcttccattgagtacccggtgttagacttgaacttgtcgactataacacattaacacctcaacccggacacgagcacggagccacagatgggcgaaagcgaaacagaggaaagcagagcagggcaactaggggcggaggcagcattttagcaagaataggactatagctataaattttttgtgtaaattctacctaaatttcagtgtttctccattaaaaatttttgccacgtgtggagcccaagcccaaactgccccacacgtggctccgcccctgagggcaacacacaatgcactaatactgaacacggagcttggcgtctcatccgcgaaacaaaattggcatattaatatgtatttttttttcttgatgaacatgacacaattttctgaattcaggaaaatagctactccctccgtttcataatttaagtcattctagcattttccacattcatattgatgttaatgaatctagacatatatatttatcaagattcattaacatcaatataaatacagaaaatgctagaatgacttacattgtaaaacggaggaagtatataggactgtaattggcaactgacatcaagtcaactacatactttgcgaccctacactcttttagctagcgaagacaacacagccaagcaatgcagtaatgcactagttaagtagttatccctaaagtgaatttattagcaaataaaattaatcttacggcattagactactaatagtatccggtttagtaagttttggataattgttaggtcaaactttaaaattttgaactataaataatttttaaaatatttgtctttcaaatagagacatatatttagattagtctcacaagcaattcaacaaaatcatatatctgttaaaaatattatatatattataatagaaaaaatagtgttcaaatttattttttttagagaccgtgctcttgtttaacagggcaatcagtattatcaaaccgaagagagtagcttgctagccgaagaaggggaagacgtggtagcggtcgtagagctcttcgaagacgtaggagacctggttgcgttcgtagagatcgcggagattgtcgtccttagggttgttgaggttccagagctccaccctgcgattgtcgccgctctcgaggtagtcgtagcgccatagcttgtagccgctgtcgtccagcacgacgaagtcgccgcacgcgccggcgaagtccaccggcctctcgcgctcgaacagcatgtggaagtagtagaagccgacgtcgtccaccgtcgcctcgtgcacgcgccgccacgccggagcggcgacgccgtcgtccgtcgtcatcacccacacgccgtgcacgcccacgccgccgtcgtgcggatacgggctgccgctctcgtcgctgtcgtcgcggacgtcgaacgcgcacatccggaggcgcccgccggtcgagcccagcgaccgctccgcccgcccgatggacccctccgccctcgcgggctcgcggaccacggtgactcggccgccggcgacgtcgtagcggaggatgcggccgcggttgcggcggtgggtcagccagtagaagcacccgccgacgtggatgcccggggacgcggggcccgccgccgacgctgcgtgccaagccctgggtcccctgttcgggcagctccttcgtctcccacctgccggtcggcgacgtgaaggtctcgacgaccacgcgccggtgcctgcagccgatgagcaccaccgtgaagtctagcctccccgtccccgacgacgcatcgtcgtcgaggtcgtcgtagtgaaggccggagttgatgccgtgttccggcgggagagtggatggcggaagctcgacccagcggttggccgccgggtcgcagacgtagtagcagctccggccgcgggccagcagaagacggccgtgcgccgcgacgatggagatgtccagcgccgggacggtgcgctcgaagaaggcgacgtggtcgtcgtcgtcgtcggcgtccacgacttccaaccccggtgccagatgatcggcaaatcgatcgggctcctgctccggcagcggttcgtcggcagctgaggcattcgggatgaagctgcggcggtggctctcgtgatacaagcgagtgggccgcttgtacttgttccggatggggacgtggacggcgagctcgtcggcggggtcgacggcgacgaggctgaggtgggtgaacccgagcttccgcggctggacgatgagggcgcgggggcgttcgccggcgagtggccgcggggagaggtggcggcagaggaacgtcggctgcgacaggatcgctcgccaccgcgggcacgcggcggcgaggcggtgcgctgctctggacgacaggctgcgcgagatgtctgatatgacggcgtcgtcgggtaggtgccgcccggcggcggcggcgacggcggcgacggcgcgagcaaatcgttggtaatctctcatggtgctatgctacaccaagctaggtctaagattagtttattcggaatgatatttagttaggttcggcccatttatccactggcccgatccataaattcgttggtaggccgtgttggacctgaacttggcgccctacacggctacgcctggacgcgagcacaaatgggtaaaagaaaaaaaaagaaaagttcacgttaggtcccttcatatgtcaccaagtgtgaaattcaaccctaaactgcaataacatatatgccgtgtctctcaactcctaaattcagtacaaataagattacaagatgtttggatagtggttttgattgatgtggcacttatagtcccaagaaaccataaaactcatatatccgcgactatccactatggaatccacgtcatcactcttgtttttttttccctcttctctcccttctttcttggggacctctgccctcctgctcgccaccaccggtcgacgccgcctctctccttcctcgatactccatagagaatgattcctcgttcccgatgggcgtcgcagatgtccccttgttggcttgttgccgacaacgacggtggcgtcgctgaggcaccagtcgcacatgccggcgctggccctccgccgggtccccatcactgtagtagttggtgaacagtgggtaagtttgttgattgcagcacgtacgagtgctggaagtggcggcggcgggcgcaacgagagagcttgttcagataaccgacatcgccgcaagaaggagacaattttgatacggttagagtgactgtgacagcggtgcagaccgtgtgagagaagtgacgacgaggagcaaagggagagagaggagcaaacggagacaagagggaaacagggtgatagagaggagcaaacgtagccaggagggaaacagggtgatgacgtgggtctcactataatttttttatttttaattaaatagttactgatacgtgggtctcacggtattttctaacttaaagtatcatgtcaatgccacataagcgtcacgtcagccgaaactactatctaaaccatcttaggattttatttgtactggttttagaagttgaggaacgcgtcacatattgcggtttagtgacaaattttatactcgatggtagattggggtacctgaagtgaacttattatgagagagagagagagagagagagagagagaagcagaggaaaacagagcagcgaacagatgggcctaaataaaacagaggaaaaacagagcagcgcacagatgggctaaggttaaacagaggaaaacagagcaaaccagagtgcagtgaaacggagcgagagatcccctgaaactggacaaattgacacacgattttgtgctgcaagaaccgcgcagcatttctgattttattcctctcacaaattataccaacaaaactgctatacaaaacaacaaatgatggtaaatccctagctaaaaacctatttgcgcgcgacgagctcaacgtcgacgacacgcatctaaactgacgctggcttctccaaacatggccatgcgcccaatcaatcaaatttaaacaaaaacgcatcctaaactcaaaaagtttaggggattattcaacaaatcaaacccctagtactcctattgccgaccatgatccctaaccggtggggaagactaaccccaccaccgccacggccatcgccgtcgggtcaccgaacaacacgccggcgatgacgcggaggacgaacacgacgatcttgaggagcttcttgagcttgctcctaggcctcccgttcttcttccgcagagccaccgccgcctgaaccggagccctgatcaccggcatgttccggccgccgccgccgccgtcggtgcggtggctgctgctgctgccggctctagagctctcgtaggccatcctcttcacgcacgccacgtgcaggtgcacggcctcgccgtcgaggtcgtcggagctgtacgtccagtagttgcggcggaggtgggggcggctcccctcctccgtgcagaggaggcaccgccggggagccgtgccgccggaggagagctcgaacgcggccccgccgagagcgacgcggcccggcaggtgcgcgcaacaagggtggaggtcgaggtcgcggtccaagcagtggtagacgaagccgcgcacgttgtcgccgcacgcgttgcagaccctgacgtcgccgtcgtcgggcgccgccgtcggcgggggctcgtgaaggagcacgaacgacgcggttccaccctttgacagcgcgcgcncccgcggcagnacgtccggcgccagcgcgcacggcgcgtgaaggtagaagtcgcacccggcctcctcgcactcgtaccgcgcgcagccggcgccgccgagctctttgcagccgtcgcacacgaacctccccgcccccgcgtcgtcggcggtgatcagtttcagcttgtgcgccgggtggaacgggtggccgcggatctccgccggcgccggcgcatccttgtcgctcttcaccttcatcggtgaggaagaaaggatggatcgtcaattcgaatccgtctgtctcactgcgctgctttctttggtggaatggtggcggcgcgagtcttcctgtttatttataggtttgcgcgcgccgccttaagccgcggagaacaagcggttgcgtaacactggcgcatgaccaacacgttctccttgcgcgccaagccacagcataagtaaagctcggggttgatctgctcacttaattcgagtacataatgcagtagcttaatccttaagcttgattagttactcatttaggagtactcacctattactggataggatataggaatattataatgatacaactataaagagaagcgggggttgatatctcgcgtgcgcgcaagatgcacacacgccagctggcgccctctcccccagcaacgcagtttttttttctattttagcgctacgtttcctctgcgcatttttctttttttaagtgttttttccgatttcttttaatcttcagcacacgtgtttttcaaatctctgagttaaaagttttcaaatttaagttgaaagtttctaaatttgagttgaaagttttttttaagtctaaattaaaagtttcaaatatagagttgaaagttttcaaatcttgacttggaagttttccggtctgaattgaaagtttcaattcaagagttgaaagttttcaaatctaagttgaaagttttcaaatcttgacttgaaagtttcaaatctagagttgaaagttttcatatctatgttgaaagtttttaaatttgagttgaaagttttccagtatgaattgaaagtttcaaatctagagttgaaagttttcaaatctacgttgaaagtttttaaatttgagttgaaagttttccagtctgaattaaaagtttcaaatctagagttgaaagttttcaaatttgagttaaaagtttccaatttgatttgaaaggttttttaaactttagatgaaaagttgaaagttttcaaatttaacttaaaaattcaaatttcgagttgaagttttgagtttagttatggcttttaattttttcatagaaagttttaaatttatttaaaggtttctttcatgtatagatttcattcaatctatcagtaaaaacaacttttgaaaaaacaaatcttaccttaattactgtcattagctaattagagtcattatctaagaatggttagttacgatagtatcgtcaagccgggaaaaaagataaggcgtagcggtgttggtctcgtgggtataaaacacgtgccgacaacacacgcgcgccaattagcttctctggacaaaagctatattatgggccagagggagtagttattgatttataaatattaaatttatatatatatttgtattacaaaacattttaaaaaaattaaccatatgctgaatgggttagttattcttccaatgggactattgtggcgacgacacagttaaagcaaaatttggtgagctataattgcaagaaaaaattatatggaggagtaaatttcgcataaaatacaaataattttatcagtctattataacactaaagatttaagaaatgtaatcataaaatagatattaatttaacatcaatcttattacaaaactactactttataacttaaaggaatatcaataatactcgacctaaactctaaaatacatagttctataataatattattactaaagctgtaattttgcgtgtttcaaaaaaaaagccgtaattttgtgatacaatatcttaaaatatagttttatgataaatttagtctaaatatgtagttttgtgatatatttatattttaatctaccttttttcttaagacacagattttatctttgttttcggttctcattatcacgcttttttaaactgctaaacgttatatttcgtgtgaaaattttctataaagaagttactctatctattctttaagtttaaaataattaaagtacaaactgatggtttgatagcggctcagctcatacaatctaaagagaaagatctttccgcactagcttacattgttaaggaggttaaacaccgagaaagggaaatagttataaagaagataccttggtcctagaaccaaacaagccatgttttagctaataaagcttgccctggacttttatctgaattttggttaggagaaacttgtaattttatttcacagttagttagttcacgaagactctttggtcgagtaatatatttctactcttccaaaaaaaagtttaaaataattaaaatttaatcaataatatgttaatagttttcttattgtacttaatttattttatctcctgtaaacttaaggggcttatattagggctgtgtttagttccacattaaaattgaaagtttgaagaaattagaacgatatgacggaaaagttgaaaaattatatgtatagaaaagttcgatgcgacggaaaagttgaatgtttaaagaaaaaagttagagtctaaacaggatcggcatgcacatacgttagttcggtcggtcgacgaacgtataaaccacgcagaggcagaagagcgcacgcggccgccgatccaccggaacaaaaaagcatattcgaccgacggattgatccatcgggcggccaagatggagaaagaagctagcgatgacgatgtccacgcaagatccgatttataatattattactgtccgcccacgcagcttaagcttagcttagctttgcgttgcttaatttgcgttgcccgccggcttgttc

SEQ ID NO: 1616 - DNA, 13909 bp, Oryza sativa
  unsure (1)..(13909): unsure at all n locations
ccgtccgtcccgcaatgctgccgcctccttgtcccgccgccccgcgtcacccgctgctgccgtctccacgtcccgcgccaccgccgcctcctcgtccggttgtcccgcggcgctgcccaccgtcgtttacagtgagagagagaggagagagaggaagagtgagagagagaagtgagagagagagagtgtgagagaaagaagagatagtagggtatgacatgtgggtcccaaattttttttataaatagaatgctgactggactgccacgtgtatgctacgtagaccaaaaccaccacggattaggttgagggggtaattcatccggtattcatagttgggggtgaagaatgttcggttttgtggttcggggggggtaattcggacgaccacaatagttcggaggggggtaattcgtactttttcctttaaattatgtactaacttgaccaaatgaaccaatgtgtaatattcatattgtattgcatacacgttctagttattaactatttttaaattctagattttagttatttgtaaattatattctcctcgtccaatattctttatttctttctgttatttataaactttattcctatatgtagtctaaactcttctttcaatattttttaattttatattctgaatttcagttatttctaaattgtactactatgtgactctagatttctatcacaatattcattattttaattctgaatttctattattttaaattgtatttctgtatgtactctagactcatctttcaatattccttattttttttaatttcgaatttagttattgctaattgtattcctcctatatgggctctatatgggctctagactctttttccaatactccttattttttaatttcgaatttaattatttctaaattgtatttctatatggtctcaattctacttttaattttattattttttattccgaatttcaattagctctaaattcctatatgctctccggacttttcattcaaaatttcttattttgatattttttttatttctaaattgtatttctatatgctctttaaacttttcttacaatatttattattcttttaattccaaatttcagcaataaattatatttctatatgaattctaacctctatttctattttttttaattcctaattttagttattcctaaaatgtatatcagtatggactctagtttcctattcatatattccttattttttaaatttttcgatttttagctcattttaattgcaattttttaagaactcttttttttcttttttttctcattaatatgagaatttgttggtcgtgagggggcacatgaaggctctttttattattactttaataagttaattaagtcaatagattatgtaataagtggatgtagtttcgtaagtaaatgtcggatttaattccattatgttaaagagaaatactgaatacagcgaaggtatatattaagtagtcccttcgtcccagaattttaagaagttttagggttgaatacgattattaaaaaagtaggtaggagtgagtggtggagggttgtgattggatgagtagtgaaggcaggtgaaaaaagtgaatgatagagggttgtgattggttagtaagagaatgttggtggtgaagttgttatattttggaataaatcctaatagctaagagagccaacaattaatcaagtagtacactcacatgggtccttgcctcctgggcacatatttatcatatccccatcacaaaccaaataactcaaaaaggccccataaattagccccaaaatcccaacaaactatccgccgtacataaacaaagcaaaatctccatcacgcaataattcacttcaccaaatcaccagcgaagccgctgtatatatatagcacctgcaacgagccaggatcgatcaaccacacacacactgacactgtgacacaacacaacacggcggcgcaacaaagctagcttcaacgcccggtcccggcgatggggtccttctcggcggcggaggagacgacggcgacggcggcggcgcggccgcacgccgtgatggtcccgtacccggcgcagggccacgtcacgccgatgctgaagctggccgtgctgctccacgcgcgcgggttccacgtcaccttcgtcaacaacgagttcaaccaccgccgcctcctccgcgcccgcggcgccggcgcgctcgacggcgcccccgggttcaggttcgccgccatcgacgacgggctcccgccgtccgacgccgacgccacccaggacgtcccggcgttatgccactccgtccggaccacctgcctgcccaggttcaaggcgctcctcgccaaacttgacgaggaggccgacgccgatgccggcgccggcgccggcgacgcgcggcgcgtcacctgcgtcgtcgccgacagcaccatggccttcgccatcctcgccgcgcgcgagctcggcctccgctgcgccacgctctggaccgccagcgcgtgcggtttcatgggctactaccactacaaacacctcgaccgcggcctcttccccctcaaaagtacacatcatcctaattctctccctaaatagcaaaattatattattctctaactaaaataggataaaattattcatacataaatattatttctagctcatacaggtttttatttgtgtgtaataaatttatattaaaaataatataagcgattgaccaaggttcaaatcatatcgcccatgaatattacgcacacgaagatgggtttttaacaaaatctaagtaaaatcagatactatatattgttgatttccgtctctttaaagatatattaggggacacatttcatagagtgtgaatgtgatattacgtgtgtagggttcaaattctgaaacagaattttcagaattttgaaaattttggtcatttcgaacctctcagtatgatattattttggctgaaatttttttattttttttaatttggcagtattttgtttaaatttgactaaaatttgttcaaaattttggaaacttcggaccgaatatcggcaccatccgatagaaatgtacagaccgaaagattaaaccctggtggggtgtgtgcgtctcctgtgtaataaaaaaaaatagcaaattagtacatgtttttacaggcgaggctgacctcagcaatgggcacttggacacgaagatggattggatcccgggcatgccagccgacctgcgcctgcgcgacctcccgagcttcgtgcggagcactgaccgtgacgacatcatgttcaacttcttcatcgacgtgacggcgaccatgccactggcgtcggcggtgatcctcaacaccttcgacgagctcgacgcgccgctgatggtcgccatgtccgcgctgctcccgccgatctacaccgtcggcccgctccacctgacggcgcggaacaacctgccggcggacagccccgtcgccggcgtcgggtccaacctgtggaaggagcagggcgaggcgctccggtggctggacggccggccgccgcgctccgtcgtgtacgtcaacttcgggagcatcacggtgatgtcggccgagcacctgctggagttcgcgtgggggctcgccggcagcggctacgcgttcctgtggaacgtgcgccccgacctcgtgaagggggacgccgccgcgctgccgccggagttcgcggcggcgacggggaagaggagcatgctgacgacgtggtgcccgcaggcggaggtgctggagcacgagcggtgggggtgttcctcacccactccgggtggaactcgacgctggagagcatcgtcggcggcgtgccgatggtgtgctggccgttcttcgccgagcagcagaccaactgccggtacaagcgcacggagtgggggatcggggcggagatccccgacgacgtgcggcgcggcgaggtggaggcgctgatacgggaggccatggatggggagaaggggagggagatgcggcggcgcgtggccgagctcagggagagcgccgtcgcgtcggggcagcagggcgaccggtctatgcagaacctcgacaggctgatcgacgaggtgctcctggcttgagagtcatagaatacaaaggactgctacggtgctctgagctagactctaccataaatgctacttttttttttcaggttataagacgtttggtgaaagtcaaactgcttttaagtttagctaaattagataaatatagtaatatttacattattaaattagttttattaaattaataattaaatatatttttataataaatttattttgcgtcaaaatattaatatttttttctgtaaacttggtcaaacttaaagtagtttgactttgacgaaagtcaaaaatattttatatcctgaaacggatggagtacaacttgttttaaaactatgttttagtctgaaatcatctttgtatgatgcacgtgcacaatgacaaacatcattatataccatgttttgttattattgtgctgctggtacacttgcctccatgagttcaataagctcttgatgtgtagcgtattattgtgttaaaacgattatcgtgtaactacggttgtatctctataagaaaatattgcatatttgccgaaagtcttctggctaaaagatgcatataggtttgtacggcaacctctcatatttttgtatgtccagatcgacagaaaaaatattttttttctccagtgtaattggaccaaaaataatctgaaagattattttttgtggatatgcgtgcgaacaagaaagcttcaatcgctgtcgagtgtcgactcgatgcttttacaagtcgatctgtacgtatagtgttagtagtattaatggttaatattgtgaaaacaaaattggttagtcatatcgcaataatgcatccgacttgtctgtcacgttaaattatactccctctaatttttaattagatgactccgttaatttttaaacacatgtttaatcattcgtcttatttaaaaaattgaccgtcattagtcttatttaaaaatttgcaaatctataagatattaatcatgcttaaattactttgagtgaaaaaataactcacaacaaaataaattataattacttaaattttttgaataagatgaatggtcacacgtgtgacaaaaagtcaacgacatcgtctattaaaaaatgaatgtagtacgagacactcgtagttctcttaattaattaggctcattttgggtgtattttctttatatatctatttaactaagttccttccaattaaaacatcgttattctgatttatagaatccatattcgctccatcaagagatgaaatactcacgagggcccttatataggttgtaggtaaatcgtaaccggccgcgctataaaaatcaagctctattttcgctatggctctcgcctgcaaaaatctaatttagcacgcgaacatcttatggagccacatgtaaaaataagatcattttcttatgcgggtctcttaaacggttgcatgagattacaggcaggcctcttaaaagcccgcctaaaaatctcacttacctcctattttcccactcaatacttcaattttcttaactcatcttccttttccgctcttcttaggggtgaaaacggagcggattcggacggataatggtcataccatatcctatacctttttttgtaaagcggatgcggagcggttgtggatgacatgcagatacggatacggagtggattatttcggacgtcggattcggtgtggagttggcgcggagtcggttcggaaacggaataatattatcggatgttaagtttgtattcaatccatacaacaaaagggtagcaatacaatgagcagtaatatgatggcaaaacaacatctaaacatggtgtcaactctctaggaaaatacatccaaaacacatccataatataaacaaccaaaaacataatataagtcctcacttcactgcattgcttaaaaataacgggcaaatgccataacatcaccatcagggacccagcaaattaacatgttcaatagtccaagatcaagatgacagtacgctaaatctcatctctaaattaatcaaattagacattgctactgacttaaattacctaaagcaaagctcatctctaaatttctaaatcccaaatctcatctctaaatttctaaatcccaaaattgaaatttcaaattagagaaagaagtcaaagaacacaatacttaatatggagccggtgggaggcgacggtggctagcaacggggagtccgggaggtagaggcgctggccgctggagagtggcgacggtggatgggacaagcaagcgggaggatggggacgacagggactggatctggaggagaggcgacgtcgtaggaggcactggccgctggcgagtggcaatggtcgttggatgcgctagcgctggtcgctggagagacggcgtcgcaggcgcgctggccgccggaggagaggcggcgtcgtaggatggcacatggcaggcaggaggcactgcgacgggcagttgacggggtagtcgcggcgctgcggcggtggcgtcgcgcatgtgcagcgccgggacagggactggcctgtgcggcgcacgtgtgtgtcgggactgtggcgcaatggtggcgccgacgcgtatgagagtgggaggagagccagcgtctgacagtgggggattaggattatgtcaacactcaacataaataggctagatgtgctggcctatttaaatgggctcaattgtgtagctttttggcctgaaacatgcggattatccgccaactcgtcattcggataatccgattcaaaaatcggataatacgcatccaccggatatcgatgataccatatccgcatccgcatctgcatgataaaatccgcatctgacgggtatctgaaaactcttaccatatcctcactccagtcagattcggagcggatcggatcggataatatccgctccgttttcacccctagctctcctccttctgtctctcacctccccttctcctcatattaattatcacctcctctcctctctctaactagccagcaggcagcggttggctcgagtggcagcgacgggcgactaggcaacaacgggtggcagcaagcggcggctggctcaagtgggagaggcgggcggcaggcgcgccgtccccgccatagatgcgcaagggacggccctcccccacccagtgaaggtggcgaggggtgacggcggtagcggcagggccatcccccacacagattttgcggtggtagtggcagaccgcacctagctagtattttgatttttgggaattttacttttttttcaaatttaatttttacatgtggacgacataagcacccacacacgaaaattggattcgaaaatcggattttcgcagacactttcgagcaaatagacggcttaaccgcacgtaaaaatagtttttggccatttggaataatgctttgagttctcaaactaaaagcaaataaatggcgcagaacaaaggaattccaaaagtctcccatacacactggcatgaataattctatagctcaggtacatgtgcaacattattagaaagaaaaaaaggtacgtgtgcaaacaaaaactagcacaagccacaaagctattttctccttttttttttctcttgtttcttctcctcatgatgttttgctatgataaccctccatccttgcattaatgacccatattaacacacagatggaggaaatttacgaaattttgtgttttggggtatttttgggaccgacgtttttagaatttttaacttttaacatattttgactgagatttgaataagcttttaccaaattcaacagggaggcccatcatcctcacgcgctccattctgaagcgtgcgaagcccatccggagacctgtccacaacagacacacacgcaccccggtttgccttagtcgccgctgccgtcctaccctctctggacctatgcccccccctctccgccctccttcaaaattttcgccatgaatgatagagtaggagcctaatgcatgccggtgggtacccttacccattccccaaacccatacccacctaaaacgggtagggtatggacaaaagatcctttacccattagaaatagggtggatacgggtatgcccgtaaattaaaagggtatagggagggtgctacccactttccccgtgttacccgtccccaatcgacctcatctaagcgatgacggcggcggcagcttcgacggcggcttcggtgagcatccggcaacagtgactgcagcctcggtaatggagaagaaccctttacaaggtactgcttcgattgactcatctgctgcttcaatttgtgaaatctttcttctgctcaaagcctcaaaccctagaagtaatcttggttgcatatgtgtaaatcttgnnnnnnnnnnnnnnnnnnnngttcttggctttgttgcatccaacatcttgctgattctaatgggagatcccagccatgatcgtgatgcggccggaagttccagtaagtggagaggacctgctgtacctgtagatgttgctattttatactgacaaccattcatgtggtatgtctttaggcagtagaatgaattttatttcaaatgagctccattggtgatattcaaagcttcgatcgaaatctagaattgcaaaatttttcacatgaatcatctgacgagcggcatgatgatgggtaatgtttctacttcacacttctagttaatcgtctttatttatttttcgtgctaatagaactccaatcttttatagtgtgtttaatgtggattttgctttagaatttactaatacagtactttcgtcgattcaattccatagagttgagggaataattgagctaggtaaatatgttagttcagacaacagaaagttcagatcgaaagtttggaaggattttaaagtgtcagtagtggatggttatactaaggcaatatgtttacaatgttctgcccatctagtcactggcaacaagaatggaacaagtcatttgtgttatcacatacgtgtttgcctagagcttcaaaagtcaaagaaaaagaaaactacttcaaaggcagaacttcctgtttttgatcagcaaagaagtcgtgatgacttttgctcgaatggttgtttgccataattatccattttgtatgtctgagtattattacacaaggtgattcatttataatctgcaacctcaatttaagttaatgcatagaactgctgtgaaagatgatatcattaagttatataaggagggaaaaaggaagatatatgaaatattggataaaaatcagagcctgaatgagtgaaatgacaggctatatgagcatgacagtacattactgatgctcattggaaattgcacaaaaaaaattttgggcttgtgcatgtcaaaaccccacacactggtgttgtcatttctaaggcaatcatagctagatcgtatgaatggaatttggatagaaaactctttagctttgttcttgataattgctcaatcaatgatgtagtgattcgggaaatacttggtatcctcttacccaagcaagcattacatttaaaaggtgaattctttcaaatccgatgtgcaatgcatatattgaacttaatagtttaggatggattgaaagtaattgcccctattctggtaaatattcgagagacaattagttatatcaacaaatccacatcaagattggaaaagtttgaattgattacccaataagcgaatgctcccaagttatctttagaaactgatactccaaccagatggaattcaacttttcacatgcttgagagaaccattaaattccgtgaagcttttctgtgatcgaaagaatgtgacaagtttttcccatcagatgaggactgggtacatgttactaaactaacagattgtttgtgtgtcttttatgaagcaactctgagggcttctggctcaaaattttccacagcaagtctttacttcaatgatttttgtggaatatatatttttctgcaagaattgaagttgagtgatgataactttattgcttcaatggctgtgccaatggcagaaaaaattgagaaatattgggagacatgcaacaagttattatctattgcaaccattcttgatcctcgctacaaattgaagtctattgagtacttctatggattgctttatccttctgaaaaagatgtgaaatttgaacatatgaggagatgctttagtgaattatttgatgagtattcaaagcaagcaacaatgcaatcctcatcagttgttgacacttcaagaaatttccaggagtgcagttcacaatcacatgagtcctcgttgagcttattttctaccatagtaggattagaaaagtatatccaagatagcaactcaagccagcaaacaacatcagagctcaatgtctatcttgatgatcctccacatcctggaatcagtgatacttcttttgacatcttggcttggtggaagttgtatggttccaaatatccaattatttctcgaatggctcgtgatatcttaagtgttcctatgtcgacagtagcatctgaatcatgcttcagtttagctaatcaagcacttgatgagaagaggtgcagtctactgcctgaaacacttgaaggtgtgatttgtacacaggattagctgagggattatataccaggtacagatctccaataaaagagtaaaatattgtattgcaattttgatgaatttgctaatcactttttttttctggagcagatgagtttttggaacagatgatagcagaagatgtgtcatttactcaagaacaagcagttgtagatcaacttgaatgaagatgtgctgtgatgattgaggcacttggatcagttgccaattactagtgacctacctagcacattgtatcaactagtcgaatatttcaaactcagtacttttcacggtctagtttcatttttaactcacttaatcagctagtagcagaaagcatatgtactcctgttattaacagcttcgttgtaccttaaattgtggggtttcatatctaattttccttttaaatgatatggctattacccaactctctttatccacacatatcagttttatccattccccaatgggtatgggtaatttagatgacaatgaatatggggagggtaagaacgagtaaggtttgaagtgggtgagggtatgggtaagcatggggatccccaaaccctccccaacggcaggtgtttaaggtctttggatgactggaggttgaagaaagcgtgaaattatgtcaacgaacgcagttgggccaggctcacttagagcagatacaatagcagactattagccagctataaatatattttaataagataaaagatgatatagaaaagtagcgggctacaaatctgtagccagctgcagcatgaactccaagacgtaatgtgtgtatgacagatgagaccatacattaatattatagtaagcaactattgtatgagttggctattagattggctatagatgaattagagctagtagtgggctatactattaaacttgctcttagaaaaggaattcccttaaaaattaggctacaggcccaaatgccacactagcccccagcggcccagcccaagtggccaaatacctaattccccaatcccccagccccaaatcccctagcagaaggcagtgagctccccgtgcggcggcgccggcgaggcagcaggcagcaggcgaagcgcgcggcgccgcgagcgcgagcagctgcaggccagtggcggcggagtctgcaggccggcgccggcgacgccacggcagcacgtgaaggaccaggcgagcagcaggcagccccttagcccgacggctgcaaaatacaaggtatgcaatgttttgtctcatactctcatgtacagattttgcctcgtgaaggataatccgcgtcgcacgtgagaaaataatcaattgtcttgtgaatgaagttgtgatgtactgatatttctcattatctctctgtttccatatgaaacttcttttagggtgtgtttgaggagaaggggattgaggagattcaaaagatacgcaaaacgaggtgagccattagcacatgattaattgagtattaattattttaaactttaaaaatggattaatatgatttttaaagcaacttttctatagaaattttttacaaaaaacacaccgtttagtcaagcgtacgcgcggaaaacgaaataatctttctccctttctcctgcgctcgaacgcagccttagagtacaacgtaatattatgctattgtaatattgtttgagacgttatgtgtttatgccggtgttcccaggatgttgagcccaccccccccccccattttttattcctggatccgccactgttggatccagtatgttgagccgccactgttggatccgaggagactcccgtccgctgctgctggtgagctccccgatttggggacttcgcgaacccttgtttgttcgtttgtttggccatggcgatgttggatggctttaggttgactatgaatttctggagtttgcggttgccaagaggggaaaaaatggtttgtttcatcatttgggctgttttgtagatgagggaattggcagttctctgcctatttttcgctattgtacagtttttatagcctgtttgagtttctgaatctctggtcttgccatcgtcaagggggcaggtggcttgttgagtcagtgtatgtagtccatgcgggcaccaactgttcgatgaattgccccttaggcaggaaatggcagtgactgtagaatgcatgcgcttggtgaactgccagccttgcattgcttccctgagaaggctattcattcgttccccctgtatcctgaggatgtgctagcctttctggccaatggccacaagaagcaggtttagttcagcctttcaatccagaaacctcagggggcaacttttataatcttcacaacccaatatgttgatgtatagtctttacctttacatgcatatttgattttttttctagaaattttgtctcaatcaaacttgaaatttcttgctcctcagttttctaattttgcttgctccaatcaagtaagttttttccaacaagttttctgtgtttaaagttataatatgtacccgttatgaactatatagtagtgatagtaaatatagctatagtaaacattatttatggtttgagtatcttcagcaatccatgaattgcgtgagatatttaaacatctttctatggaactggtgcattcttgttcatagttctcgttgaaatagcaaactctgattatggatatatttgaccttttcatagttctccaaacaatgagatgaggtcatgtttaatttcctaattttgctcaggtctacaactctaaatatgactatacttgtaaaatcgccttgacgatctccacaatttatggagtttttgtggcattgtacattggtattttcttatggtcacattcatatttacttgtctccaatagttttatttataagagatgttgaggagcaaacactgcatatctttacacttcacatacgaatatactttgtgctttactgcctggattactgcatctacttttttggtaaattcaatttcttgcataaaatggggataaagtaactgagagcttcagtagactagtacatcacaacctaggtaaatgggagaattagctactatgattctttggtgaaacttcagtttagtaaaatagagtaaccagatatatggtctatcaaatggaaacctggagagggacctccatagtccgatcatggtaattcaccctcagataatatactgtggatatataaaagttgctttcgatgattt

SEQ ID NO: 1617 - DNA, 4720 bp, Oryza sativa
taaatgtactaaactgttggtattgttgtaaacatgtgacggaataagtattgtggtattacatctatgtcgtagacagctttttgggtttgcagcaataaagtacataaatatctgtttggtgctgtggtacaacaatgtaaatagtttattgcagtgacaatgttgcactgttgcatgcatttttgttaggatcatggttgtctgttgccttgttatgccattaacaaatctagaataagtgaagcagcttaaagttatgttctcgtgctcttaagagcaaacatttaagaggtataatagcattctgtgttcaaactatattttagaacctttgcccttgcttaaatagtttctgtacattaatataaacttgtgaaataattcactaactaattatggattgatttgtttcatgcagttcactgggttaatgtgagcttcttgataaaatatggcggataatggtaatgcaaagccaggtggtgggggatctggagcttatacaatcaacctagataacttcagtaagcggctgaaggtgttctatgaccattggaaagagcataattctgatctatggggttcttctaacgctattgcaattgctactccacctccgtctgaagatcttcgttatttgaagtcgtcagctctggacgtctggctacttggatatgaatttccagaaaccataattgtcttcatgcacaagcaaatacatttcttatgcagtcaaaagaaagcaaatctcattggcaccctcaagaaggcttcaaatgatgctgttggtgctgatattgtcttgcacgtgaaagctaagaatgacagtggtgttggcttaatggaggacatagtgcgtgctgtctgtgctcagtcaaaatcagatgacccaattgttggtcacatcgcaaaagaggcacctgagggtaagctccttgaagcttgggcagacaaattgtctagctcatctgtgcaacttacagatataacgaatggcttctctgagctttttgctatgaaggatacctcagagatcacatgtgaagaaggcctcctacctaacctcatctgtaatgaaaaattttgtggttccgaagctagagaaggtgattgatgaagagaggaaagtgacacactcttcattgatggatgagacagaaaaggctattcttgatcctcttaaggtcaaagtgaagttgaaggctgaaaatgttgacatatgctatcctcctgtatttcaaagtggagggaagtttgacctcaagccaggtgcctcaagcaatgatgattatctttactatgactctgcaagtgttatcatatgtgcaattggggccagatatggaaattattgctccaatatggccagaacatttctgatagatgctactcctgcacagagcaaggcgtatgaaactcttatgaaagctcatgaagctgctctagaagcattgaagccagggaatcggatgagtgcggtttatcaggctgcagttgacgttattgagaagaatgcccctgaactactccctaatctaacgaagtctgctggtacaggaattggtcttgaattccgagagtctggcttaaacttgaatcccaagaatgaccgtatcataaaagcaggaatggttttcaatgtctcccttggtttgcttaatcttcaagcagaaacaaagagtgagaagacaaaacaatactctcttttgttggctgatacatgtttagtgccattggagaacttaacagcatcatgctccaagcttcttaaggatgttgcttattcgtttaatgacgaggatgaagttcttcctgtcaaaaaggtggaggttaatgcaaaggaggcattgccaccaacaaaggccacacttaggtcagacaaccaggagatgtcaaaggaagagctccggagacaacaccaggctgaacttgctcgccaaaagaatgaagagactgctagaaggcttgctggggttggctctggttctggtgatgggcgtggtccctcaaggtcatcaaatgagcttgttgcatataagaatgttaatgatgttccatatgcaagagagttggtcatacaagtagatcagaagaatgaagctgtcctcttacctattcatggcagcatggttcctttccatgtttctactgttaagagtgtcacaagtcaccaagacaaccgcacttgcactatccgcatcttcttcaatgtgcctggcatgccattctcaaacgatagcaatctgaagtcgcaaggggctatctacttgaaggagatcacgttccgctcgaaagatccacgacatagcagtgaagttgttccgcaaatcaaaacgttgaggcggcaagttgcttcaagggagtcagagagagctgaaagagccacccttgttactcaggagaaactccagttggcaagcaacagaaacaagccagtgagactttctgatgtgtggataaggcctgcatttggtggacgtgggcggaagcttacaggaactcttgagtcccatgtcaatggttttagatattctacttcaagggctgatgagcgtgtggatatcatgtatgggaatgtaaagcatgccttcttccagccagcagaaaaagaaattattacactccttcatttccatttgcacaatcatattatggttggaaacaagaagacaaaggatgttcaattttatgttgaggtgatggatgttgttcagactcttggtgggaataggagatcagctcttgatcctgatgaaattgaagaagagcagcgtgagagggaccgaaagaatagaataaacatggatttccagaactttgtgaacaaggttaatgatcactggtcgcagccacaattcaaggggctggatcttgagtttgatgtccctcttagagagcttggattccatggtgttccatataaagcttcagctttcatcattccaacttcgacttgtttggttgaactaatagagacaccctctcccccccccccctctgcgaggatcctccgtcgagcatctctcggcgcacgagctgaagctggtgaccaccggcggcgcgccgttctgctgcgacggctgcatgcagcccggcgacgacggcgccggctaccggtgcggcggtgcgacgtctgccacttcgacctgcgcacgtgctgcgcgctcccgccggccaccctggagaacgacatgttcgaggtcagcgcgttcgcgtttctcgccgagccgcccgcggcgcccgccgccgcgggcggcaggatctgcgacgcctgcggcgacggcgtgcgcggcttcgtctaccactccgacgacccccgacctcgacctccacccatgctgcgcgttcctgcgcaggcgcgtcgtggtgcaggacggccgccacttcgagctccgcaagcgcgcgcagccgcgccggcctgtgcggcgagaggagcggccgccgccgcaacttctgggcgtaccggacctacgacgacgacggcgaacccgtgtacctgcacatcgcgtgcgtcaaggacgaacacccggcggtgcgcgccgccggtgtgccggcgagatcgtgctggtgagctcgtcgccggcgatggacggcgtgctgcagagcgtgccccggaggagcacgccgcggagcggcgggttcgagaggttttgcaagattgttaacgtcgtcgtgagcgtcatcatcgcggtcatattcgggagtcccatggcgatgataagcgcggttgcagggcccgatggtctcctccgtgggtagggagatagtgcgaaaataatcaaaatgatatccgttgtgaattagtgcaaaacacattcatattcaactcaaattgggacgatccgacgatgagaaatttgaaaaataaatagcaatggatatgtgacgcgatattctgcctaactactatgtgtgcacacatgtattagcgctgggttgcaaacgggactatagtgggtttcttcagcagtggctagcagtgtgtctatatttcaggtgcccgaaattttcaaaaaaaatcagtcattttttcatccatcctttggatgggaatccaacatggttctcatcactcattcttcattaatggaaggttgaacaatatattattctaaactacaaaagttgaagctgatattaaagaaacttatgattcataaaagtatacaaaatcacatgcaaaaatattactccctccttccctaaatgtttgacgccgttgacttttttaaacatgtttaaccgttcgtcttattcaaaaaaaacttttataaaatgtataaaactatatgtatacataaaaatatatttaacaataaatcaaatgatgggaaaagaattaataattaattaatttttttaataagacgaatggtcaaacatttttagaaaagtcaacggcggcaaacattttgggatggagggagtaaaagttagataaaattaaagtaaaaccgaatataagaacaaaattgcaatttaaaataaataaaatttcacattgcatactatgacatacgaatgtgtgtaattttgcgtgactgaaaattttaaaattttgatacgcactgctagaaaaaggattttcgcaggcggcccaaaaccaatttcgcaggcggggaggaggaccgtcgctacacatcgactgtgaaaatagaccattttcgcacgcgggcctgtggcccccctgcgaaaatcatctaaaaaataaaaaaaa

SEQ ID NO: 1618 - DNA, 5424 bp, Oryza sativa
  unsure (1)..(5424): unsure at all n locations
ccctcccgcgtctttcaaaggaagccgcgcccgaaattcccctccattccggggggttccagattcccagcgaggaaaaaagcaaccaaaaaaaaaaaaaaaaaaacggaggcgagcgccagcgctgcgcatcccagatggacggcggatcgggtgccagcgccacccgcctcgccgaatccgggccgtccattcctccgctcggtcgggcgccccgttaagcctgagccccacccaccccccaccccggaaccctcgccctcctcaccccgcgcaccccctccaccttgccgccgccgccgactcgccggggctcgccgccaccggtggtgggggggagctcgacctcctcgccccacgcgcgcatccggacgccgtcgttctgggcgcgggagagatccgtccgtcgccccccgctgggcttgcgccatcctctcgccgggtaagccctaggtttttttttttttttggtccgatcgattccgccgcgctcctagccgcgggtgaggcaggaatcggggtggttgcggggggctcgtcgtgcggtcgagggatttggttgttcctagtaggaggggttgtacttgttcatcccgtcgatccagtggaggcgcgtgggagatctcggttgggggtttccgtgggctccgtgggttgccgctcgcggtgcagcggcgggatgtggatggggatggggatggcgtggtgggccgtaggtgcgagcaaccctagacggattttttttttgtggccattttagggtttacgggaatggattttttttttaccgaacaagagatgtactctgaaaattgctgtcttttcgtagcgaggggcctataggatcattgaagccttagggacttagggtttgggctgcttgcagctgtatttctcatttgtaaacattagacttccgtgtctgctgtgggaggatgaaagaattgacttgggagctgagttctattaggttcactggttttgtggagtaatgtttggaaataatctgagggagtataaggctgctccatcgcagtgccacgtgtagcattcggttcgaatttttcatttgtgtaatgtttcttagcagttactttttattttggaagttggttctcccaaaaaacttgtgtcctatctggtttatttgaaggtatcttaggacaacaagacgattagatgcaaaagttgaaagtaggggcattaacataaaccttgttgggtgcagaatatggtaattttatacgtattaattgcgtacgtaccgtttccacaaaattgttcatgtagtaataaataactgccaaagaaagctgatgtgactccatgaatgaatgtatactacgctatatctgctgtattgattgctgtagcaatccattcgttttcagtattgtgctggtgcattgtttgcaaaagcaaatcatatttattaatttttcattattgagttgcagcttgcaaatgtgtatgtatgtacatattgtgagagaaagtaggcatgtctgaactctcaacatgattattgtcataagaaaaatgttatcgttgtttttctctctttttgggtaactgtttgtgtttatggttataagttctatattataaatttgttcaggctggaattaggctgaccaaatccttgttttgaaattcgaattatattgatatatatcttgtacggtcattgcattttttattgttttgctttataactatatataggctggcttcattacgtactccctccgtcccaaaaaaacttaacctaggcaaggatgtgacatctcctagcacaataaatctggacagtcctttgtccagattcgttgtactagaaaatgtcacatcccttcctaggtttagtttttttgggacggagggagtaaacttgtctatgttaaagtttggaatatccaaaggtcctcaacctagtatgtactattttcttgaccttaacatggaactatacatgacctttttttttcctattttactgaataagatgattgtttgtttgcggtttcctaaatgtacttaactgttggtattgttgtgaagatgtgacggaattagtattgtggtattacatctatgtcgtagacagctttttgggtttgcaggaatgaagtacataaatatctgtttggtgctgtggtacaacaatgtaaatagtttattgcagtgacaatgttgcactgttgcatgcatttttgttaggatcatggttgtctgttgccttgttatgccattaacaaatctagaataagtgaagcagcttaaagttatgttctcgtgctcttaagagcaaacatttaagaggtataatagcattctgtgttcaaactatattttagaacctttgcccttgcttaaatagttttatttataagagatgttgaggagcaaacactgcatatctttacacttcacatacgaatatactttgtgctttgctgcctggattactgcatctacttttttgttaaattcaatttcttgcataaaatggggataagttaactgagagcttcagtagactagtacatcacaacctaggtaattggaagaattagctactatgattctttgttgaaacttaggtttagtaaaatagagtaaccagataataggttctatcaaatggaaactggagaaggtacttccatagtcgtatcattgttaatttcaccctcagtataatattagtgttgaatatatgaaagtttgctttcgatgatttcaggtgatttgagacaatcaagatggctttttcatcagttttcaggagaggaaatgtcaaagaattgatctcaaatgtttcggtctacactagcgcagcaggtaatggctttggctttaggcagtctgagactcttgactgacttgagtctgtatttgtgctattttgaataaggtgcttggctgtttgaatgacaaaatatacctcattgcagagtcatctggaggattgagcttgatttttaagcgttgggccaccaaaaagacagctggatcaacaaaaaatggccgtgactctaaccctaagtatttgggtgttaaaaagtttggcggagaggtacaatcttgtgatctgtcatatgactttcatgtttttttattgtttatgacagcacaaagtactttctttaatcacgtaaaagtaatcagacttcggagatttgtgtgtcccttctgatcccgtacctgaactcctgaagcaacttgtcatttttgttattagaacaaaaaggtgaaaaagatctaaactgttcctgaacatcagcatttgcatcatttttcagaaagtggagccaggaaacatcatcatccgccaaagaggaacccgcttccatcctgggaactacgttggcatggggaaggaccatactctcttctgtctgaaagaaggacatgtgcgattcgagcgcaacaagctgactggcaggaaatgggttcatgttgatcctgttgctgggcatgtgctccaccctgtctacgccagtgattcgacccctgcagctgaaatggagccattgtaatggctttacatggaatgaagtaacatatgttgctgacagctttcgtccttgccttgagagtgacttctctaaagaaacttattgcgattaagaggcttctgggttgaatttgcttgcaataaggaacctaaccatcatgtttagaacccttttgtttttggttcttgctgtggcttaaagttgtttgttttaagtatcctttgtgatttgtggcatgaaggttgacaaacctacatgatttatgaacacacagaaattctaaaaatgttgcttgggccgggaaagtcaagatgcttatttttcttcgaaatacctatggaataacctatgtcacgggaatttgagagaactactttgtaggagggttaatcctttggcttcaagagtttcacatgattgtttttcatatatgatttaaaatattctgcaatacgtaggattttcattcgaattgattcagtttctgcaaaagtcatctagaattcgtttggttcaaatgaagtatttctttgttgcaatacatactcttcccgcccaatcacccaatgatccaaaggaatatatgtgtgagcacttcctttattgaagtatagtatcggttgttttaattccaactcttcacattttggaatctaccctggaaatggctattttgaaagttttactactattttattgtcatgttataacattacatagagttaatttatcggtcactccatcatctttttaataagtttttttgaaagctaatacttaattacctgtgcattactctatcgcttcattctgtatgtagtggaagtgttctctacccaaaatgatataagtacgtcttaaaacgccatagaaaaactggttatctttattacaacccaatctttttgcttttgcttatacttataagccaaaatttaaattttcaaccttaaatttggagttgattttggggtttttcatcaaagtttattttttattttttgcttttagatcactaaggccctgttcgtttcttatgtaaggagagggttaaattgtgaatactcgtggcacgcttttaaaactgctaaacgatgcgtttcgtgcgaaaactttctatatgaaagttgctctaaaatattagattaatctatttcttaagtttatataataattaaaactcaattaatcacatattattaccacatcgttttgcgtgaaacacttaatctttatcttcatcttcatcttcaggagattcaaacaccacctagaaacacatatataaaagttttgttcacaaattatttttcgtttgcaaatatgcaattttgcttaggctgtgtttagttcatcgcaaagtttagattttggttgaaattagagatgatgtgactgaaaagttatgtgtgtatgacaagttgatatgatggaaaatgactgaagtttggatccaaactttggatctaaacacagccttaatccccaaataagccaaacgatgggggccttagtttgttcaacgtgttaaaattaaaaaatatatttacacaactataaacataagcaaacacacacacaccacgttaaaattccgagagagagagaaccgatgcgaaaagagcgatcccctcccgcgtctttcaaacggagcccgcgccccggattcccctccattcccgggggtttccagattcccagcgagggaaaaagcaagcaaaaaaaaaaaaaaaaaaaaaacggaggcgagcgcgagcgctgcgcatcccaaatggacgggggatcgggtgccagcgccacccgcctcgccgaatccgggccgtccattcctccgctcggtcgggcgccccgttaagcctgagccccacccacccccacccccnaaccctcgccctccttaccc

SEQ ID NO: 1619 - DNA, 21612 bp, Oryza sativa
tactcattactgtggtcaacgcttacgtctgaagatagacaaccacccgagtattatacactctcattaaagcttttaatttgggcttttgtccacattgcgggctaaaagaaatcagcaactctacttttcaactttgtgcttgtaaaaataacaaactttgtgcttgcgttgtttttggttagctcaattctttttatatcaacttcatgtaacacctgaaattccatttacaaataacttatatatatagaaagttagagcaaccatgtgttcagtttgttactagctagtagctaatagcctatgcgttgcaacgaactttctaatagaagaaagggttgtcaatactagtaagtcgattacacatgtaacaccaaaacaatcaacacttctaggatttctatgatttttctattatacaaacattcattagtcacatgtccttgatataatgcaacgagttataattgtatatacaatttatataaaaagacatgactaattaaatgggcttactactaggtgggtggtggtggtagaaccatgaccaccactaccttcttttaatgtagtatagaatttggctcggatttaagttagtcatagatttttagtcctcatgtgaaaaaaaatgcttacaaaccatagactggaattttttgaaacaaaatatgttatttgtgtaaatatcggatagatatattagtggtttttctaacatgtgaaataaaatatatacaatacaatatataatcaacgacacacaaacaattataagttttatctaggatatttccactacatagcaccagccacacccacaacgctagcccttcgctctttttccttgaaggttaaccaaaagaaaaaaaaaacccacatcactccacgcggcaaaaaaaactcacacaaccgcaacacacaagcagcagaggatgcagtgcagtccgttcactgacacgtgggccccacagacccccgggtccacgtgccagtgagcagcactgaagcactggagatgatctccacggcaagcagcagcagcagcgcccgttacctcctccccactgcggccgttttcttacaaatccccccctataaataccccaattcaccaacgcccccttcttcttctccaactccctccccctccaagaagcgaacaagccaagaactcctccaactccgccctccaatggagctcctgagcggggcggcgctggcgtggcagcagtaccgcgccctcctccgcaagaacgccacgctcacctggcgccaccgccgctccgcctccctccagctcctctcctcgctcgtcttcatcttcctcatcttctgcatcgaccgcgccatccgctcccgcttctcctacaccaccgcctaccgcaacgtccccgacccggccgccctcgtcgccccgcccatcccgccctgcgaggacaagtacttcgtcagggagccctgctacgacttcctctggagcggcggcggcggcgccgggagcgcacgcgtcgccgggatcgtcgaggccatccggaggaacaaccccggcaggccgatccccgccgagaaggtgatttgtggatttagattcatcttttttttctgtacttgtctctttgtatctatgtggatttcggttgggaatagaagattcggttttctctctgttcttgtagattgggcgcgattggttgtgtgatttgggcatgcaggttctggttgattagtttgggttgcgagtaatttcgctcaagcacgtttggtgtgaggattttgggtttttggtggagaaagatttgctctttttttttgggcgtattttgtggtggcaaaacgctatgatacatactgaatttgggtatttttattgttagtggttagcctcttgaaagaggggaattcgaagcattttgagggtgtatattgtatcttaggcacgtctgcttcttcggtttctgcatttctgaattatatattcccctattcctgcaaatattcttttagtccttcgaactggttgagtttgaaaccttagcatgcgtgtttcacagccagggagagatgtacttgtgaattctgagcaaaaatttgatattgagaatttgaaaaggagagattgattctaattcaaactcttttttttttaaaaaaaataaaataaagcgaagttctaataatctttaattctttttggagcagacatgccgatttgacgtttaactgagatagtctgaatttgcaattttagtttgtcatttgttccgtgtggggatgtcagcggtaagtactcacctagatggtggaccttgcgaacttttcaaagaagtatgaaaacgatgtttattttgttgtcaacgtggattaggaagcatcggagttcactaggaacatctaacttcatttaagcttgtcgtaagcacacttgatgtcattttcgtggtatggtactagtgcgtggcttcttgatacattgcgtataaagccttgtcttgctggaaataaagatggtcgcattgtgcgttggaaatttttaccgggaatatactaattcttttttttttttgggagaactaccggttgattgatacaagtacacatttaagtagtgttggtcttttgtataagaacatgcatacttttcttatttcctaatgaatattcaaattatgatgatctgagagtaaacgctgaaattctgctgtctaaaacttacacaaaatttatagaacttcctgtttgcgtgaggatttgattacataatttatttgcgcgccttcatatatccattcattaccaatcgacataagcttggctttagtggtactggtaaactgcaaacgcagtatgcactagtagtttcttctatactgcttaaataagattcatgaccccagaattattgttacactgaacatgtcgtctgactgtttctgctaaatttctcaggtcttgggttttaatactccagatgaagttgatgcttggcttttccaaaatccaatgcgctgccctggcgccttacattttcaagttataaacgacactcagataaagtatggtattcagacgaactccactccggtagctcggagaggaacatatgaggatcctaccttcaagttccagataccacttcaaattgcagctgagagggaaatggcgaggctgctgattggaggtattgctacttccatgccttttttgttacttctgtgctttgtacttggtaccacttatgtcataccctttgacatcaattccggttgttcagtaattcatgaagccttttgactagattaatttgaactatttatggtatgctgcaaaaatagttgttagctgtatgtatgcttctgtttgatagttgtcttggcaaataacagtatatatttatactgatgaatgtgacagacccaaattttagctggactgtggggttcaaggagttcgctcacccagctacagaaaccttctctactattgcccaagctgggccaactttcttccttgctattgctatgttcggattcgtttttcaaatcagtgcgttggtgacagagaaagagcttaagcttcgtcaggttcgagctcccccatactctgcctgtgttgtaagatttacatgacaccactcaaagtttggttaataattgcaggctatgtctatcatggggctctacgagtcagcgtattggttgtcttggttaacctgggaggctttcgtcacattactttcagcacttcttactgtgctctttgggatgatgttccagtttgacttctttctgcacaataactttgggatcctattcctcctcttctttctcttccaactgaacatggtaattttgacatactaaccatcagtctcctatctccatttaaaatgttaaatttagataataaaaacatgcttgcatggttggtttttacacatttcctgattcctgttacaacttgcaaaagaaagaagtttttaacatattgtcctcattcatgatgcttgctgcagcttagttttgccttcatgatatccacatttgtaacaaaagcagcatcagctactactgttggatttgcaatattcattattggcttcttgacacaagtaagttttctgaattgtaatactatggatccagtacttcaatttctcagaacaagtgtgtgaattctttaattttcttgttgtgcagcttgttacaacctttgggttcccatattcaacttcctaccagaagtactaccggacaatatggtccttgtttccacctgatgtttttgcccaagccctcaatattctgggcaaggcaacggccactcctgaagacaaaggaatcagctggaatcagcggggacaatgccaatcttttgagacagattgcgtcattactattgtacgtacgaatcattgcttattggatattatgttcttaaaccttatgcaaatatcaatctgaatgttcacaacgatctcataggatgatatctacaaatggctcatctccacatttttcttgtggtttgtcctggcgatctactttgacaacataattccaaatgtcaatggtgttcgaaagtcagtgttctactttctgatgccttcatactggacaggaaaaggaggaggaaagttgcaaggtcaggactgtttgaagttcttggtagttctggacaatgttctagctatagtttcttgcattacttgctaatctgtatgctccattacagagggaggactctttagcttttttggttcgaaccgcccagctgatgatgcttctcctactgatgaggatgttattgctgaggaaaatctagtaaaacaacaagctgcaaacaatgaagtagatcctggtgttgcagttcaaatatgtggtttgcggaaaacatatccagggagttttagtatgggttgctgcagatgcaggacaactaaaccgtttcattctgtcaaagtaagtccatatgtcacttcttgttgtgtaaaacatggaagatttgcttattctgattactgattacaaaaaattctccagggtttatgggtgaaccttgagaaggaccagttattttgccttcttgggcccaatggagctggtaaaacaacaacaatcagttgcttgactggaatcacaccaattacaggcggcgatggttggtatctttcttaaaagcaaaagcttgtatagttgtattgttttgtaatatctaataagccattttgaacattggcagcgatgatttatgggcattctgttcgaagcactgctgggatgtcgaatattcggaggatgataggagtctgtccgcaggtaggtgctttaaacattgttatattactgatgcatgtgaattgatcaaaggaagataaacattcgtgatttatttctttgcagtttgacatcttgtgggatgcgctaacagctaaagagcacatggagctgtttgctagcattaagggactgcctccatcaacaatcaagtcggtatgtttctttagaactgattacacgtactcctccctaaagcacttaatttaattgtcttgcattgatcttcctctgattgttcaaccaatgcaggtagcagaacaatccttaatccaagtgaagctcagccaggcagctaatgttagagcaggtagctacagtgggggaatgaaacgccggctaagtgttgcaatagctctaattggtgatccaaaattggtctttcttgatgaaccggtaaagaccgccaaatttgctacaaacttccttccaaacatcccttatcatgtgctgatctaacaatgtatatcctacacagactactggcatggatccaataacaaggaggcatgtctgggacatcatagaggaagcaaagaaaggaagagctattgtcttgaccacccattccatggaggaagctgacattctgagtgacaggatcgcaatcatggctaaagggaaattgcggtgcattgggacttcaattaggctgaagtcgaaatttggaacaggatatattgctaatgtgaatttctctggaaatggtcacacacaaagccctaacatcaacggcaacactgaagtcccggttaaccctaacatagaatctgtcaaatggttcttcaaggaagtatgtggctcatcactaaattctatatccttcaaaattatcttttcatatagtagagctggaaatcatgtgaaatttattgacagcggcttgatgtggacccaaaagaggagagcaggacattcttaacgttcgtcatcccccatgagaaagaaccacttctgacggtactgcttcctcacccaaaactctggctgtcataacatcatgctttaatttcatgataggctaatatattttccattaagcagaggttctttggggaactccaagacagggaacgggaattcggtatctcagacattcaactcggcctcacgacgctcgaagaagtattcctgaacatcgcaaagcaggcagaactggagagctctactgctgaaggcaccctggttactctgaacctatcatcaggttcatctattcaggtttgttccttagtacccctaagaacaatgctgcaatattggacatgaaaaggataatctcactgctatgtagagaacttctgtacagcagcaacagtacagaaaactctgaaacttgctgctatgctgtaatttgattgtgtgatttcttcagaaaactctgaatatctctttgatatcacttccattttctatggcaatgcagataccaaagggggctcgttttgtcggaattcccggaaccgagtcggaggatcacccaagaggcgtgatggttgaagtttactgggatcaagatgacaatggatcactctgcatttctggtcactctgatgaaatccctgtcccagccaatgttcagctgggtcggcccccttcgctgtctcgtagggcctcagtgggccgtggaaaccctgttgggtacatcattgatccgaatgaggtcacagcagcaagatgagtgccaaagaaagaagaatattctgagagtggatgaatttagatttgtcttcatgtaaattatctctaggtgtaatgcaactatagatatgtttgtactagaacagtgtattttttctgttttgtggtaaaggaagtgcttgatgatagatacaacatgcttacatcttccatttggtggctgacaaagagcttgacgattacagatgcaagaatgacaggaatttttacagtgatttaatttgttgcattcaggacggtaggatgtctggggtccttgttttgtcgctcataatttattttttttgttcatgggtgaagtatataattatcaatcttattgttttagaaatataaataatgtgctcattagatgcattagtgcattgttcctgttgtttatacatatcataccatagggatcgtacggtttctggttcccacggccacgatatatatagcttctgccaaattgagtacacaaataacacttactaaaagtattctgaatttctatattgcttttactttgtttgtgagatataaaaataacaattttatattttttggaattatatatttttatttcttacaaacaaaatcaaatttgaacaggatttttttacttggttacaaaatatcatcatatctacatttgtgattttttttaaaaaaatttagacaactttttgattggtgtttgcacgagttttcacttaaattgagttttcatcacatatttaccccaaagaaattatatacgattaacatttgcgacacttaaccgaagaaacagctatataagctagcttaaagttttgcaatctgaaattactgatcagtgttcactgtttagtaccataaaaaactgatacgtcagctattatataatctgaaagtacatacatggatgatatatatgtgcacgttatatctgaggtaactgggcaatagctagttacaaattacaagttaacttgggtgagggattaaattgagatcccagattgcgtgagggcaattccacttctttacttcaagtttgttgattgcagttcatggaatcaaactggaaaatggtaattgctcattcaggaatcagggctcatgagtcatgacctgggctatctgaatgcatatccaccgacgaatcatttgatgctgcaggatccgagtcaccgtttccagggcaaaaaatgccatctgcaaagcatcctgtgtcaccgcattgctgtacatggtacagttgcaggttttgccggacagggctggatagcgctttcgaaaatatcatagagtccttggaagggtttgatggtgtgattgaacaagatggcggctgctgcgtgcttgtgttggggatgtgcattggagcttggagattctggaatgcgtgttgcgatctcggtgaagttaatgcattgtcacctccatactcaatctcgtgctacattcaagaaaaacccataaacatggctacatgggtaaggagtaaggacaggagctattaatgaaatgtgatgaaatatcatcgttcataatactacagcctagctgagaggttcagtgaacagatcatagatgtgaaagtgaactatatgtagtacaataagagtgtgattagtctacaaatagaaatctggacctggatgtgggatgctatgtcagatactgtgagcctcaagccaatttcatgctgtcgcaccatccactggtagagtttttcctgaataaaacaaaatggctgcacattattaccaagcataatctatcaatctaaacaagagcacgaaaaatgctaagcaccagtatatgcaattgggtttgtgcatcatagcaccaattattgtcctgttgtatggacacaatccctgaggattgatttaaacaactaaaatacttgtctatctataccatattaacacaaatgggggaccagatgactaaatcaattatgtatttggtactgtgccaccatcacttaagctttttgtaaggaacaacgcattcaagtatgccaaattcattacacaatatcactgtgtcctcccatgaattactgcagcctgttggtgaaccaaaaagtccatcagattttaaatctcaattggtgtttcagtaggcaatggtagtttcggtggtattgcctcttctaagtcattcaaaacttataggagaagattgaaccacaaccaaaatgaactaatgcacaataacagaacatgtagtacaggtggactagtttagcacaagttgatgaaggcaaacttgtaaaacttaaagagcactcccagcaagctgtcttacagcaccaaaacaattatagctaaaatctatcacaggggggataattttggctaatcttccaacctagaatttgcttattgcaatgctttaagatgagaaaaaaaaacatgccttttaagattagaaaagcatacctacacctaacagtactactttttaattgtgaacaccaaacaagcaaaaggaaacttgtcaaagatcctttagaaatagtgtagaaggaaacctgtcccatacgtttctctattatgttctgtacgccaatccctttttttatctctttattactattagcacaatctaacttctttcttttttttgaacgacaagagcacaatctaacttgtgtcttggaatacagaattgaaacatttccacctaagtttgactaactgatggtaaacaaattcacaacaaaccacgatttctgcaattaaacgagaataccaatgatgaaaacaaagatgcatttaggtttcagtcatcatgaagtagcgataaactgcaatttcagatggtgtgatgacgcccacacaaattaaaagtgtgaattaactgagcaaaatttgcatcaagaaacaattgttgtcataactcataagtggcaactaaaaccaaacatgaatagcagtgaacaccaaaataaaaaatctccgcacaatttcaccacagctgaagacagaatatagcaaatattgcagctttatatgcacagaacctagcaaaaaggtgaaaatcgagagttcaattctccacaaaatgtaagtagcgaaaacaaaaattctgaagaaagaagccccacgactcaaaatgttcagcgtcccacccgcaccgcaacaccaaaaatcttaagatccaagaactgaaagaaatcgaggaaaaggggccaaaaaaacaaataatctaatctctcgattgcaaaactgaccagaagttcacccgactggaaagggtgggacttggggagggggcgattttagctcggggcgtaccaaggcgtggcgctcaccggcgtggaaggagaggcgctggtgggcaccggcgagcgcgtagagctgcgagagcgagttggcggcgccgcggaaggcgccgtagagcgcccggtcggcctcctcctccgccgcccgcgccgcctccgccttccgcttcctccccgccatcccggaccgacgacgaccacccgagccctcgggattcgggattgacggcggcggcggggagagggaggaggatggaatcctctccgcggcgcgaggaggaggaggaggaagacgacgacggcgagggctacgagcctatcatgcgtgcgtcgctgccgcgtggggcccactctctcagaggagtagctgtagctgccattggggctatttggagtggagaggttgggtgtgctagcacgtgggagcggagagagacggtagttgcactgagcgctgggtcccttcgatgtgggcccacatggcagtggcgctaaggagttccccgctggcggtgatgtacggaaacggatagcttagagcatcccagcagtccacataaaattgatcctccctgttcctatttgggttttttttttctcgcacgaatttcgctcggttttttttttctcgcacgaatttcgctcttttgttttgcacgacttttttaacaaacagtgcaaaaaaaaaccgggcgctatttccaattgggggcgacgtaggaaagtttctgggcaaaaacaccttgattttttataatgggtgaaggtaaagatatagatattcctatttagattaccttcggaaaagattttctcttcgtatctcttcttacttcaacaaattatctatattatatccatcatatcgcaccctcctatattttaacaatatctttcaactaaacaaatatactctattctcacatctctcttcctctctcatctagctccttttaccaatttctcctcctctcttctacttgtactccgagaggatagggagaatgaggggaagggagaggccggcgcggctcaatgcaggtggcataggggcaacatgggcttggcggcgtagggccgatgcgggtagatgcggctcggccaagggcggtgatggggtcggctctagggcatgcgcttagggccaatgtgggtacatgtggcttggtcgtgggcggtgctcaggtcgacacgcgtgcggcgcacggttggaggtgccgcgaatggagcttgtctgtccgcgacgaccacatcccttttcctagaaaatccctcacgtctacatttggtacatcatttcctagtcccggccgccattgccaccctagtcgtcgtcaaaacaagtagaggagaggaggaaggcatcgatccggatgagggtgggagttctgtttagacgtcaacagttgtggggtagcgtgaggagagatgaatgctaaatttgatgtttctctctctaggatggaggatacgctaaatttggagggtgggatggtgtatctgctggatcacgtttttcttctcctaaccgctattttgccaatcgatgtctggatggcatatctgctaggacgatactcttaggacctgtgtaaagaaaggaacgatgtaaatttttagtgatattaattaaagtgtatatagatctttcagtggtataaagctagacttgtaaattttggatatcatggaaccaatttcccgaagagaaaataaatcaatttctggtatgcagaagaaatgttatcatagacaggcagcgtataggtcccgcctagcgttctccacaagcctatctccttatggaccccctatggagatccagaggggcattggagaaaatcgcttttgtgctagtggttgcacatttgtggacggttggctgggggtagacccttggttgagctacatacactgaatctataaatggaaaaagtatgaattacccccctaactatcacgttagtatgaataaccctcctcaacccaatccagagcggttttgtcctatttggcgaacgtgtggcaatttagtcagtatttttctttttaaaaaatggtgggggtccacctttcatatatactctctcacctctctcttgagagtgccattgggatcggcgacccagtggccaatgatgggcagtcggtggaggcgggtggagcagcgtagaggctagcaccttggggtggcagtgaagtccaggcggcggcctaggatggtgatacatggagcagcgtgacagcggtagagagtggtccatggcagcgctgtggagacgatccggtggcaggcagaccccaccatatttttaaaagagggggaaaaagagatgcgagagagtatgacaggcaggccccaccatatttttaaaagaaaaatatcaccaatagttgagatttagttcagccacgtcattaaaagttgtaagcagctagattagatcatgatcatataattagccgttcgatcatcctgtttgcatgtccttcccttacgtatgatccagtaagtatagaagcaataatttcacaaagaacattaccctggcaaaagagaaaaaagaaggctagggtgtgttcatatttagaagaaatatggatggggaaagactgcaggtctagaataatacaaggcaaactatgatgccattgaaatccaagagaattgtaaagacaagttgtcatggtgcttgataaaagatggaaaaaaattatgtgaaatccttttatgaggctttcaaattccaatgacaaatttctatcacaaaaaactttggacattcaagattccgttgaaattgaggttttcctttggttcatacataagatagtataataaccaaagacaatctaaaggcctgatagttttcccagtcaaaaaaaaaaaaaccaaagacaatctaattatagaggagaatgggcaaaaatggataaaaggaatgcctgtttggagaagcttccacttctgcagcttcttccataatcagaaacttcctcaaatagtatagcttttggttcagattataagaagctgtagttatagaatctagaaagtgaactaagctgggaaactcagcttttctagattctcataaactagctataacatctagctgtttctcagaatcttaactcccccaaacaggcctagaaaatgtctgtttcttgacaaggaggaaataatacaacatcttttcattcaatgctcaatgacaaagattaatcagcaatgtagtgatctgctcttttaatcgttaactaattccgaacatgtaatacttcttcgggccgtactttctgaatgactttaattatgaaatgaaacaaatatagtgatgatagtgggaccgtgggagtggctatagttattttgcctatctggaaattcagggaaaatttatcctaaaagtcccactgaattaatattgtttgcttgcactagattaaaacttgggctatgttgtagacatcggaggaaaaggccaagaagactactatatgggagcccagtttctaagctgagttcttttgttgtccccaactcatctctacacgtgcacacttttcatactataattgtacgttttcttttgcaaaaatagatatatgaaagttgcttttaaaaaaccctatgaatccatttttcaaaaaaaagctaatacttaattaatcatgtactaataagttgcgccgttttatgttcacaaggaatgagttctcaacaccaagcaacaaactgttgtgttctttagccaaagttctcgactcacttttctcgtttctcatgcgcatgttttccaaattgctaaacgatgtgtttttaaaaaggtttttatgggaaagttactataaaaaattatattaatttatttttaagctattacgtctttaatcatgtattgatccatcactccgttttacatgtggagtggaggggttcctaacccctccaaaagaaaacagggttgagttataagtgaaatctccaacccgaggttaggatggaagaatggcacaagaagactagagtgaaaggaggatgatgaacaaattaagagctggaagttctctaggaaagtccgtgtgcaaacctttttttttatgtgctgttcaatgcttttgtccctgtttttttagtactggacctactggtgatggtggtatgacatgctaaacctcttgccaagtccctgatatgcttcatatgtggtcaagttgagtgtaaggtcgttctgtatacgaagaactatcttatctcattcccgacaatggaaatgggggctctcaagtcgttgataagaaaaaagagtagtagtgattgttgatttgtggcgtagatctccaattaatcgtcttcttccttaccattacagaagattatgttatacatatataatttgataatgacaaattctttccctgcatacttaatgtttgatgagatgcaatcagttctctttcttctctcttccactgaccatctataaaaatcaatttgatagtatcatgtgaatgcatacagagtacggttctgatgtccatccgaacccttctatctaccaattcattgggtcgcaaatgcaattgatacatctgccagccaaaaccttcatggttgctgggtgaaatcacttctatatatgtggccctctaagctctgcactggtcttcacatttctgatatcaaagatcaaactgatctggctctagttccttgatcatctcatacttggatatagccacaaaagaatgccactctgttgtgccaaatgtatttgtccattactattgttctttagtttcttatgttcttcctaggtcaaacttctctcatgtatgggttgcatttagtacttcattccttgggaatgggaagaaccaggaaagccagattttgatgtaaaaaacttgaaagtggtactaccgaagtgccacagtcaagccaggttgtcaaaggtactcctgaggtgtacgctgcagttgcaaatagaatgcctgttagctggtaatttgctatgatcaggattttatctttttattgagtgatcatacagaagatgatggactgccgtcttctctctctactagactcccaggtcatgattattgcgacttgtttccccatgactgtgaaatatatattaatcgcccatgcacccaactaagagtttatgaattttaaatcacaaagtacatgggatgggttagcatgaaagtctttctgtattgtttgctcgtagcctggggaacttgaaaaattcccaccatgagctgctgagtcatactcttgccctgttaaatacaatagtttttctgcaccatgcctgatcacatattcacatgcacattaatgttcgttgatgtgctcattcaccacaaaattgtaattggcaaccagcacatgaaccactgggttttgatttgtgtactgtcagaagctcaaaattgtactacatgaacccctgagtataggccatgccacacttctatggtgcggtggagctaataaatttattttaatatatatcactactaaaaaatgatttttcacagcgtcacccaatcattttcgctggcggctatttgtgaaaacctccagcaaaaatataacgatagtggggggcttcgaaccgccagcgaaaactaatcttcgctggcggccaagttaagcgggccgccagcgaagatgttgcggttttcgtttgcggcgcacctaacagaccgccagcgaagatgaagccattatcactggcggattggtgacgtgggccgtcagtgaagatgaagccattttcgctatcggacctcctaaaaccctaccagaaaaatatattttttgtggcggacctcctaagaccctgccagcgaaaatctatttttgctggtggtaggaatagtgttttcccgtattaaaagcctacctacccacataaatccatgcccgcagaaacccccacccatagaaatccgcgccgctccacctttctcactctctccctccgtgccgtcctccacctctgttcctccctccctccacgctgctccggcactctctccatctgcgccgccgtttgcctctcctccctctccgagccgcgccgcgcacaccaccgtcgcgtactgccacgacccttcctctccctctccttcagttctcggtgagtcggcgatggtgatggcgacgggaggtgggcggcagcggatctgacggcggggtcacagggttgcgtggatccagcggccccaggccccacgatggcgacgtggtcacgggtgggagactgggagagcttcagcgcggggcatagggcgtggatcgacgacagcgtgcccctccctcctggatctggtgtcggcgggtctgggcggtggatccgatggggccctcagcaacaaagcaacggggtcgcaggccaccgctagaagatctccggaggtcattgggtccggccgtgggagcgccgtggtgactctgccctcactcccctcctctcagatccggcgacgacgacccagccttcccctgccctccctctctcagatctgatgccgacgaaactgcatttccgttccctctcggcgacgagttgttgctcatgttgttgttcatcatgctatattgtgacatgttgttcttggattgtgacattgtatttgtcctcatgttgttcttggatttgtattgtgacaagttgttcaacaacgacagattggaacacattaggattgtaattttgacatgtttttggatttgcattgcaatgtggatttggaatgcaggactgctgcatctaggtattttcaaattttcattcaaaaatttctttactggcggttggagagcaggtgcggtgcatattttcaatttttttaaaaccaaaaaacaagcttcgcagacggctggcttaacacaaacgttagagaaaatagatttttcctggcggctcgtgtaaatcaaccgccagtgataattgattatcgctggcggctcgcgtaacataaccgctagcgaaaatcgattattgctagcatttgaagtcccgccaacgaagacctttgattttctctggcctttgattttaggcagctaacctatccgccagagaaatgattttagccgccaggaaaaaccattatttagtagagtattatatagttgacttatttaatatgtttgaaatattcatcttttcatgaaatctttatgtaaatagaaaaatatactgggcatgcttaaagtacttttgatgatatatagatctaatggtgttctttttactttacttattttgaataaatattgttagaccaagtttgagaaaaataataattgtgcatcatatgttaataacagaatagtagaaatacttcagagtccacacagaacccactaagacaggccaccaacgttgtttgataccggcggtacatcatgtctaccctcttaattaattaattgccatccacatgtgagctcaggcagctgagcagggtggccatgtattgggtctacctatggttctctgttgcttatatatgtcagtccttacctttgcctctcttacctttgccttttaattactttctatggcctgtttctccattattcacataccttctttgctacacacgtagcaaatatgagcttgctttaactgatgtacctagctagtgctggccatggaagcattgtgctatttgcttcagatcggaatgggtgtcatcagggagaagacaagcacattgttcttcatcatgatcatttccatatgttggctgtatactggatagggaataccttgatcccaaatacaatgtttcagaatatgtgtagtcggacttttctcattttttgaacatgtcattggtatggatgtcctagctagagagccaataaaaaattaatggaagtagcattttatttgaactcatagctatacataaagctattatttatttcttagaaaatctagtttaagttaatacccactgaatagcaatgtctactaccataaaccaataacttattgcaatgggggtacttgtcactttgctggcccttctctgatatttatatagcacaatttattcgtctttgtctttgtcatcatgcatatatagagatagtttacacctgcagggcaaaggaccagaattaagcaccagaaatagaggtctcacacactttcctcctctcgctaataagaatatatacatagctactctgtttacacggccctgtatctacgaattcctttacaagagaatgggtagggtgtcgtggaaagaacatacaacacttgcaccttttgtgttttgcaaggtttcactcaaggagagagccgcgtaagcgatgctcgaagggcatggaaatcgtgctagccatgtttgcgggatagaacctgtaaattttcattgtggcatgggactgtgacgctatgcacaaagatccccaaactaacccaagcttcctatccattttcatcgtcattctgctgctcaatcaacgcgcttatgatggattatgacgatgacaaacccatccatcttaacgtctagcgaacaaaattgagacatcaaatagacgaagggatggagtattttctctccggaattaatgagatgaaggatttgatggacttctataggaatgtatatcacatgtccatgataagcaccagacatcttattaatgtcctattttgtcccttcgtctcatggtaaaaacaacagcaagtaatcaaaaccaagtaatcagatgatgcatataggtaagaatatgtcatgacattagcaacaaccatatcagctaagaaaattcagcatgatggcaacaaatatagccgtcaacattgaaaaaaatatcataactaaactactactctgtcccaaaaaaacgaattgtgtctaggttactaggtaggattggtcttttcttttttggacggatggggtacaatagtacatagtaacaatgtaacacacaaacttggatctaacaacacaaaatcaaatagcaaaccgacaacaaatacttaacaaatataatcagtgctaatgagagaccctatccagataccttaactatagtactagtccatcaagcaagtagaaaatatattcctatcacctaaaataaaattttgttttaaactactcatccaatctacgatctgattacaccgttatgttcgtaagaattaaatctttataacaagatctcacacgattatattttgataaaaaaatacatattacttttataatatatctaagttatttttagatttcactaaattacttcttagacatataaaagtaaattaaataaagcctaaaagtaatttacatatattaacttaaaaaacgaaagtaacttttaaaagtaaatccgttatggatgtaaaaacacgagtctatctaaaaattaaatttaatcagcataaattatggaattgactaaaaatgataataaaataaataactcacaacattatgaatgtacgagaagtaatttaatctaattaaaaagtaatctatatatagagtcaatatcacaaaacaccggattttcaggcgcatctatcttaaaaccacaggtttagcaatttttatcataaaaccacacctcttggggcatatgtatcagagaacccaaatgccacctgtttcatcccctttcacgtttccgtttctcctgttcactgtttttgttgactagtcccgcaggaacagcttatctgaaatgctaatatgatcaacaatacaattactctcctatatgagtacagatttatgttaggaaccgttcactcagttaacatttggttcatcatgctgtcaagcataacccaatgcaagttctcgcaaaacttacatactcatgtcattctcaacacttttgtgctattaattcagctatcttcatcaaatcaaaacatttacagcatatgaaccaactcctgaacttctatgcatctactccttcccaagcagttctcctttgaggactttgtcctatcaacacataccattcttccaagcagttcatcctcaaggtcctctcttctcatgtgttcttgctgttgtgggtacggaagaggtggtgctatgatgggaaatggcgaacgggagggatgaaaacaacgaagggaaggaaaggaacgggatatgggtgatgtgataccatatgccctaaagggtgtggttttgtgataaaagttgctaaacatgtggtttttgagatagatgtgccctaaagcctagtgttttgtgatatttactcttatatatatatatatatgataaaagtaacttatatatataataaaagtaatttacaatatagatatttcttttatcagaatatagtcatgtaatatcttgctgtaaagattatagatcggataagtaatttaaaagatgtcattgtgccatgtataaatggatggtgaccatgtacatacccatccagctaacaaattgatggtttattttttctctggaacgatcaatctttgacagccgtacgtgcatgtagagtacggtaaaaacaatggcaagtaatcaaaacttgtaaccacagatcgatgatgcatataggtaagagtatatatgtcaggacatcagcaactatcctgcagtgactgtgagctaagaaaattcagcagctacgcaaatagtaaattcaaatgtttagtttcggtataaaatctctgcctagcagcacgcaagcaaatatgattctcaacattgaaagaaaaaaaaatatcagggctaaacaactcagaagcacaccaattaaaactagacttagcgactctaattaaattagagcaaaatgtaggacaccgtagttttgtgacatttgccgtagaactctctaaaaatatgtcgtaaagctttgccatacaacactctggttttgtgacaatttgctaaaaaaaattatagccattattattttcacattttggttacatgaaaaattagaaaggacacttctgctcctgtgccaaattgttaggcagggttctgtacttcgactaaaatttccaaaatttcaactcttttgggcctctggtgtgatataattcgtcctcgatttttttctggtttcaaataatgtttcaactcaatcaatgtctattgccattttagtttttttccaaatgttctaaaattttccgttaggaaaagtttagatatttgcaaatttgtttatatccagagaaaatttattcaagtttcaaattttccagttcacaatttaaaaaaatttcattctattggtccattggaaca

SEQ ID NO: 1620 - DNA, 953 bp, Oryza sativa
aagtgatttgtcatgtcctcactcccaagtcctttaatcttgttgacaagaatcatcatcctatcatacatctattgtgttgtctccttgtcatccatcacaaatcttccaagccttccttccaataattcaatcttggcctcacgaacggcgggtgatccctcatgagccaattgcaaagtatcccatatctccttggcctcctctagttcatcaaccttgttgaactcctccggactcaaggcggagagaattgcattggaagcttgagtattgcgatggatgagttgttcttgctccgaagtgagcttcatgtcatcatggggtatatcaataccggtacaaacaactttccaaatacttggatgcaaagagattagatgcaacttcatcttgtgcttccaagcggcataatatgtcccatcaaattgaggagcacgcccggaaggcacggagacaaagttgtgagagggaatagtaagtttgatgtaatcaaaaggtatagtagctcccttgggtggtggagttcccttgctgcttgcttcatcttcttttccattttcctcgttctttccccctaagtccgacatcgtggatcactcaaagcggtgaagcttgaatcaagagcacctcgctcttataccaattgaacgtgcagagatgtagcctagaggggggggatgaataggctttcctgaaattttctcaacaaaagcaacggttaaattgacagggcccggaacctcctggtgatgaacaccggaacttcctagcagtgatgagcagcccggaacttccggagttcttcagacaggaacttccgggcaacagagaaaaacgaaatatgagaagtataacaggtcctagctagtgaaaatcaggcacagggttgcacaagatgaaaatcacaagataccagtagattcaaacacagatcaggcacacgagagaca

SEQ ID NO: 1621 - DNA, 977 bp, Oryza sativa
ctctttcttaagagcttgcatagcatcaatattagtagcataagagttcaaatcaatattgtaacacctagcacaaccattgctagtagaagggttagaagaattagaaaccacatttggttgagaggtgctattccaaagagtgtcaaattgaacttcaagatctttatgacttttgtctaaattagcaaatttttcttgaagagtttcattgacattcctaaggctagctaaagaaccattagccaaattaagctcattagcaagttgttcatttttagcacattctttagctaagctctcctctaaggcaaggtttcttttcttctcaagaataagcaattctttttgcctttcgagtgattgttctttactatccaaagctctcattaacttagccaaatgttgcatatcgggtttgctaaagctcttaagcacatcatctaattcattatcactttcctcatcactagaatcaacatcaagagaagtttgagagggcttctgagtcatcaccttgcggccttgggccataaagcaagagtagtggtaggagtcgtcgtcgtcatcactcaagttgttgaagagatgctccttgcttgaagaggatgacttgaaggcgacggtagcaacaccaccttctccttcaaccttgtcttttgacttgggcttgggcttgacctcgggatcttcttcatctccggagtaccacacttccgccatgtgtgcctccaccacatgagcacgctccggcttcttcttgcctcccttagcgttagcttcatttgacttgggacaatcggcaatgaagtggccatattcgccacaattgaagcacgctctctttgatgcttatttcccttgtcatcatccttcctccctttgccatagccactcttgtgaaaaaagtgcttgaatctcttgacaataaaagccatttcttcatcttcactttcttcacaacttgactcttcttc

SEQ ID NO: 1622 - DNA, 799 bp, Oryza sativa
gaaatttctggttcgttacgcccggcgttttttgacttagtttaaattcgctcgtgaccgttgggctccaaatggcgtgctcgactacggcctgtctcgcgggtcctcgcactaggaccgacaacagtctcgacacccgaagtcgcgaatggttacacgagttcattttaagcagaagtcgggggctactgtcagggctacgggttaggcataccctttaccctttaatatacgttacatatcggtatggtatatccacgcgcatacggatacttcttgcgtactctaaggaaatccttcacagaatctatggatgggaagaatcctactcggacaagattgggtcgttaatgtatcgtacagggtctgatatctccgagttctacttggagacctccaggtctgcaatataaaagggaccccccggggaggacctaaggcatcgaatctcagagccaacacaacccacacagcctatgaagccagagcctgcaaggagccaagccatcgagatctagttgaaccaactcgactacgatctcgccggatccgacaagttccattgttccctttgtaacctgtgttttccaccatataatcccacatcaactggattaggactattacctatcaaggggcctgaaccagtataattctcgtcttttgtttgcttgatgtcgtactacgtagatccttgtaccaacgtaccccaataccctctatatccggtctacgggtatcacccgtcgacaacactagtaattcttttaccaatatgggtaccgagctcgaattcgcc

SEQ ID NO: 1623 - DNA, 792 bp, Oryza sativa
tgccccgtcgttggttaatgaaggccagatcccgttcatcaagatgaaaatagcgcgccagttgcacgtcattaggttctgcagcataacaaccgtaattctgtttttggtcagaggttagaaagtcgacaggcatatcaggctccctacctgacagttattcattaacaattttgcaaccgtccgaaatattataaattatcgcacacataaaaacagtgctgttaatgtgtctattaaatcgattttttgttataacagacactgcttgtccgatatttgatttaggatacatttttatgcgactttttggttacgcacgggtatcaaccagccagcaatctctcgatattcaaattgaattgaagatcaccaattgattcttctgggttattttcatctaaatactcctttgcgacaagcctacactttcttaaaatgtcaccttgtgcagaattccattttttcaaatgttcattcaacaatgtttctgatgatatttgagatgacaatttgtaatgagatgatatatatgatgctatctccattagcatagcgtatcgccataatagtcttgatgctgcccttgctaaattaaatgatcctgtaaatggtttcaacattgatctggaaccaaatatttgagaatcgtctggtgagaaactcaggattaatatttttttgtctttcttccaatgctcatttagctgaataaataaagcacttttacctgtccctcgtctaccaacaacaatggtcctgtcatcagtttcaattagagtcctaaagtca

SEQ ID NO: 1624 - DNA, 537 bp, Oryza sativa
atgattaatttggaaaggatgaagtagcaaaaactacacgcatttaattcttccaaagacaccccacaaaaaaaattcccctaaaaaaaattcttcttgtcgaaacatgaattcggcaataataaaagggggtagcgcacgagacctaaaagtggatggatgcggagacaaaggatttagacaggttcaggccctctcaatgagaggtaataccctactcctgtttggggatttgaatccgccgggtgtagtatagatctgacgatcaggttgtctcatgccccctagagggcttcctgcccaccttatataggatggggggcaggattacaagatagaaaccttaaccaacacggtatcggattcctaaatctactttacaatattatcaaaccaggactttaggccgttccataatatacaaggaaacgtaatacccaagtcatgatctgttacatattccatacatatatgttatcccctattactagtcggataaccatgccgtgtggatatggggtacccataatcttcaca

SEQ ID NO: 1625 - DNA, 612 bp, Oryza sativa
ctgcgcatgcagttgcgacggcctcccgagctcctgcatggcgaggtccagcgacagctcggcgccggacgccttctgtttccgaaggaagttcccgatgagacgcgtgggcggatcctcgccgccgtctaccgcacccgcagcgtgtgccggctgcggcgatagcgaaggggacgacgcctgcgacgacgaaggccgcggcggcgcccggttcttgaagctgaacgcctcgcaggcgcgccggccaccgccaccgccaccgccaccgcctctgcctccacccccatcgctgcccccgtccccgccgccatcattcttccaaaactcaacgctcccgtcccgcctcaccttgggcggggatcgcggcgagttggtccagctggaccacgtcctgctcgccccccgcggcgtgctcgccgtggagtcggtgttcgggctcacattccccgccccaccgccatcctggccggggaacgcgaacggctcgcggcaaggcccctccccgtcgatcctcacgaccacctccccttcctcgccgccgtcacgatcggccgccagtccggaccgctcatcgaacacccccgatcccacccgcggcgaggacttgcctga

SEQ ID NO: 1626 - DNA, 5703 bp, Oryza sativa
cccttttcgccggctggggagctttgcccctgcgcacacttgtcacgctcacgcactgaacaagcgaagcagccacacccacccacgcacgcacaaacagacgcagacagacacacacggtcatcacacacgcgcgcagctacaaaaacgcaccaaccgcaaccggcgagcgcgcgacgcgagtcgagagacgggagagcagtgcagtgcagtgcagtgccgcctcgtcttccttccctccctcctcatactctctctcctcccggtcttctcctcccccgcccaaagcggagcgcggcggttatatatatatatatatatacagcacttcctcctccttcctcgccgcacgtcgccctccgacttcgcctcgtcagccgtcgtcaccgcccccacccggtgagctccatcgccaatctcatcctctctctctctctctctgcttccagttccttcattctgtgtgcctaattgggtggccggatccatgcggaattccgagctcactcggtgtgctgctgttcttgcatgtatcggtgtttggggattgatctgggtgcgggagctgtaggggagtgaattgcgtttttcggcagtttcttttcttctttttgggggagtccttactggtaggattgattagctcgtgttatttcggtgaaaatgttttttttccctttttcaaggatattcagaattagtccgttcttgttcctgatgaacatacggccgttttagttacaatgctgttgatcccaattggaacggggagattagtcaaatctatctggcctcgcttggattagaggtgtagatttcataatcagttttggcctggtctcttttattgctctgaatttttttcaggttcagaccaacaaaaaaaaaaggcattgcattatggttgcagtgttgtgtactgcctctttgacttgttttggattgatgcatttctttatatcagatgcaaattaacggtcgagttagacaatttttttatagtaaggagttcttggagattcttctccttccagggccatgatactaatacagtagtagtatcttccatatgactgcaatttgtcagaccagattacccggagaaagaaaaaaaaacaaagatgtagttctgtctgagtagaacaacttgctcaacactctcttaaacttgatcacctgtctgaccatgaatgaggccatgcataatgatctatacttaggagtaccacatggataaattatttattgcttctagcaatcattttcttttttaaaaaaacgttgttctatggatctcaaattcaattgtagtcaaccatgatccatccatttttaggcatcttgaaatgaccttcttctttgtgttcttcctctagtcactgaaaggagtttttttttaatatatatatatatatatatatatatatatatatatataattttttcgttcttgttttgttcagtggattgcaccggagatcggaatgggcggcttcgcctaccccttcacgccgtcgccggcgtggtcgcgggacgccgtgttcgctggctcgccgtgggccgcaggcggcgtctcctccctcgccgacgctttggtgagctacggtgccgtcgacgacgaggaggccgcgttcctcggcaagaccgccgcgtcgtctcccagtacggcgaggctgcacgagcagcagcagctgctgctggaggctgagctgctgcgccacggcgacggcctcggcttcgccgcgatggacgacgacggcggcgccgcgatgctcggcgcgctggagccgtgcgccatgccgctcaccgacagcggcggccccccggtcatctgcagcagcagctccaacgacagcagcgggagcgagcactccgccgccatgcctgcaggaggcggcttcctcgtcggagagcagcagcagcacgtgccgccggcggcctacgccgcgggaggtgtactcccgtccatggccgcgggagaagaaacgccgcagagcttcggctttggcagcctcttcaatggcgatctcctgcaggaggcgaccgtgagcaagtatcatcatcatcagcagcagcagcagctgggcgttgtgccttcgtcgcagccgcatcatctgaatgtgagtaacaagaaccctgaattgaatctgacatttacatgtaaaagcatcattcatcgccagtggtaacattttagggcttgtttagttggcaaaaatttttgcccatgcatatcacatcggatatacggatacacatttgaagtattaaacgtagtctaataacgaaacaaattacaaattccgcgaggaaacttttcccgtaagacgaatttattaagcctaattaatccgtcattagcaaatgtttactgtagcaccacattgtcaaatcatggtgcaattaggcttaaaagattagtctagcaatttctgtaattggttttgtttttttagtctacatttaatacttcatgtatgtgtccaaacattcgatgtgacagcgtgaaaaattttgtttgagaactaaacatgcccttaatgtcttggaattgcaggatgacatcgatttcaacactggaaaattgatgtcttttgcttctggacagcagcacgttacccccagcattgacagcctgcagatcgaccagaaggtgaggatgagctcaataaaatgttttgtcttttttgttttatgcgacatgcttgacctcaattcttctaagtagatctgcatgttaagtcaatatatagtgccgatttatcgctatctaaataaagcagcacagcacggtacagtattagttagctaaaggctgagatagaatcggaccctgatacttcagtttacctaacaacctgagctgcaatttttttcaggaattcagcagtggcctgcaccacctcaatctctcctcgctgatttctggaccactcgcatcattcaatgcaacacagagccatagacaggttcttgtccttccttgtccatcttgatttgccaatcttttagtaaatcagtcgaattcctctgcaatatctgatgtcctgaaaacctgagcaagaactgttgtgcatacagcctgctgaagcttgcggtggcaaaaatggcggcgccgctccatttgtgaacctatctgaggtgctaccaaagggcaatgggagtggtagtgctgggaatggagcacccaagcctcgtgtcagggctcgccgaggccaggccaccgatccccacagcatcgcagagagggtgagtgggttcatgtgattcttgttctgcttgaattccagtggttagttcagctagaagaactgtagaacaacggattacagcagactgtttgactctgtggtgatctcctgtttgtagctccggagggagaagatctctgacaggatgaaggatttacaggagcttgtcccaaactcaaacaaggtagtctacttactgccatgcttctttattaccagataatgctagattagtagtacctcgttgagatgcttgtgatctgagatgacaatttgtttttctgttgtgcagactaacaaggcatccatgctcgatgagatcatcgactatgtgaaatttctccaattacaagtcaaggtttgcgtgccaccacaaccgctcgttttcacagctatgtttgtttcaattgacaagctattttctgcttctgtactaatgccattgctgtcctttgaaggtccttagcatgagcaggcttggagcggccgaagccgttgtccctcttctgacagaaacacaaaccgaggtaaaccaacaaaatcaattcacaataacattctaacttgtttaccactgctgatgcaatcaggtcaaagaacaggaagcggttaatcctgttaatcacaatgcactcactgaaactgttgatgcagagccccgggtttctcctgtccccaagatcatcatcaggagaaaggcaggcaggagcaggagcagtaacaggagggctccccggcgatcagccggagctcctggacggcggcgccatgttcgagcaggaggtggtgaagctgatggaggacaacatgacgacggcgatgcagtacctgcagagcaaggggctctgcctcatgccggtggcgctggcgtcggcgatatcggcacagaaggggacgtcctcggccgccgtccgaccggagaagaagaagaacggtgatggcgatggcggcggcgacgaggaggacgtgaagggagagtttgacgcaccgaggaggcctcctgtcggccggccgaaggagatgaggtccagagtctaagctagaacctctgctttgttcaggagagatggagcttaatttagatcctaacactttgctacttatatgtttattattatgaaattttaattgcaagttgcaactggtgatctcgaactacattttgccggtgattagaaaattgttatatggaggttagttattaaatcatatataattatattttgtattgttgcggtccttgcggacaatgccattcagtaccttgatatttgatctatatagttcacaaatttttgtaaattatgtctttactcatgctggttatgatttgttccgagtttggtgagacatattggatgaagtgccaaaattatatatatttatgaaatcttcgtgaccaaccatcatgattcttttgtgcagtactccatttgttcctattataagatgtttcggcctttccatcttttgtctaacattcatatgaatttgggtatgtatatatgaaacataaatacatggacggtcaaatgtttaacgctacgtttcacaattttcacgcagttgaactcaatttcaggaagacggcatggttgtagctagtaaactgaactcgaactcaatttcatatcaactttgaggcacaacacaaggcataatcgtatcaactatcaaaagaatagtgtgatccgtttcaaacgatgttcagatcgctcgaattttggcaggattggttccttcatggatcgagaaattactcgaattacgatcagagattggttgcctagttcttcctcgacagcagccgcgcccggagctcggcggcgtcgacgtcgccgaagcgattctcggggacccagcagccggtcttgggatccctcatccagaagatctccttcgacgccgccgccgccgccgcaccgccggcgccaccctccgccgccgagatcctcgccgccatcgaggagccgcgctgctgcaactctgccgccgccgccgccgcgtagccccggcggctgcaacacacaataacagatcacgtcatcagtgacctcgcagaatgccttccagaatccaagaaaccaagcaagaacgaacgatccaagaacccatccaagatcatatacccagttacccacccgagcgagagcagttgtccggcggcgacggcggaacgcggcattgcgctgctcctcttctgtgtcggagagagagcgagagagagacgcggcggcgagaggtgtcaggagaagagtggttgtctctgcctccggcgcggcgcggcgcgaggtgcaggtccaatatataggaggcggatgcggcgctagggtttcctcggcgccgccagtgcgcgccgcgcgcgatgagaggcgagccgagcgcgcgccgccgccgccgccgcgggggcgcgccacgcgcctcccaattttttcgcgttgccagcaacgaa

SEQ ID NO: 1627 - DNA, 4184 bp, Oryza sativa
caagctagttggtatagtggttttacccaagaggctgtttggcgccgaaaatgttttttttttgtctttgttgtgttcagggtgaaggattgattcatgctacaagaaggaatttgtctcaaggtggagtttgttgagttgtgatccaaattcatttgcacttaataaaggccagcttctgtcgtagtggagcggaggctgaagctgacccattgggttgtgtacctggggacgcccgggggtgtaccttttagggttccactatacacacaccttttgtaagccgtcgtgcggcgttgtaacctcatcccgatatagtgaagatattttactggctggcaccagtggtattttctctcctgctttgagagggttttccacattaaatctcgtgtcttctgtgattgatctattgttttttatcgtttgtttgcctattatttcttaacagtaatacactgctagagtaataaaagtcttgtctaggtgcatctttctgccaatcctaaccgagattagtcagatttttgtgatctgaaaatggtcacacatccaagtcaagctttcgcagaaataactactgtttcaatataactacttgctctgttctttttttacatgagcggtccgcggaccacaggagtttcgaggtcagttcttcttttcgattctatagaacaacagtacaaaactactaatggtgctaaactctacatttaaccacctgttaattcagataccaataatcttctctatcatatttccctttcttccacatgtttctacgtaatactaacatcacactattatccatcgtctaaggagaccatcttcacatatcttctagctcctttctgtccaagagttcatatcagagattgtttgacttatcagcggaataagcaaaacggtatatttacaaataaaaagcaatttgtgaataaaacttttatgtatttgttcttagcgatgtaaaaacaaaggctgaaaaataaacttcgataaaaaaaaccttaaaatttacttcaaatttaaggttaaaaatttaaattttgactgataaatataagcataagcgaaaagataaatccattactctagagtttaaatatggacatacatgcagattcaaacctaaaagtgagttttttttatacggagggaatggttcgcagttgagggtgtgtaaatggtatatgcatgatgtcaaagctaatatgcactcttaaaaactcaggtaaaattcatcacgagaaatataaggtaatatcaacctgagaagtgaatttgttaataaaaaagccaaaaacgaagtattagactcaaatatatatatatacacgtgtaatatatcaatctttttcatttctttttcctaatcacatcacatgacttgaacaccaaagaattaacccccgtgtccggccggccatggaggaagactgcaagtgcattgaccgggcaaaggtggcccagccacacgccatcattaccaacggttaccatgcaggggcagtttggtcattcgccgcgcacgccgcgccttctccggactccggagcacacaagaaaaaagaatctacccttcagaataaaatcgttttcgggatcggcagccgcgctctagttatcgttatcttttccttcgttaaactattaaaacatgtacaatagtagattattagctggttataaatatattttaatataataaaagataagagagaagagcagcggactatagatttatagccagctgtaacacagacttcaagacacaatatgtgtatgacagatatgaccatatactaatagtatagtaagcaaatattgtataaattgactattaaattggctatagatgaattaaagctagtaattgcctacactattaaacttgctcttaacccgacgaatctgccctactgccgtactagctaattgcaatcggatttacgttaatccaactttcggctaaacctaattaaaaccgcatgcgcggatagagttaggcgacgctgatgctgctaatctcagaactggaaaaaaggttaaagtggttatgtcttatgtgtgacgtcgctgtctggagttcttgtgaaccttttctttgtgaatccctgctgtccagatgtgagagaatcaaacgatcaccagcttatcgaatcgcccgtatagaatcggtatacatctctcctttttagcggtagctatgcgtgtaataaaaaaaaagatctcccagaaatggacctattgggaacgaaaacaaaatgttacagtagttcagtgtaattggctaaagtaatactccatctgtcccgggttataggacatacttgttatttaactagatagtttttaactaataataccttttaagactaatctatacatgtagtcaccatatttaaaagataaaaacttttaaaataattcataataaaaaattctaaagtttgacctcacccttatctaaaacgacaagtagtatcagctcgaagggagtagtacggtttagcgtttattgtggctaagttaatcgataggattaggggtggatagcgaaccggctcggctcggctcgatctagctcgttaggataacgagctggctcggcttgactcattatcctaatgagctagaaacccagctcggctcggctcgtttgaaagctcgagctagctcgttaggctcgcgagccaaaccaacaagatagcaagggtgacagtggtctcgagcctgtgacgccttcttgcagctggcgctggttggggaagtgcggcggcggccctagcggctggcggcaccgagccacggcacatcggggaagtgcggcggcagtgacggcaatggccctagcggctggcgacgccgagccactgcacgtggctggggaagtgcggcggcgacggcggcggccctagcgactggcggcggcgcactgcggatgcggaacaacggaagggcatggtgaaggggatcgaggattggacgattcgctagagacagagagaaatgcggtgcgcctagggttttgttgttcagctgttgttttgggctgggcccttgctgttgtctattgcagtcctgactcgttaagactcgctcgtgagtcatctcgagctggctcgttatctctaacgagataaaatgctagcttggctcgttaggaaatcaaacgagccgagccgagctcgtcacgaggcgagcgagctaatgagccacgagcttactgtccaccatccactcctagataggataaatatgtgacgcataaaaaggcaaagaaaaggaaaaaagagaagcagatcgggtggtatcacctgatcgcttggttgcttcctcttggtccggatgagtatataatcaccaccaactcaccaaggccgcccagcgggacacttaactacttgttatctctgtttctcaatgacgtatgggtccagatgataaattattactaattgttatattaactctgttttttaatagatgacaccgttaacattttgccacacgtttgaccatttgtcttattgaaaaaactacgtaattataatttattttgttgtgagttgttttatcactcaaattactttaagcatgatttactcaatcagtcccagaatataaggatttttaaggtttaactagggtattaagaaagtatataaaaataaatgggagaatgttgtgataggttgagaagaaaatgttggtgaataagttttatattttgggataaaccttatgagctagaagttgttatattttaggatggagggagtatattttatacatttacataaaatttttaaataagatgaataaccaaacatatgtttagaagggtacgacagtcatttattaaaaaaagacaagtaaagggataaatagttaaagagtgaagtgcatgggcggtcattaaatttatagggatgtgtcatctaaatccctaaactcttaaaatacatatacaaatcctagaacttgtcatagtgtgttatctaggtcccaaatcaccacagtcctttcagaatcctacgtggtgctgatgtggcatgccacacggacatttaaaaaatttccttttcttttttcccctccttttcttctccttcttctccaagcagaagaaaggaagaaaaaaaaaaggacacgccacgttcacgtggcatgccaca

SEQ ID NO: 1628 - DNA, 8580 bp, Oryza sativa
ctcccagaatgctccgcatagaagagtgatgccctctccgcatccagctgaaccactgcctctttgacgatatcaaatccagactccaagatgacctccttgattctctccgtgtaattaccagatagaccgtccggtttgatcatcgccagcgtcctctccctctcgatagctacgcagctccagcatctgcccaaaatcaaacgccaaaacaacattgtacatcaaaatgtcacatgagaagaccttaacattgtacagccacttcttcagctgaatgcaccaccaaaaaacaaagcatccctgaacaaagacgtttcatttcatctcaatcacgcttagttaaaattacccatgtttacaaactacagtcgctgtatgtatccaagggatcctaattaagcgagagagcgatccagagtgggttgatgatgtgagcaggggggattaggacgaaatcttgctcagatctgtcgaagcaggcgtcaataacacaccaaatctagcatttctacggccaacgcatgctaagacgctataaacccaagacacctaggcaccgaggttcagtacggtacagtacagcacagcagctataaaccaagagcggtgagagcttggggcttacccgtggaggaagaggaagaggaggggcagcaagcagacggagagacagggcgccgccggcgaggtggcgccgcccatctccggcgaggcggaagcgccggagagaggagggagggagcttagcggtgggtctcccgtgttccttgtgctgatgcacgagtgttaattcgcttttggttttatcgcggttatcacggagcaggtttcacttaccgcggtacctgggaaatttggacaaaattggcattctattttcatcgaaactttgccaaaaataccacttcgtatttataacattaacatttaggagttaatttcactttgggccatgttttatggttaaaggttcactttagactactttttatctaatcttttcactttggatcggattaggtaactttatctttattgtacaataaaccaccccaaaccacattttcaattcttcgatgactttgatgaagttgttaacgacgtgccagcaaacttttgtacctatatgcatgccatacatttgtcaaaagaaacgctagacatcactagcgaaaagaattagggtggtccattatacaacaaaggtaaagttacctagtccaaagtgaaaggattgtgtacagggtggtccaaagtgaaactttggtaataaaatatggcacaaagtgcaattcactcatttagagttaattagaatgccactctcaactacggacttcgtccaaatgccactatcttctatttttgaaaaataaataggaattgtttttgtccctttgcttctatttttgcttgtattggtgccgttcatcgtcgacgcgctcacggctgagggctccaaggtcccctaccgttgcgtgctcctaacgggagcctccattgatattgttgtcgcagcaatgtactggatggagtcgctacgcgtacctcacgaagtgtgtgctcgccgtcacctaggccgtcgcggcatctgtggtcatgcggtcatgccacacgtgtcttccctttcccgtcactggctgctacccccgtccgtcgccagatgccctagagagaagagaaaattggacaactgacattgttggatatagcagtgaaacaatgacaagccgcccaacaacgatgacgatgcctctgtctggcggcgagcgcgcgcgaagaggaaggaggtgaggaggttgatagcgagcacgcggagaaagggagatgtggtgcgggagcaagccagggctccgagtccagctccatggtgccgggcctcgcctccacctccgcggctaccgccacggctcctagcccccacctctgcctctgcctccgagcccaacgctgtggcgcccacttcgccggcggcggcgacacagcgctcgccctcaccttctgtcgcatcgcagccgctgccgcttcatcgcccgccgcctcctcctctcctgcctcgccgactggcttgccagagaagagaagagaagagagagagaggaggatgaagggagtggagggggaagagtgagggtgctgatgtggcatgctaacatgtgggttctacactgactcagcagccacgtagaatgaaattagggtcaaaaccattgaaggatctagagtaaacggtttttataagttgagggatgtcatatatctggtttgtggctgagggacgattctgtgactcggtgacaagtagagggaccttgggtgtactttttccccaaaaaaatatcaccggtccatccctgcaaaaaaaaactcggcgcacccacgcaagcgggccggagattaacgggcctcccggacaggcccctcccccattaattccgtccggcccaacacagcccgccgtctccgttgcagtcccgtcccctcgccgccggacgcgacggcggccaccacagcatttttgatttccggattcctccccttctccgttccgtccatccatccatcccggaaatatccccaaaccctcgcctccccctcccccccgccgccgccggcgcggccgccagatctgcggccatggacgacgacggcggcgcgtccccgtcgtcctcgctctccccgtcccgctccccgtccccactccccgttgccgaccccgtcaccgtcgccgcggcgcccccgggccacctcgccctcgccatccccatccccaagcccggctcctcctctggaggtgggggagggggagggggaagggaggacgcctggagcgacggcgccacctccacgctgatcgacgcctggggggagcggttcgtcgcgctggggcgcggcagcctccgccacccgcagtggcaggaggtcgccgaggtcgtctcctcccgcgacggctactccaagcagcccaagtccgacgtccagtgcaagaaccgcatcgacacgctcaagaagaagtacaaggtcgagaaggccaagccggactcctcctggccctacttccaccgcctcgacaccctcctcgcccccgtgcacaagcccgcgggcgcctaccccgccgccgccgccgccggggccgcgggcgcgggcaattccggctccaactccgccgccgccgctaccgccgcccggagcaccgcgcccatggcgccgcgcgtcaacttcccgcagcgcacgcgcacgcagttcctcccctcttccggggtgaagcggaggatgccgtcgcctccccaggtatcagcgtcgtcggagtcgtccgacgggttcccgccggagccacctatggcggccgcgaatggcaagaggcggcgcgaggtggaggaggaggtgaacggtgcggacagcggccaccgcacgcagggcctgcgcgagctggcgcaggcgatccgccggttcggcgaggtgtatgagcgcgtggagttggcgaagcgggagcaggagctccggatggagcgcgaccgcctagaggccgcccgcgagctggaggaccagcgcgtccagttctttctcaagatgcagatggagctctccaaggccaacaatgctggcgcctctgctgccgctgccgcagtgggtgccgttgccaccgccattgctgctgccgatggcaatggcacgaggagaaccgctatggccactgatgtcggtaccagcagcaatcaccatgttcggtaccgcttccaggacagcaggcactgccatgctgccccgcagcagccacaacaccagtacaacgagaacaatgccgccgaagccgccagaggtaccgggaatggtagcgataccgacaacaaagaagacgaggatgaggcagaggacgaggaggacgagagccagtaatggcacccggtttacatcttgaaagattcaagaattcgatttgtatgattgtatcagttaattggcattgccctggtggttagaattacctcccatttaggctgttctgggagcaacaaatgacatctgagtactagttagcgtcggtattagcaacaaggggtagcatagttatatggttatgtgcctgtgcctgtgggtgttgtgtaacttgtagctgcttgttcatgcttgtgatgctgtggtctgagctatgatgcaactgccatgtcctggcgaatactgcatcgattgtaacctgattgttatgtgacaaaatgttagccttattctgtgtctgttcttggaaatcaggagcattgtcctgaaccttgatagtgtggagacgtgccccatcagtgttcgatttttcgcttgctgagtaattcagagtagcttctgttatgacttatggttcctgaattgtaccttgccgttaacttggcatggtgaattggtggaattttgttacgacttatatgaatcccgaattgtaccttactgttaacttgtcatggtggaatttgagctggttatgttgcctgtgctctcttcacagggtaagctttctgcagaaatgtgcaagattccttcagacttcgagcagctgagcctgacagaacaattgtgggcacccaagtatgctttacaggcgtcatggaatggatgtagtgtaaagcatgtaacacttgagatgcttatgctgggataaaccagtagatccagatgctaatctaatcctcgcgcacttgatgcagatcgtgctggtgacctggttacgacaacagacgagatcagaagggcaagtgatgcttttgttgtcgccatggcgaatggcgagcctgtggtaggagcagcatatgcgatctagcagcagactcagaaaggtgtatgcaaccgtttgtgctatgaacgaagagagagagagagagaatgcagatttgcagtcaaatggtagtttagattaatgcaagtaacagccaaagttggtatcattgtatgcaagtttgattgaaaaagcaaataacagagaataccacatcacctttctttgtccattctattccgatatatgaaaaagagtgacctaaacataataaggaatatgagcatcatttaagtataactagcatgatggcccgcgcagattgcgcggctagcatcattatattttctctcatataatagcatatatattttctcattatattattaaaatatattacaatgacaacataattttaaattttacaataactttacaaaactactaatgtgtaatattcatattgtattttatatacgtgttagttattaattatttttaatatcaaattttagttatttgtaaattatatatatttctatatggactctagacttgtcttttaatatttctttttttaattctgattttttattatttctaattgtatttctatgtggactctaaactcatctttcaatattctttaatttttaatttcaaatttcagttacttctaaattgtattcctatattgactttaaactcttcttcccatgtttttttaatttcaaattttagttatttgtaaattgtatttttatacggactctaaacactaccttttattttattatgtttattctgaattttacttagttttaaattcctatatggactctatactctacttctaatatttcttattttttaattacgaatttttattttcttttcttaattgtatttctatatggactctatactctacttctaatattccttattttttaattccgaatttcaactatttctaaattgtatttatatatggactctagtctcctcttctaatattccttatttttaaattctgaatttcagctatttctaaattgtatttatatatggactctagtctcctcttctaatattccttatttttaaattctgaatttcagctatttctaaattgtatttctatatagactctagtctcctcttctaatattccttattttttaatttcgaatttcagctatttctaaattgtatttctatatggactctgttttttctttttctccgattaatgtgagaatttctcggccatgagagcgaacgtagatgctcctttttctattcctattaatgatataatagatagatttgacctagcttgcatgcatgtatttctaataaccttttatattggcatagtacaaaaacattatgagtgtaactttaataatgacgtagtaccaaaacattatgaatgtgtgcatcatgtaagtgtaaaaaacagctagtaaatatgattaaaagtcggaatgaaagtggggaaaaaaatggagacgcggggaatcgaaccccgtgcctctcgcatgcgaagcgagcgctctaccatatgagctacgtccccatcgattgaaatcatctatgagaaactataaagtgcttcatccgtttcgtattatgttagtttgatcaaattcataaaaaaaattagcaatataaaaataccaaattagttttatcaaatctaacattgcatatattttgataatatgtttgttttgtgttgaaaatcctaatatatacttcctctattttttaatagatgacgtcgttgactttttctttcatgcttgaccattcgtcttattcaaaaattttatacaaatgtataagatataaatcacatttaaagtactatgaatgataaaacaactcataaaataaattataattacgtaaattttttgaataagacgaatagtcaaacatgtgagaaaaagtcaacggtgtcatttataaaaaacggaggtagcatattttttataaatttgatcaaatctaaagaagttggactgagaaaaggtccaacgacttacaatatgaaatagagggagttcatatgccatttgatccggaggggtatgatcctagtaatggtactgatcctggtaattgttgagttgtgatccaaattcatttgcacttaataaaggccagcttctgccatagtggagcagaggcccgtcgccggtaggcttgggcgagagcacgtggatgatcaggaaactgaaattgttgataatgatgttcatgatacagttcaacactcacctcctgttttgcagccacaagatgaacctattgcacatcacataacaaagaggagtcgtggagctcctgtccgtcttattgaggaatatgatatggtttattatgcttttagttgtgccgaacaagtggagaatactcttgagccggctacatacactgaagctggtgtttctggtgatcgtgagaagtggatctcagctatgcaggaggagatgcagtctcttgagaagaatggcacatgggagcttgtgcacttgccaaaatagaagaagcatgtccgttgtaaatggatcttcaaaagaaatgagggtttatctctaagcgagcatccaaggtttaaggcaaggttagtagcaaaaggtttcagccaaattgctggtgttgattataatgatgtgttctctccagttgtaaagcatagttcaattcgcacatttttcagtattgttgctatgcatgatcttgagctagagccgttagatgttaagataatatttttacatggagagcttgaagaggagatatacatggaccagtcagaagggttcatagtacctggtaaggaggattatgtttgcaagttgaaaggatccttatatggtttgaaacagtctcctcgtcaatggtataaaaagtttgattcatttatattgtcacatggctttaagaggtctgaatttgatagctgtgtgtatatattaaatttgttaatggatcacctatatacttgctgttatatgttgatgatatgctgattgttgccaagagctaggaagaaatcactacattgaagaaacagttgagcagtgagtttgatatgaaggatcttggtgctgctaagaaaattctaggaatggaaattactagagacaaaaattcaggtttgttatttcttagtcaacaaagttacattaaaaaggtttttcagcattttaacatgcatgatgcaaagcctgttagtactcctattgcaccttattttaaattatcagctttgcaatgtgctagtactgatgaggatgtagaatacatatctagagttctatattctagtgttgttggttctttgatgtatgccatggtttgctcccgtcggatttatctcatgctatgagtttggttagtagatacatggctaatcctggtaaagaagactggaaagctgttcagtggattttcaggtacctcagaggcacagctgatgcttgcttgaagtttgacaggactaataaggggcttgttggatatgtggattcagattttgctgctgatttggataagagaaggtcactcacaggttatgtgtttactattggtagttgtgctgtaagttggaaggcaacattgcagcatattgttgcccagtctaccactgaaataaaatacatggctattgctgaagcatataaagaatccatttagctgaaaggattgtttactgagctttgtggagttgattcttgcattaacttgttttgtaacagttaaagtgccatatacctcactaaagatcatatgtttcatga

SEQ ID NO: 1629 - DNA, 651 bp, Oryza sativa
atccgcgtcatccctagccctagccaactaccttaggacgggaaaaccgccccagcaagccgccgctccgccacagctcccatgtgcgcgcgttccgtcgcccccattcgcgcccaatgaataaaacggagcctcctgccacagctagagttagaacgcacagactttaggctttaggtacgatgatggagccacataaccttaatggaggaggagatcaaaccttatccgcgtcatccacctcattgctcttatccgatcaccattagtactccagctcgcctaggcatgtgctggtgatcttatccccatagtttgcttgcatcctaagcgaagccctcaacaaaatcctcatccctctcagccttcttctcgtatgcatttcatcgaacaccttgcgatcaccctctcaccaccgctagagatcaccattgtgaggctccccggccggagctggaggttggagggagtggaggaagagccgtgctgccgccgtcgccatgggggaagccgggtagccgctggacatcaagaaacgttgtcaagcaccttacgtcgccgtcgtttgcccctgtcctgcaccgcgtcgagctccacttcgccgcgtttcgccatctcgccgtctcgcggtacaccctcgcgcccgtagcg

SEQ ID NO: 1630 - DNA, 679 bp, Oryza sativa
gcaggtatggtacgcatgaggtccatctatccatgccggtgttctggcgccccggtcaggatgaaactactggcgataggtagttataacatggaccgtagattaatccattggggtttgcagaacaatgagaatcagttaaccagttctcaacaatcgcttacgattcagcaaagatatatatacaaaaaaaaaaagcaaatgcttatcaattgtatcatcatgaatatatgttgctgggagttcttggtagcatcgcaatcacgctaagcagaccatgtgttgatgaaaacagtttcatgtttcatcgcatctctacaagtcacggaagatccaaagaacatgttctttcttactggtttggtttcttcttcacaaaataagagagggattacatcggaaaaaaaattgaatgaagtatgaaacccaaagtacaacaaagactcggtttctatttcttcttcccagccttgccctcctttcttctgacgatctcatcggcataccggatgcccttccccttgtatggttcaggcggcctccacttctttatggaagcagcgaattgaccgatctcgctcttgtcgtagccactcacaatgatcctggtgttctcttccaccttaactttcaggccttctggaacagccatccgaaccgggtgcgaaaatcccaggtt

SEQ ID NO: 1631 - DNA, 784 bp, Oryza sativa
aataatattgtatagctctaggaccgtgtttacaaagtagctttgcgcaactaagtgacttttaatgctgtttactgcaaaccctaaccccctatattatggctcccttgtactcccttgcatttattctgcacttgtgggtgtgtcgtgttgagtacggtggttgtactcagtcttgctcaatttttctcaaacccagaagaggagttccttgaagatgaaggctttggtgtatagctcgtgcctgccgtcaagcgcctgtggtcgtcgccctagtcttccgctgtttcccgtttgtctttgtgtgtgctgggccttcgctgcccgggtaataaatctatttacgcttccgcttgttaaactctgaattggatcaacttttggtgtaccttgcctcctgggacaaggattaatgcacgcacgtaaggaatgcccgttgggttatttccggtcgtgacaccaccacggtatacagacgggagacgtgacatagtttccaacccaccctagccatagacaagagtaccgacccaatcccacctacggccggaacccccgggacaggtaggcaggactgagcccctagcagcaggacaccggccctgtgccatgacatctcgactaccgggccgcagctcgtgtagccttcatttgtcctagagatgtccatcgacccccgacttcgtccatctccatccgtatacttttgtttatagccagactgagccacaaactaagccttacccactagacatgtgcaagtacggtagtgctttgcaacaga

SEQ ID NO: 1632 - DNA, 523 bp, Oryza sativa
tgtacatcgtggggctcggcctcggcgacgagcgcgacatcaccatgcgggggctcgacgccgtccgccgctgcgccaaggtctacatggaggcctacacctccctcctttccctcggcctcgacccctccgcgctctccaacctcgtgcgttcccccccccccctccccctccccctcaccctccatgcccgccacctgttcgaccaaatgcctgttcccgctcacgcgccatcgccccactgttttcttgcgcaggagaagatgtatgggaaggagatcacggtggcggaccgcgagatggtggaggagcgcgccgaccagatgctccgcgaggccgccgacgcggacgtcgccttcctcgtcgtcggcgaccccttcgggtaatggtttgctctctgagagccttctgggtactgtaaacctttgctcttgtgcgacagcttttcggttatgtcctgtttgaatgacaaattgcagcgcaactacacacactgatctggtggttcgcgccaagaacatgg

SEQ ID NO: 1633 - DNA, 2204 bp, Oryza sativa
tgctaagcaattatatatataacatttagctgaaccaaaccaatacataaggttcaagctaatcaatttattacccaaggtatcaaggaataggatattcaatgcaaattggccataacaaaggaattggttcacaccacccggtgacattcgaaaataaatgcacagttgaaataaatagagaatttaaatataggatcaacatgctcaaaggattgtgtttaggatctgtgtgacttgccttgcaataatcggtcttcaattaatcttcttgatcacttccgacgcactcacgaaccttcgcaacgacggaaacgacaagctaacacgcaaaacgaagaaaaagactaataaaaaccaaataaacagtacataaaaagtaaacaaacatgtaaatcataattttagatgaattatgagacttgaacggcctcattctgacttcacatgaatttattatgaattttacaagattaaatctaattaaagcccatttaaaaagaattaaataaatttaattcaatttatggacaattttaatatgtagatctttattttagaaaaatttagcaacttgaaccacctgaaacggatctacggttatttagttatgattttccgaagatttaatctattagaaaaacgggaaaaagaaaaaccgatgacgtcagcatgacgtcatccatggcagccacagcacgggtggcgacctcgccggagctagggtggtcggccgggattttggaggacacctacgcgaagagaacgacgagacgaacccgatggtactcaccacaacggcaaacaacgcacgacgacggccggcgacgaggaggacgacggcggtggctcgggttgcgcggcgacggcgagctccggtggtcggcgacgaaggagaggtggcggccgagcttccccacaccacggcgcacctaaaggcgacggcggcaagcggctgcgacggcggaggcggctgcgcgacgtcgccggagttcggccggcggcggcggcggactaagcggcgtcgacggcgagctacgaggcacgagagaccacgggagagggggcaaacgaaagaggaggactagggggtcctatttatagccttggattgaagagatcggactccaaacgagaggaatcgaagccggaaaatcaaaaactcggttttagagataaactcgaaaacgagtttgattcggataaaatacccaacgatttgctccgattcttgggggaaaagatagaggaggatgagaggatcaaaacccctcaaaaatccggaagaaacggggtcggattggagcggatttggaggcggaaaggcgacgcggcgcgcagctcgggctctgtccagactgcaggctgaaggttagggacgacactgtagcagggaggcaaaacagacttctcctgagcttcctttttttcttgcttgggccgactgagagagagggagataaaacagactttggagagagagaagaggggaggccggctgctgcagctgggccgattgggctgcgcgggagagagagagagatgttgggccggaatcggcccaacgacttagggaaggatttaaaaactttttccaattaaaataatcacttaaatgatctttcaattgttaaaaatacttccaatgctcaaataatttgaagaaaaatcctgaaaatacttggacactaaaagtacttaacaaaattataattagaccatttaatgattaatttaatatttaaataattgctgaactgctctttgtatgattaaaattaggaactgagctccgaaaaatccgagaaaattccagagagtataattaaccatggagaatttaataaaaattaaatccatccatgctttatatttaagaaattttatttcccacatttaacttcacttgtaaattagtgaacatttaatataaattctaataataatttattaaataatttataagtcctgaaacaaaaatcaggatgtgacaaatctaccccccttacaaagaatctcgtcccgagattcggaacggctagaaagaaaaaggcataggtaaactgcagtctatcttattccataactccgataattattctaaggctttaaagaaaactactactgctttgaaactggtggctgagctgtaacacttgaagacacaaccggcactgcatttgctcctgtgaggacaatgttgt

SEQ ID NO: 1634 - DNA, 1946 bp, Oryza sativa
  unsure (1)..(1946): unsure at all n locations
aagagagagtttagagcactcaaccagggatctcgttcggttactgagtaccttcatgatttcaaccgtttagctcgctatgctccagaggatgtccgcaccgatgaggagcgtcaggagaagtttttggagggactgaatgatgagttgtcctatactttgatgtctacggaattccgagatttccagcagttgatggacaaagcgattcgtcaggaagacaagtacaaccgtatggagcagaagaagcgcagggctgcccaatttaaggcacagcagggtagtaaccagaggccgcgtctcgttactggacctcaagttccatcgtaccctcaaggaggatcttcatcagttgtccgtccccaacgccagttctacaacaacaatactggtaatcgtagcaatgacaaccgcaatgtggttgctcgtcctgcagcaacttcagttcagaaccagcctgtcaggaaggagcagggaagtaagccggtgatatgcttcaactgtggtgatccaggacattatgctgataagtgtccgaagcctcggcgtgtgaagaacgttccagccccgaacaactccaatgttccagcaccgaaggcacgtgttaatcatgttgcagcagctgaagctcagaatgcaccagacgttgttttgggtacgtttcctgttaactctatacccgcaactgtgctttttgattccggtgctacacattcctttttgtctaaaagttttgcaagcaaacatgggatggaagttgttagtcttgggagacctttactagttaataccccaggcaatcaagtattttcgacacggtattgtccttctgttaccatagaaatagaagaagtttctttcccatcctctcttatcttgctagaatccaaagatctagatgttatcttagggatggactggttatctcgtcacagaggaattatagattgtgccaaccgtaaggtgattttaaccaatagcaatgggaaaaccgtttctttctttgcgtcctcccctaaatttcatggtgtgatcttaaaccaagttgctctacaagagatccttatagtccaagantcctcacgtgtgttcccggaagatttgtcaggtatgccacttaagagagacatagagtttcggatagatttggtacttgcaaccaacccaatccataagagaccgtgcacgggaaattttcgcgcaagcgtaatccatgttagcgtgagagtgaagaaacaggtggatgattgggctcagaaaggatatattagacccagtacttcgccatggggagcaccagtcatctttgtggagaagaaagatcatactcagagaatgtgcgtggattatcgagcgttgaatgaggttactatcaaaaataagtatcctctacccagaatcgatgacctgtttgatcaattgaaaggtgctacagttttctccaagatagatgtccgttctggatatcatcaacttcgaattcgtgaggaagacataccaaagaccgccttcacaactcggtatggtttgttcgaatgtaccgttatgtcgtttggtctcactaatgccccagcctttttcatgaacctgatgaacaaagtgtttatggaatatctggataagtttgtcgtggtgtttattgatgacattcttatttactccaagacgaaggaagaacatgaagagcatcttcgtctagctttagataaactacgtgagcatcagctttatgccaagttcagtaaatgtgaattttggttgtctgaagtgaagtttcttggtcatgtcatctcgtctggaggagtggcagtagatccaagcaatgtggagtcagtgttaagttggaagcaacccaagacggtttcataagtgcgtagtttccttggacttgcaggatattaccgcaggtttattgaggaacttttcaaagatcgctagaccaatga

SEQ ID NO: 1635 - DNA, 8927 bp, Oryza sativa
tgccatccttcggacgtttatcgccttcatcactagcacatctagcatgctacaaagacctgtcagtgaagccccagagtcgtggaacatggcgcatctcatcggcagagacggtgacgagacgatgctgtcgatgcgcgacgacaacctctatgttcttgggtttgccaacaggagtggagattggcacgcattcgagaggcacgcccatctttttcgcgaagatgtgacgcccctcaagatcaatgataattatggttctcttctaggagctgggcaccgtggacataaggaccgacctaggatcgcccttggccaacaggccgtgctagatgccatacaagcattatccaactacgatccatcaaccacagatgacaggattctcggagatgccctagcaaccctgatcgttaccctgccagaagcggtacggctcaggaaaatccgtgactggcaactcagaggatggtccacagggacgcatcttaccagtaagctagccgatgaagtagtgaaatggcgagtgatgacatgtggactcctcgttagtcacaggaacaatggctggtggggcggagaggaggcaagggacttgtatggatcgttacgtattgcgaacaaatttggtgcgatggagagagtcggcgtcatgctttggcccgcacgaaggaaatgctcggaggaggtgttggatgaatggcacatcagcaaaatcaggagagatatgatgatggtgcagcaaagaggatgatcgatcgcgcgcttgtgtttttttttctctctcaatgtaatagctgtattaaatctataagtgttttcttatcaatgtaataggtcatatttactctttgcaagtgtttatctcaacgtacgtaataacttgttatgtactgatctaaccatatttaatttatatataagccatatttactctctggaagtatttacaaagaccattcgacttttaaaatataaagtatatatgtccatgtttcttgcatgaattgaacatttattcattttgatcgcacggccggtattgctagactaattaaaaagggtgaattggaaccatgccattgtacttttgcaataatatactcgttcatgctaacgctatgggctggctacggagacatttattctttacctcttaccatgtggtctacaaagaaaatcgctacataaattttaacaaaaaattcaatacattgtcgcatgcataaaataaatcgcaacttttgataagaagaatgatatgccttggacgtcatttcttaaaaaaaattgttaaagcatatatactggctttcatagtcatgtaagaatctacctctaataaataaaattttctggtgaatagattcgggtaataagttcatccgatcctctcaatagaagatagttaatcaagttcttatcagagctgatgggcaatcctcattgttatgacagttgatttttgtacttgacatttcctcaaatcaatcaatgcaacttttctagtacaggtacaaaactttggtccatacacaaacatgaaggctacctgctcatcataggaatatcttcaggaagctcacggttgctctcgcaattctggaatgcattgcatacgccacaggcctccctcttttctgcagctcgtcctcatccttttttttttttttgcatttgcacttttatgctcgttaacttggtttaatataccaaccacccatagtacaatgatcctctgactatgtgtgaccgctaacgtgacgcgctacacaggcaactcatttgcacttagccctgaccagtacattccaacccgaatcctcaaattggctagggtttcgacggtgaggttagcggtgggaggcagcgaggtagctgctatggctgcctagctgatgagattaatggtaagaagcggcacagtccggcaaggtaagcggtggcacggtgcggcctgattaacggcgggaggcaacttacacacttggcatcgcatggattctccaagctcgtcctcgccctacagtcgccggaagaaggtaccattgattaagtgcacgttgtgcaaggataaggccatcgtggagcgtagaccaatggcatattgctaatcggggctacattttctaagaaagaggaaataatgatttggggactttttttttttgggggagggggggattcgggtgtcactatagctacaaggaggtataagcgacgcgctgtgatgtgaagggggctgagcacataagtgttgcttgtgcggcgtgacacgttggcggtcaaacatagtcaaagagcaattggaacgggggtggtacaataaaccaaattcatgaacctaaatatgcaatttttaagttttgggacctaagtaacatcaccctacaagtttaaggaccggctatatatttcactcgatatcttatcactgcttagtactataaaataacatgggataatgggtcaaatgttttcatgatcgtactcatgtaaaatagatgtcctgagttgtgtactgaccgagtaaaaaaatgtgaagtctaaacagcaagcaacaggaacatctgaaaatataaagcgctaatcatctgagctaatcactccttcaagtcttggaacatatcaaatgttaataatgaaaaattcatattcaaagcatcaaaattcagagtgtatgttatacctctatgctgcagaatagaacaaaattaaaagcatagataaaagcagagcgatagtcaagatagtacctaattacctgacctagagagcaatttgaaagaggattggacggtgagtaagaaaaaccatcgctgtggcagaacccctataggtggtacccatcacacataacggagcctgtcatggtggagcaggaagcaacaacaggaggtcgaccttgtacttaaaattagctggggccaaacagaatgtggaagacccataattttaccaaaacaaaatggaaagtggatctgcaacgtatcgcccaatggatctgaaagacagtggtcattaattagcaagaatagtaggattatctttgtaggtttcaattctgatatcaattacatggataaattatgttcagattgtgttatgtgtataatacagggagtagtagttccaattcatttcatgcagggatatttatgtcaacaaaagctttgtagtaattcttaattgttgggttagagaagtcgtctttagaagtaattgatttcaagataaattcagcagcagcgcatcagtagaataaactatcagatgccctattaccccacataatgcatgaaattaaatttctttatttctgagtagcctccagatcataatgaatgcattggacaatatgtgggtttttaagcaatctgaaaatcagttggcccaaacacattggcatacacttaatacttacctatgattgacaagaaaattgattgatgtactgaatggcagattgttccacttgcattgaggcaaaaacctcatgagctttgggcaaagcaaaacagagtacgtgcccaaatagagatgttgctcgtaatcgttcatagctcaagtccaaaccaaatcagacagaatcaggcagaaaaacaatgaacgaagaagatgttgaaactggacaacagaatgaaaggaaggaccttgaggagaggatgcagagacgctgaattcagagctctacctaccacctcgccgctgctccgctcccccggagaactccagtccccgccaatggcgaaggccacaaataaccaccatgcatggcgctggagcgagatgcggccccttcggtgtagccgtcggtgaggtggagcagcgcgatgaggcggttacttcgtggacgggcgttggtcgaggaggggcgtcgtctccgagcgcttgcggtttcaaggtctggagacggcgatctgcgaggaggaggagacggtgtgacgcgggtaggcggcgatgtggggaaggaattggcagcgatagcgacgaatgcggatcggcgactgagggagggagagtgatctgcaaggggttgggggtcggtgcgacgcgtgggaagcgaggtgaggtctcgtcgcgcacgcctcgcgatcgtagtgaaggcggactaggtttccgtgggatgtgatgtgactagtacggtgatttcgggagaggtggtatgatatgagcgctctggttcgttggatctgtaccagaacatctgcaccagattgttgttggtgaaccagataaggaggaaaagacatggttatgaaaagaaaaataataaagttatgctctcacaagcatgagcatgatgttgaaaaaaaatgtagccatgccctctcctaatcaataaggaaggatttttgggagaagaaagtaagcacagaggagaagcattttatttatttttcttcataaaccattttcatcatataccacacacgctgcacgatcttggtcttgatcttgagtgtgtttagttatctgctttagtctgagtttttgacttagtaataaatgtgaatgcaagtatatcatgtttgatctctaccaagatccacatatcaaaccttagagtaggaatcaaaaaggcagaaatggtgaggaattcaaattgatacacttagagagattgagtggatcatttgaggaacttagttttcttttgcaaaatcatttgaaaacttccggaataagaagttgaataaatattgggtgattgatgctctaattgctattctgtctttcaaccgcccaaggcaaggagaagcagtgtctcgtgggaatcaggggtaagggtaagccaccgtgccaaagattatttaacctgagagagagtacatataccttgcacctgtatatttgagatatacagcatagtaacaactcctgatcaacaaccaagtctttgtttcctttcatccttcactcgggatgagcaaaggttcaagcttggggagttttgttaacggtcgttattgatcagttttgaccgtcaatattaccaaaatagaagagaactagtgatgcttgcaatgcatatatatgttagaataataatattccactaatattaggtttactaacctttttgcagagaataacaataaagtggaggagaatcgacatcaacacagacgataaatcaatcggacgaggtcgaaaattagacttatgtatgaatgagccaagaactcagaaatgacacaaccaataaggccaaaattcacaagtctacggaggagagtaataaaggaggccgccagccgacgatgggccagattggcccagcccatggttcggccgaacctcccggggcgccaatggatgaagggtttggatggacggctgggattgagacccaatgacggttggagggtattaccgaccattccaaccgtcataaccgtcattacctgcttataaaaggagctcctcttctcacttcactcacacacctcaagcaaagctctctcatattctctcaagtttagtttagtagtattaagctagtggaataggaataaagtagaaatcaggagtccggaagccttcggaagagttcgggtatggctctagtagtttttctttcctcctttataagctttgtacttttattagaatactcttatatatacatttatggtattgaaatactttctgagtatatgaatgctagctttacattatgttcatgttatactgaatatactgctagcttatctgggagatgctttgatgcgggtataatgtttgcttatgcaattactctatgtcatgaagatgatattagagtagtatctggtagtttagacatgatgtctagattacgagatatcattatttggggttatatgctgcggatgagaggtgagccgctgatggtgacagctcagtacgagtattcctccgcgcgtgtatataatcctaagttaattccctggggagggtactcctccgtatttagccccggttgtatggtcatgacgggctgtcgtaaggaactcggcagtcaggggtggcttctcgaagtaccaggatggcatcggatagagggtattagctagtatatcggataactagaatgtatgtatattatgtttattaaaagtataggagtagattatctttctcttttctttccacatagcttagataatatattatgagaatgagtagctactggttgtgttcactcttgtcgacgtttgatgtcgcgattccggtatttgcatagtatggggatcgttggtactaggatatatgcgagattgaggtaaaagagatggagacagggatttttatacaggttcgggctcctgaattgtcaggtaatagccctacatcctgttggccgaagccggtcgttgctcttattcatcataattacaccagtacaatatttggggtagcctatctaactgttgtcgacttggcggtctgaagtgctgactcatagtcgacaacagggtagtcttcctcctcgaatctatgcccgacgagatcagagatagcgctagattcctctctttggttcccgtgggtaccctatggggttttcctaggcttatctctgatatcgatatccggcggcttgtcttggcgtatgttggcttgtatgttgatcttgcgtcttgatctattgttccgtatcccctctcctcctagggggccttgtatttatacccataggtgtccccttgtccaagtagaactagggaaaccaatttggatacaatccgagtagtacttgtcgtttccatgtagaactccattcatccttccttatgcggaactcctcctatatccgaaggttgtttccgtataagacatggtatgtggtgggtcctgccaagatttagtcaactactactaggtatgtggtatccataaccctgacaactctacccttggattatcttaacccctgcttaggatattattatcacaagtaacatataaattattagtcaagttctctctacatgatcttcccacaggataaaataaatacgatacccttggaatactctcaggtgaaatgctacaatggtatatccgtgcgcttgcggatgaactctgtaaccataatataccagaagtatttctgcgtcattgctgggaattatatttttagtaatgtcgttaagaaataccaacagatagtcttagccttagatagattacacacgttccctaagttcgatatccttttggggtcacccgaaggtgaagtgctacagtggtattccgtgcgcttgcggatttatctgtggtcgtaaaaaatacccaaactcttgagacacaccccctccactatcggatcgaggacgagtggatagcgacctgggtgggggaggtggtcgaggtggtcggatcgatcgaatgtgatcgaggtcttagaccaccgtagatattgcggtgtgtcagagattgcgttaacttatgcttgcgtcgggactcgtatgcatcggggcagccgtagatatggttgagctcggcgtgagggctcgagaagcttgtgacttggtcttgtccccgtcttgagagggatcgtgtgttcttcctcctgagccactcttgtcggccaattgctgggcatactgtttgagtagccagcattgcttagcggagtgcttgagctcggggtggtataggcatggaccgtccatcatcctgtcgaagtcgtctttcttgggttggcggaacttgcgctgggcgttgctgcgcccgatggtgttgactttatcatcactcttgcacttgggtggcctactacgggaggagttgctttctcgacgcggctggtacgaaggcctcctcttgatttgggcgtagactgctagctcggagttggcgtccttgttggcgtggtcgaacatctgtcggacggtgagagcggcgcaccctccgagtgacgtcttgcaggcccaccacttgatgaagtcttcgttcttgcagccttgttggaaggcggccatcacctctgtgtcggtgacgtgtgggatggtgttgcaccgttccgtgaagcagcgaatgtagtcggagaagcattcgttgtggccttggacaattcggtagaggtcccactgggtgcccgggtgagggaaagtgccttgaaagttggcgatgaactgtcccttcagctcggcccagctgttgatggtgtaccttggtagccctgtcagccatgctcgggcgacggtggtcagcatgaccggcaggtagttcgctatgaccacctggtcgcccccggtagcttgaatggcgatggagtagacggcgagccatgcgttggggtcggtcttgccatcgtatttgtcgatgcctatgggtttgaagttggctagccagcggactcggcataggttgtcggtgaaggccggtatgccctcagcgccgtcgtcgcggtgtgggatgtggtctggtgagtggtcgtggtagtattggtaaggtcgatggacgacgatgcggccgtccggctggacgtctgtgtgacgacggctagcgtcgaagtcgtcctcgtgaatccgcaacctttcagcgtcacgaagtcggcaatgctcgttcatgacgttacggaggtcggcgtttagccggcgcccggcttcgatcttgtctcttaggtcgctggtgcgtagactggggtgtgaactccccgcttgggacgccttgacgcgcttcaactcaaaggctggttgtcgggactgtctcttgccggaggaaccgccggcagttgaagtcgttggcagtgcatcagcgtgttgaacagcggtggcttccaccatagccttcacttgggcgatggtggtgttcacggccgggtcgactgggaccggcatgttgtcgaggagggccttggcggcgatcatgttgttctacggcgtggtgaagacgccgtgttctcctagcttcacttggaggatagcgtcttg

SEQ ID NO: 1636 - DNA, 1321 bp, Oryza sativa
tcctgcagccccatatgtgaggtgcttttataggtacataatatctctcatgtctatacattgaaaatttatagctggattgcacacatgaatagtccgtcgtaacgcgcggagcattatttagtttttttttaattctagtgtcacataagcgtcacgtcaatgctacgtggaacgaggaccgggtcaacaccaccacgtaggcaccacgtcagcgaaaccgctctccaaaatcgctgagggagttaaattgcgccggttttaatagttgaaggtcgaaatatccggtattgtggttcacaggttcagggatgaatggccactcgttaagagattcaaagtgaacttattgtggtggctatagcttcgtcagcttgttagaccgtttgagcgtgttgacaaccgaccatgatatcaatctattatattattaaaggaatagaaaaaggagcctccacgttcactctcatggcctagaaattctcacattaatcggagaaaaagaaaaggcagagtccatatggaaatacaatttagaaatagctgaaatttagaattaaaaaaataaggaatattagaagaggagactagagtctatatagaaatacaatttagaaatagctgaaattcggaattaaaaaataaggaacattagaaaaggagactagagtccatatagaaatacaattaggaaataactgaaattcggaatttaaaataaggaatattagaagtaaagtatagagtccatatagaaatacaattaggaaataatagaaattcggaattaaaaataaggaatattagaagtagagtatagagtccatataaaaatacaattaagaaaaaaaaactagaaattcggaattaaaaaataaggaatattagaagtagagtatagagtccatataggaatttaaaactaactaaaattcagaataaacataataaaattaaaagtagagttttgagtccatataaaaatacaatttacaaataactaaaattcgaaattaagaaaaacatgggaagaagaatttaaagtcaatataggaatacaatttagaagtaactgaaattcgaaattaaaaattaaagaatattgaaagatgagtttagagtccacatagaaatacaattagaaataataaaaattcagaaataaaaataaataatattgaaagaaaagcctagagtctatatagaaatacaatttacagaaaattcaaaattaaaaaaagaaatattaaaggacgagtatagagtccatataggaatatatataacttacaaataactaaaatttgatattaaaaataat

SEQ ID NO: 1637 - DNA, 560 bp, Oryza sativa
atttgtctttgaaaaatactttcataaaagtatacatatatcactttttaataaatatttttatagaaacaagaagttaaagttgtattttggagaccgtgtcgctgtctaaaacgacttcctttacgagtatggagggggtagtttctacacaatatccaacatatcatgagagataagagaataaatttaagtatggaagaatgggttatatgaaagatggttatatatttattgatgatgtggagttatgaaaactatgtctaatgctggttagactggtcttagcgacttgatcataacccgtgagccctatacccttgaccgacaccgcactggcatatgctggtccttgggacatgaattgctgaggatgcactgtcgacactgccgcaggcatcgcgacactgaccgtggtcctgcatgatacaaatgtgtgcaacatgagaggatctgggacccatccatgaatttaattattcttttttatgaaataggatcacatgaattttgtagagttaaacaaatcttttttttttgttgtttgttaagtgagtcag

SEQ ID NO: 1638 - DNA, 7787 bp, Oryza sativa
ttcctgcaccccataaatatgatttttttaaacaactttcgtatagaaactttttacaaaacacacaccatttagtagtttgaaaaacgtgcgcgcggaacacaggggagaggagttgggaacctcttatgccgaacacaccaagcctgtaaaaggtgttgatcactttatcagaaattcagatcccatgttaaccaaactcaagagagcctactccttccgttatataatgatcattatatatatttatacacaaagaaaaagaataatttaaactgtattaatcaagacacactatacacatacttctacaatacatgtatcgattaaaacaccatatcatttatactatagcatgcacatattctcccatcttgcattaattgtatttcgatagaatccgtatccatgtgattatatgatgatcaatttgagaaatatttgatttcattatatgatgattagtttctgaaggagaaagtaataacataatacccacacctaccacatactatgtcatttatcactcaaaagaaaattaccttttgcttttactttcgggggcgctgatcgatcggatgcatgcgtgatcaagctggccgccggacactccctgtacgtttcacctcgcgatctgcagagttcaaacttcaaagtgcaagaataagtcctacgttacccggtcgagcggggacgcataccatggccaacgctaagatgtgacacgtacctctagcctctcccacgcggacgcgatgccaaaaagcagcaaaaagcacgtgcctgcgaggaggcgcgaacctcatgcacccctgcgcgaggcgtcgggtctaaggccagggttcgagccgtggctcgcgctgagcagcttgaggcctcttgggcgtgtagctttacgcaactttacgataaataaggtctcacttgtgggtattacctctattaattggagaaataagctctcctgtgtagccttgcccacctaacaaacggggctacggtttgcgtcggtcatggcctaagcaggcagtgtagtgtatagtagtagcctcgattgttggtgcatacgtacccaggcagcaccgtgcatattcttatcggattaggatcctctgcagtcgactgcaccgcgtcttttatcattgacatgtgagtctgaagatcatcagacccatatgtaataaatgcatctggcagtgaccgcagaggatctcaatccattctcgtcgggttctctttccctcctgcaaagcccggccggccgctgccattcaccgagcggcagctagccagcagcctacagcctgcctctcgctggctctgagtagccaagagtccaagacgtaccatctcttttctgaggccagagaacgtaggtactagtgcaaaccaagataaaaagttaccggagataccaccaaatatctaattattgaataatctgtattccctggcgtttttacattataagatgtttcagtatttttcaatttaaacttctttaattttaactaaattaatataaaaacaaagttaacaaatatattcaacgttaaattttataaaataactttatcctagatggccttttgccgattgccattgaactttgaacaatactacagtgctacgcctgaatatgagtccacgttcacagctcggctctacaagatcttaaacgaaaattaaattgacaaaacaacctcagattaattatccccaatttgaacctaatcacagcaattacttgcattctccaaaaccagactaaatattgattcttgagtagcaagtttgattagcctaaccacaccccccgtacacacgcgcgcatacagtcaccgcgaggtaaggtcacctcccccccttttcccttgcagtgggtctctcgccggtcgatctcccccacgcctccgaagaatataaaagcccccttcaccctctgttgccttgtagcctcaacacctcaccagtgcaccaccccaccaaccacctctcgttttgcatttctctgcgctcgctgtcgctgccatggattacggaggcggaggcggaggagatggtggtgtgcgcggcggccccggccgcggggaggcggcggtgggggagcacagccgtaccggcccaccggcgtcgtgtggccgccgccgccgccgggtagcacccctgtcaccgtccggaggcctccaccgtcgacctcgccggctccgcaggcggcggcttcgtcgtcgtcgacgtcgacaccggacaagctggtgaggcagaaggcgatggagatcgcgctggcgccacccgccgcggcctctccagatggtgaggcgctggcctcggacaatctcgcgcaggtatggaagaaggaactcgtccactcttctcgaggctatggtgtattggtgtacgtcactcgcaaccacgttcccatcaacaaactgagctcatcttaccctctccccttcccacccctctagatctctgcacaaccgtttactactcttctgctgttgtttctatatcgatatagtagcggtagcggcctagatccggttctaggcatgggtttcgagtgctaattctgaatgttttgattctaggcatgggtttcgagtgctaattctgaatgtttttgttgctgatcacgatgaacgttttcgtgtgtgcactgtgttcgtttacgaatctcatgctgcctaatctgttttgagacggcgagattgttgatatatgattccaagtatcgaggcttccgatctcatcctttgttcgtttacgaattttagtgctgcttaatttgttcttgagacggcgagatgttatgtgatatgatccaaagtatcgaggcttccgatctcatccttgtgatgtttggcagaaaacgaaaaccaaagcatatttgaacgtttcttagatgtctttttatttcttattttgtattacatctttattgcatccctgtagagtacattacagtttaatgtatcctcctgacatcttttctgggtgagaaaagatgtattgcattttgaatgcataagtgtcaatactgtacaatttgaatgtattttgagatagcatcttcttgtgttacatttttattgtatctcgctaaagtactgtgctgttgaaatttattccgagagcaattttggtgacaccatgtattacattttacaagaatacatttaagaacacatcttgtaaaatgtgtggtaagatttaagagcacactttgattgcatctgtagataatgccgtgcagctaaatttattccgcgagcatttttctcttgtcaacaaatgagtactgattctaaactctaatgtttcaaaatcttcagataaaaacagcattaggtggggtttgcattgaaacaaatcatcaggatgataaaatcagaaggtacaaggggattacccctattcctttgagccagctgttgtacttatctttcatctgctgtttctgtaactttaactccctttctgtttatgttctctaagttaagggaaatcaatgtagattgttgaccttctgaaatacttgttgaggtgttcacagtttgaatttttagtccgaggaaattcacttcattattctacattagactagacatactacagaggttttcctttcagctaaaatcttctcttttcagaataagtattcccaaatgacagagatactttgtcctccttacaaggttaatcatggtttgcattgtcagcccaaaacattgaattactgtttttctagtaacacattgtatgttaaattttattatttggatcctaggatcctttgttagcatgctgttaaaaacaacaggtctattaacacattatatgttaagatcatgtattgattgctgtaatgataaattgtttggcttcaacccgtgaatgccgttagttacatagtcccctgcttgaggaatgttaaggaatatagagtcctttacattgtggaaagcttttaaatctgatttttaaaaatgtcaaatagtcctttattttcaatgtagattgttgatggaatatttgaatggtctttgttaaggattttgggcatattagcatatcaattatatctggatgtgggatgaaatattttttccctttaaaatggttatgacttagatatctttcaatcttataaacgatccgtgaatattcaactgaaatgatgtgtaaatgaagtattacacgatttccctgacctgggggagtatagcatgtgctatcatctttttgttagacctgcatttttatttatgtacattggtgtttttttttccaaactgatgcccagtatttaatgttatcagattttctgttgacaagaatgggacaagatgctgcctagactctagcagtgagtctggaccatggtactccaagaagcttaataacaagaagggagtgactggaatccttagtcaatggcacaagcagacggaacagaaagctcatgaggtataatgcgacttatatgcagatccaaaccttttatgccttttgaattttagctccattttgaatatgaccttttatagattttcttagaatgatttgtgtgtagaacatgagactttttgaatatgaccttttgtagattttcttatgatgatttgtctgtagaacataagattgtatttctcttgacgatgtaatttagtcatgaatcatgtatttgtcttgatttccatctcattttttgtcaggttgttatctacaaacgttgtactgcttctggatctgcagttactctttttcttattatgatgagcttggtttgtacggtgagaggaagcaaccatggaactgattgcgacatcggcgagtactcaacgagcattgctcaagtttgtcagtatggtgctcctcccgcagtgtgttgcgaccttttacaatccgctgtccacacttgtggcaatgctagtgttttgtgtgaaattggcagatctgtgccaattacttctagaggtttcaatgttcatgatgttatggattggcaccgagagtgcacgggtcaaccagaatcatccagtgtagatgcatcgtccatttgttatgtatcaggtatatttccctttgcttgtgtgatctgttagcctgctttatctgtttactgaacaacattgtcttatctgatctgttagcctagctagtttaactgtttactgaacacattctctatattaggtgaaaggcacaaagagggcacaaaagaagagggccatcaagtaaatattttgattgagaccggtaacaaggagtgcaacgcaaggaagtcaacttctactaatccgatgtttatcggtttaggaattgggtttggatcggccatgctctttgctttcgcgctggtggtgatttggctgttcgtgagaaggcgatcacaaggtatgagtttttctttaaactagtataattctgtttgcttgtaaatacggccaattgaactcattttcattttgcatatggtcaattgaactaaataagaattcttattcctgcaggaggtcctctggtgccgcagattagcttgctcgcaatcgcgcctcacttctcccaagggcttcctgcgctgcccttccaagagcatcctgcgctgacgcttccctgcgggcctgtccctgtcccgacacctcaagaagttacaacagtgcagccagccaccagtgcatatggtcagccagcgccagtgcagccagccaccactgcatatggtcagccagtgcaaccagccaccaatccaatggcgtacttggcatcagtcgtttcctatgcgattgtagacagacttactagccgccgtcgtcgctagtacttgtgtttgtctctcctcatacttttttacaactttcttctcatacttgagacaactattgagtttgatgatttagaatacttgagatgaccactgaacaattccggttactgtaaaatttgagacagctagtgagtgctgatgatttctgttaatttggttctttaaaatacctggacgactattgattgagggctgatgtttttttcttttgttaatttggttgtttggggtatccagaattcataatttcagtggactccggacttcggaacggttcgaaaacacaaaccacttgtttttaagtttttttaaaaaaataccaagtatatcttaagacaaaaggcacgagggcatagcttttaatagaaagcagataaaattcaaattgaacttaaagtttttggaccaaatttattcggactttattgattttagtcggtttatcaacggattacatgaagagatgtgcttccaatgatatcattcagtagattttgatctaatattaggattgtgagatcctgtttagatgggactaaaacttttaagtccctatcacatcggatgtttgtatattaattataaatattaaacgtagactattaataaaacccattcataatcttggactaattcgcgagacgaatctattgagcctaactaatccatgattagtctatgtgatgttacagtaaacattctctaattatggattaattaggcttaaaaaatttgtctcgtgaattagctttcatttatgtaattagttttgtaagtagtctatatttaatactctaaattagtgtctaaagacagggactaaagttaagtccctggatctaaacaccacctgaatctgctggtgtgtttgattagagataagaaaatatctgtttatttacgttttaagggcctggtgtagataagggcctgaatgaggaacttctcctccatatatttatgatgtttccctagggtccaaatgaaatacgttttctacggctccatatattgtgcggcaatggcggaagctaagtcgaggtttttttttaatggtggaatcaaatgtactacacctatactaatataaaaaggatcaattcaaactttttgctatggccacccaactgaaatgtacaccgaaaggtctcatccattccgtagccgtttgatcgtctcatccaacgcctcaaaacgcatctaccacatgatgtgtgtgtcaatttcagggagtaggaaattggggataaacttgttgcattgacttagctctatgggcaatatattgtgtacaagagggatgggaaataaccaaaatatccaatacacactattacacttaacacccccactcaaatgcaatgtgtatgcaataacgttgcattgaaaactacaactaaacactaaactaaatcaaaagtccatgcttgatgatgacgtcgaagtgtgcagttcttgaaatgatgaagaagaaatgattcatctcatcttcaatgaagcggaccttggagccttcacggatcgttcttcagcctttaataccttaagccttcacaaattgtttttcagctcttcattgattcagagatggtgacaatgatattgaaggaccttcacaaactgttcttcggtccttcatgattgatgatgatgtcagctccaacggggagcatgatggaccaactccggcagggagttggtgatgatgacaggacaataatgaagaccaactccgatggagagttggggaagttggagatgacctgctccgatgtggagctggtgatgaactgatgatgacggctagctccgatgtggaactagtgatgatggagatagattggcaagacttcgacaaattgaagaataggcaatgacttcaatggactcaatgggaactagtaaatgacatgacgatgctagtatatactccctccgtattttaatgtatgatgcc

SEQ ID NO: 1639 - DNA, 11917 bp, Oryza sativa
ctttctcttaatctcctatgtatacgagataaactatttaccggatattcgattaaaaaaacccaaagaaacatacatacataccattaaaaaaagctataaagcccaaaaaataaatatgtatgttggtacaacatcgaaaaaatatagacaatccttaaaataggattttctatactatgaaacaaaatttattactccagaaatatgcaagttaaactagatcattataagtatcaaatcaaaggtatttaaacacccacttttaaattataatccgttgtattcaaatgctgatgacttatcatagttatattatgatataaatacattacaacacatggatctgacatataataattaatattataataattttcaaatgatttaggcgacatataataattaatttcatcataatctttgaaataacttcacatcatattttgtggtgtcaaatataacttgacaaatatataacactaactgaaatcgacatgcttgaaaacgaaacaacattatgctttgtcagttatatatgatttaattttaatttatggagactaagattctcaaatgttttttttcatatttttcaaaactatttcattggtattcctaggcaataatcttgctataatacggccccttaatccatacgtttttcccgccagattagtttgttaacaaatgtgcattaaattactcatgatatattttgtttatagtcgaggaattctaatttgtcgggtataaatgatagttgatagttgatgaatgtatgctataagtgcactccaataaattagttatttttaataatttttgaaagtaaataaaatttaaaattagtaaatgtgtctcatgcaattatgaaccaattatgaacaacaggtgacgaaaacaaaccatacgctaaaatattgatctttgtcaaaatataaacaatgatataatggtatgatactctgaagatggttatggtcatatatctgtttagcgatacatttcttaatgatcaacctcactcatttcaaagcagaatattgtatttatacataaaaaattaggtagtactgctcaatactagaaaaaattatgtctacacaaaacgtaaaaacaattattttttatgggaagaattattttcattacatcaatcttttcttgctttctctaaaggctattgaacatcttttacaagtatagttgaggtggccccagtggaaaccaccgttgacaatagtgctcaactttttacttactcatgcaatcatctttaagaatgctgatagtgaattaggacttaaaattgtactgcacactgtccttgagaggcatgagtatgtcgatatggaacccatgtttaaaggcaaccgagaaataaagacttggtatctccacctgttagaggggatattcatgtctaattttcaacactaatatcacatttaccaatagatgcagtattttaagtatatttatttatagatttagaactatgtgttgacataaacacttaggtatatagtggagataaatgttttatgtatttatgatgtattaggcttattttggtgctacagatgcagttccgtttattaaaaaggcatctagcgacaatggtaagaagtaatggtgacaataggcaagtttacataatcaggacaaaagtgatttttttaatataagaaacattcctatcgtttatattaaaacctacaatatatttcacgacatagatttttgttattatgaggtaaaatatataatttcttatacgcatatgatgtgatatgacttaattctcataacgttatttttataatcataatgaataagttccccgcgtatctgcgcgggctttctttctagttactagcaaaagacccaaagaatgctagtgaacgtgttgacagtagcaagcaatgagctaatgatctaactaccactccaagccatcatgataatttggagatgtaaaatgggattatgataagcagctaacaataataaaatacggtgataattgatgagtgattatcggatggcagcgaccagcaagcacaaaaattaactgcatatgtgtgatggagtacaagctcaaagacatgaaaaacaaatcgacgattttgacagattttgcaactgaaattaggagcaaccaacaattttgacagatgatgatgaacaatgaagcattgatgcatatcctttgttctccccaaaataaaactgaagcagcacaagctacatcagtacatgcaaagtaatggagagagaatgtgcagaggagagctggagcttgcgttgacttagccataggcgtcttagcagtgacggctaaagatgaaattgtggaagaggaagagaagatgtggaatatttgcttgctggttggagatgaaatagactacgacggggctcgctgctgctgcatcaggcaggacccctgctgctgctgcttgactccgcgagaccgttcagtctcgctctcccattccgcggtaccacgcggtctcgcctttcgccgcgcgataccatccacgacgtcattcccacgtcgttctcgtgcaacatttgtgcgagaccgacgatatatttacgcaaaaaaatttacatcccgaatatttataagaaaaaattgaattaacagtatattttcaaatttaatttctaccttagctgccaggaactagagaaagctccaggcatcagtcgtttagtaattttgatgttcatattctcgtgagttgccttgccgcattatcatgtacagttttgtgaatcaaaatgaaaaccgaaggattataggttctggaagttccatgctcaaaacaaacaattgttgccatgttagaatctgaagcatgatcaatttagcagtttcttttcgtagctgtgtcttactactttcagttatatgcattagctgcttcaactatgacctgaaacccaaattctactcaattttaagttggaacgaaactagataaaacatgctgggtaggcccacatggtgcttgtgtctatcgagcaatagctagacttatacttggtgggtacaagtccaaatttcccaacaacatcacaattgtttatatgatctgccatatccctgtttttcgtttggatatgttgctaagccgagtaaatattcttaaaaaaagcagagttagaactcaagctgtggcagagttgctctgaaatctgaaaataccaagttcagaacaagcagcacatggtacaatttagctgtattcaaacacatctagtattactgtttttaggatgtacgattttatctatttttagtccaaaagaaaggaaagcaccatatacttcatcctagcaacaataggtgcaagttatataccgtacccttcatttgatttccttgtctttgattcaccaagaactagttctacctgaataccaacattggtactgtatgatagatatgtatgttttatggcactagattttttgagaacccatgttcaagtcttttgtgccaatgataaatttggccgcaactcatggccaatatgaacataactgaaattcccggtttgaacttcattggaaactatttcagttttaattgggactagcacatataggccttgtacttcagaaatatttcaattttactgatgtaaatcggttgtactgcactggtttgcaacctgaaactccatttaaaaatttaaacctagatcataagatattcagagataatggcaagaagtagccgggccactgaagctcatggtggcattagtgctatattataatttctcttgcacttgagtgggtccttaaacaagtattataccatttcagttctgcttcagcactagtgttcatctttttcctggagttgcacatctggcgtttgcagcatttctgtaaattggcatagtataatagtgttgtcactatctcttttaaggacattctgtaaagcacgcatggatggctttctggtctggacatgcaggagaggagcacttatgttatttttttagcacttctattcagggtgaagacatcctttggagcaagcattagtgtcggatcttatgtgattgaatatttgcctgatacttttacctttcgactgagacattttactgcttatgtgattgaataagtagatgtgtagggacagttcttatcagatctgtcaaaccttgtgaattgtgatgatgctattgatgttcagatgggcaagcgattaattctgtgtatatgtgtgctagtgagtatgattaattatgcgtatgggtgctaatgtctatgattaactagatgggtaccccgcgcgttgctgtggaagaattatgtaataatatagacttaatatcggttgagcagtaagaaggagaatcggttatggaatatattcagagatttcgtaatgtccgcagccgatgttatagtttgagtctaagtgatgagcaactagcatatcttgcattccaagggctatcaacacctatcaaggataaattattttgccacgagttcgacagcttagctcatctaatgcagacagtaagtaagatcaattttggagttattaagactagactgaagataatattgaagcatgagctctcgtactccaattttttttttttggagggggggcctgtgttaacaatgaaatttggtaagccttgaagacgtcatcagcctaaaatcaatatcggcttcagagttttggaatcggccgatgagaattatcaagtcgccaatagtcggattcttgctatattcggttaagaaaactaatctattaaaggaagcttagccagaagtgaccgagttcaagaaggatgctgaatgcggcatggcaagttatctattaattaggcagtatttgttagtttccttttatctttaggaaagtgtgtttagtgtcccataaggactttatgttttactttatatttaggaaagtttctttcttgtccaataaggactagtacctacccatgggtataaatatgtacacctggggtgattgtaaactatctccacaatcaatacaaattcggcacatcgccatcctttttactgaggtttttacttatcatccgacggaacttgacacttaacgcagggctgcatcggctttcgatctccgacatagggggcaagtcctacgttgcgccggtcctaacaattttattggctacattggcatcgttcaaggctgcatcgcttcgacctcttggattgctcaggtttagttgatatatttgcctacctatttatcatatatattagttaatctagtttggtagcttgatttacttgtaacgactgatattcattttagggtttatgccggtatcggctaagtcgctttcccaaattagattagctaaggtatctaccaccctgaaaatcagtcaagggcttgattgtctagatattgtgtttcatacttagtgctgcatcagtacattcgacctactaagtcgtatttagaaccataatctctagcctgcttcttgatcgctaataaaggtttcatcggggttttagccaatgagttatctggacgttgcatcggcttacaaggattgcatacaagttggatttagccgatagcaacaaaggtttcactgtttgtctaatcttgtggatttatgacattggaccttcaaccgatgtatgctttaactttcggatcaatatttgttctatcatatcattgttagctgattggttcctacaggattatattattgttatattacattatcatcagccgattgtctttatttacatcaagtgtcagattttacatcaaacatatggccgatagctcaaaatcctatcactatcgactgataccggtatcggctggaatcactccatcggcttgtcagccgatcggttatttgatctgctatttgtatatcttgtcaattgcaggatcaaattgactggcacgtccgcacctcatcaacctttggacctgcactggagctaagcagatctctcagaccgttgtgttcgactgttcgttgacttagttcgtgccaacacagacccggtaccatcggctgagcgcggattttccgtcaaaagccgcgcgctagctcaatcactgactgctgctgctttccacccgcatcttggtcctcccgcgcctccgcctcgccagtcgccaccgtagacgtccctgtgaccttgtccatggcgaacctcaccaggttgctgagcagcacaacaacgctcttctcctgctctaccacgaagctcagcaggctctgcagaacggcggccttccagttgcccccaccgccgccgaggaggaagggaaggagagaagatgacatgtgggtcccccaatttttttttttaatagcatatgggccctacacatatctatatatcctatatagttggcaccaaaaactaaacatgcattcagccgcatcactgacaaaacatgataaaacaagagccattggatcattttcatacgtaaccacaaccatccaatagacattaaatatcaacacttatcatttttcattgattaaaaggtaactcaacattcagtgaccacttagtgtagtatatgctataaaaaaaccactacaagaagtagccatcggatcatttttcatatgtcatcacaaccatccaatagacattaaatatcgatggttattatttttcattgatcatgaggtaactcaacattcagacccttagtgtagtatgctataaaaaccactacaagaagtatttcatttttcatatgtgaggtgcttttataggtatataatatttctcatgtctatacattaaaaatttatagctgcattgcacacatgaataatccgacgtaacgcgcagagcaacatctagttttttttaattctaataccatataagcgtcacatcaacgccacgtggaacgaggacctggttgacactgtcacgtaggcgtcatgtcagcaaaaccaccctccaaaaccgtcgagggagtcaaattacaccggttttaatagttgtgggtcgaaatatccggtattgtggttactataaaattataacccaccaaatcctaaagctcaacctacaagatgctatatcatcatctgctaacaattattacacctaaaacatcattgcgtgcatagtatattatctataattctatatttattaaattttagagctttaaaatgcaaacatattaaataatcatcccacataattcacataatatttaaatatatctatccattattttttataatatcctatataactatatagttaatcatcacttagttaatgttatgtatcttttctctcattaagccaaatcatctcaattgtttttagcccttagatgattaatctatgttctaaattacctctctcatttgattctctcataaagtctcatcgcctttcttttatatttggatcatcatactatataatatttaaatgaccataaatcatattaatgtttagctatcttacatattatttgtacttattgctattatactaaactcccgcagcaatgtgcgcgtggggcatgacctagttaagtatataatcagtgacaataatctgtttcgaccaggggtcctgcgttcggaaattcccactttatatttatttgtattgtctaggtttttacgaatttccttttttcatatagcatctagtttttcattggcttcccgttatggtgctcttttatcaccttggaagctactaggtaaaatttcagaagtgagcttcatggaagacgttcgaggtttgtttgtctttcttttcttatgggttgctgaggagtaacgtggttttagttcactttaatcatctttgttcatgaacaaatcctatatatactattctaataaaaacatcagcttgatgctccctttaaaatttctctaaattaatatattctctacataacacaattaaaggacgtgggaagggcatatgggggaatgatctgtaggacactagtaatatgcccgtgctaaacgctacggtgcaattcgatgtttctttaataacttctaaaatttcatgttagcaaaaaaaagtatatgatatgtgcaattggagctttaattcaattaatatcgtacagttcacataatgtacaataatatgatattgtgtgagcacaataaatcttaataaaaattaattatatataatcaattcagaatacaatatacgaagccaatatatgttttaaaagaatatgttcaaaaagtatagatttattccattaatttgttgctactgcaaaaaaaaaaagaaaagatgaggtcacgaccaaagttcagatagacaagttcagaaatggagctatctcataaacattccaaagctcactgaaaacttcataaaatccaactaaatttacaaacgtattcagagatatatgtttttagaattcattgttacaaacatattcagagacatatgtcagaatcataaatttttcatgctggcaaccagctgaagaggtgcacagatcaagacttgcaaaagatgtactcatcttcagaacaatgttcaggcattttccattctggcagctacaacagaaccagaaaaactctttagctccaggttcattttaaaaaaaagctccaggttatccctaaccagggcactcagggcttctcctagctcgacaaaagattaggcctgctatctaaatttgagaaacacatgcagataataactttttttttgtcacacatacacataataatttgatttcaattatatcacagatgtatgttagtgggagggaggagaattaaatagcaagtattttgtcacagatgcacataataatttgatttcaattatctcactgatgtagatcacataactgaccgagtcactattgaaccgatgcataatagccattgataatttaatattaggatggttcatagcttctgttaacatgaaaaagaaaccatttttgtttccatacagcaaccatgattagtgacaatgacagtaaatggataataatatggattggtgaaaccctttcgaaaaaaaaccgtgccatttgattaaatagacggtaaaaaaatggataggatgaaaaaaagtattccgtgaagacattgaaggataagatgcagctgttcaaggaagaaacttacagttgatttaaaagtataaatatgtgcacagaagctagagcctattttatttattaaaacttatcagagcaacgcattatcctgaaaattataaggcagattatgaacttaacacaaattctacataggaagtaatgtgtcaggaaaataaatttattatgtattgaaatatatatgcctccttccagcttttggtgtagatggaagattgatcggggcagtgacattgttgaggccaaattcctcttattcggttgtctggcaaggtgatgggtagcgacggcgatagggccgtagtggcgggcattgacggttgtggggagacagcggcaaatctagaaacacttttctttctttaggttgatggaaaaatgaaccaccctactggcagttgaaacggtcgatatatgtaaagttcgctgctgccatcaaaacccgctcgatattcgtcatatcacttacaagtaatacgactctggtttctgtataccatcagaaatatagagaaatttaccatatgcctaggaattcatggtggttcctaaactaaatggtacatattagtcatattattctgaagatttaaagtacatttgaacttttaaagaagcttaatttgaattaggataaaactaaaacacattacattttggaaattggaacagagggagtatcacagtaaaagtgtaatgctgagaatcacaaaataaaagtacttgtaacaaataaatgacagtggattcaactctcaatttagttttagcaacgaaaaatatatagtacataaagaacagatatactggttttttttttgcaagtaccagggcattgtgagctataggcaacaatgtgatgtcacaaaccatgaagtgatagcagggcagtggaagttgatggctaataccatgaacagatgcattgacaatagtaaaaggcgtagcaaaaagaaaaaggacataccttgaagctcatttttcacacctttacacactgcagaatttgtcattgttgcagccctgaataaaacagttgtactcagagcaatgtagggggtaatctccagagcataacataaggacacaaattctcactaccaccagtctcacctaagccagattgatgccaccgtcgttgccaaaataaatatacagaacactgaattgcttattaaatgtgtcatctacactatttagatccgtacatacacaagcagattactacgagaaaacatacatgtctgtgtgacttcgtcaacaatgggaaaactttatcactgaaataaaatattgcttcgtcaacaatggatcagttggtgagttcttaaactgataaataaatggctgtgtgactcctacgtttgcaatatgcttgggtcctgccactgtaaaatctggtgataatttgggtcccgtcattgtaaaatatcattcaaccatgataccaataatttgaactattgattgaggcagagcggaaaataatttgtacggttgattgagacagagcggatacaaactttcttcattgcctctgacgaagaactgggaggcagtaaaaagaaggggtgaacgattgagtttgtaatgtaagtacaagggtcatgggactgcacctgagaggggagatgatggcgctaggtccacgactgcccggaatgcctcgccttagcacctcccaccctttcgtcatccccaccctcctccacgcacctagctagctagcaccgtgccggcctatagggcaagcgcccgtagatgacagaggcggcgtggtgagccgtgagcagaaggggcagagggtgacggagcggcacagcgatgagggcacgggggagtggcggcgctggcgtgaagatccatgtctgcaagagggagtgatggcgacctgatggcggcagcggcgctggcgacgggcgtggggtgcggagcggtggaagggagggagcgcgtgggaagggaggggaacgacggtgagcgcacaacgacgtgattttggggatagtgcggctgccgagaggcgatggcgatctgcgcagcggggccgcaggggtcaggagcggagagggtggagggggattagggttaggggagcgcgggcgcgggctgagtgaggagaggggcgctcgcggcgtgatttgcggggagacggggagagggatgcgtgcgtactgtggaaggaagagggggagacgtggggcgatgtgagctgttggattaagatgttattgaccgttggatgtgtgatatgatgaatgagtaacgagtaaaactatttgttcaactatagggtagatgagtaccttcaaaatataaagcaagatttttcacttggcttgtgcttaaaaacctcatatggacgaaggacagattgccatcaaggagggtatggcaaaatgactaatatcaattacaccttacgaatctggagacagttaaccacctccttgaatgtcttcttgccactgcagtttggaatacgatatgttgattaattagaattggaatacgatatgttgattaattagaatgcatcaatctcacatcctttttagttggcaccaaaagctaaacatgtattgagccacatcaccacaaaacaagagccattggatcattttcatgcgtcaccataaccatccaatagacattaaatatcaatggttatctttttcattgattatgaggtaactcaaaccacttagtgttgtatgggaaaatatg

SEQ ID NO: 1640 - DNA, 1991 bp, Oryza sativa
ttaccttaccgcatctaggccggatatcatgtttagtgtttgcatgtgtgcacggtttcaagccgctcctaaggagtgtcacttagtggccgtgaaaaggattctaagatatttaaagcattcctctactattggcttgtgatacccaaaaggtgctaaatttaagcttgttggctattccgattcggattatgccggttgcaaagtggatagaaagagcacatccggtagttgccaaatgcttggtagatcccttgtgtcatggtcatccaagaaacaaaactccgtagccctctctaccgccaaggcggaatatgtttcggcgggtagttgttgtgcccaattgctttggatgaaacaaaccttgttggactatggcatattcttcaccaaaaccccactcctatgtgataatgatagtgttataaaaatagccaataacccggttcaacattctagaaccaagcatattgacattcgccatcacttcctaagagaccatgttaccaagtgtgacatagtcattagccacataagaaccaaggatcaactagccgacatttttaccaagcctcttgataaaacccgcttttgcaagttgagtaatgagttaaatgtcatagacttctctaatgtggcttgagatagtgcaccatggttgcttcttttgcatattgtatatttgctcctatttgctcttatgctttggacttattgccatttggttcttcattgagaaaatggaacatgtcacattaagggggagttttggactcttccatgtgctctacttccttttatatgtgagaaaatcaactaaaagtgctagtagtgttttcaaaatgcccaagtcaacataagtcaaaacttttgcaaaatcaatgaaatttgaaaactatctcttggaaaatgtttcaaaagggtccctatatgttttccaagcctcacattgctagaaaaatgatttttgaatgaaaaatgccattttggctctcttttgaagaatctagattcttgtttttggccaaaatgagattaaaccccaaaatgagtttgagaaggaatctgagaaaagattcaaaacaaagttggtagagaggaggatttgaaatgtttttggtattcaaatcatattcaaaaaccaaatatttcaaaagttgtttgaaaatcaaattcgcccaaaaacccctatagaccataaaaggccacctcctagcactcaagtgagttttgttgcaaatcttcataaatttcaaatattatgaatggttggcaatatttcaactcacacatttcaaaattgctccaaaaatcaaaattttgttgaattttattgagtgggggcagccaactgtgcaagggctatgcacagtcggctgggtggccaggcggtctgaccggcgctatatgcgcggtctgaccggcctggtggcagcggtctgactggcggcaacccggcggtctgactggccggggatggtgggcctaagaccttgtcctttcttcctcctcctccttctacccgacccctcctcatcccatctcatctcttctcttctccaactcgaaaaaactcctcctctctcttttcccaaaccctagccacctccctccaccaaatccatccggttcaaccgtcaaaatcactccggttacaccgtaagtgaatctcctcctcttcctctctctattccatggatttgtttgagttttattgagtttgtgatccatggcttggaaccctaggtgaaggaagaggtgttcttaggttttcaccaatagagggtagtttcttggtgtgattcaactccttcaaccggtaaatcactctccctcttgtgcattctctcaaatcggtctatttcaattcttgggttaagggtagtttccccctttgcttcaatctctatgaaatagacctacaccttgatattcatgttccaatcttgtgcaactttgtcctagcaatttttttaaatcatttgtgtgga

SEQ ID NO: 1641 - DNA, 673 bp, Oryza sativa
aattcctgcagcccagaagagtcccccgagccgaacggtggcctaaggctcccgatgaccggggttgaccctttgcccgcttgtccgacgacgccaggagcccccgacccccaggacggccctgaggccactgtgggaaggccgcacctgtcgtcctccgaccccgaggtcgtcagcacagaagacaagtgcgccccgcgaggccgcttggacgaagagcgccccagggatgcggcccctggcgaagaggatcggccccatcgaaaggtgcagcggcccgtctactttgttagtgaggccctccgggacgccaagacccgataccctcaggcccagaagatgctttacgctattctgatggcttcgaggaaactgcgccattatttccaggcgcatcgggtcacggtggttacgtcttaccccctcgcccaaatcttgcataatcgagagggtacaggacgggtggtgaaatggacaattgaactttctgagttcgatttgcactttgaaccacgtcacgctatcaagagccaggccctcgccgattttgtggcagagtggaccccggctccccgccccccgggaaagcccaagttccccccccgagccagctcgggcccctcgcagctgcctcacaccgcccactgggtgaagcagttcgacggctccctgt

SEQ ID NO: 1642 - DNA, 610 bp, Oryza sativa
acacacattcattaattcactgggtttgtcctgaccaggggcggtcacaccgcccacatagtggctgtctgaccggcgtgccctggccggtcagaccggctacatagtggcggtctgaccggcaccactttcccggtcagaccggccccctggaggccgagatgatgctgctcgggatggccgatacagagccgacggagccgtagtcggtcagaccgagccgatggcggtctgaccgagccgaggccagtctgaccgagccgaggccggtctgaacggccgccccatgtcggtctgaccggccaggccgatggggccctctgacagggctacaacggctagttttctagccgttgcagagtagcacggtctgaccggccacatacctccggtcagaccggcagagcacaaagttgggggatttcacccccaacggctagttttggtgggtgggagtataaatactcccccaccagcagcaagggggctctcttggcacccaattcaattgcatacactctttgcacctctctcacactcacttgagctttgtgttcatccatctagtgtgttagagggttgtttagccaagagtcaagtgtatttgctt

SEQ ID NO: 1643 - DNA, 5354 bp, Oryza sativa
tactgtcagtggcggtctgaccggccgagagcctgcggtctgaccggccgaggaccgtcggtctgaccggccgtgagccgttggtctgaccgacttggggcttgcggtctgaccggccttggctctcggtctgaccgcccctgacagacagcactcctccttctcccacttcactatgtggcttctaaaattgttgcttatccatcctttgctccttgtttttcagctacgcctccccgcactcgccatggtcgtcgtgagcccacgcccgatcccgtcagtgagaatgaggaatcaagcggagatgagtatgttcaaagtgatgatgacaatatggaaaatgttgagggtgatgagatggaaataagtgatgatggtgatgacaatgagagtgtaaatggtgaagatgatgaggcaagtgatgatgggagtcctctcgattcctccatccaatttgtgtttaatttgaggaatgctcaacaatacactatcctccgtcatcatgatcaattccggaggcctaacgattgtaatgatccaagatttcatacacggttccaaaagtccgtgtatgcacaagtgtatgccaacaaagccttcgccgaacacaagtggatttcttggaggcacattggtgagacaccggagtttgagaatttgcaagagatgttccggaccgttgggattgatagaattgtcaccatgaagcaaccttttgatgaagatctcatccggcaattctatgccaccgtatgggtgtccggcgattgtgatgcaatgaagtggatgtcggggaccctccgatgctctatcaactgccgtgaattcaaggagttcttgcacattcgcttcaacaacggggatgaccttcatgatgagcacacccacaaccccttccccattgatcacttttctcagttttatgaagaagggggaaggcacacatatggcaaggtggcgggtttgagggctctcccaagtgtgatcaacagcatagtaagggccaccatcctcccaagatgcggcaacaatgatgacatacgcggagttgcttggcatgttattgatgccattatggatggtcgtcggtttgatgttatcaaccttatgatgaaggagattgtcatctcaaaggggactcttggacaaggaatctattatgctccatacataatgaggttgattcaaagcaagttgggacaaattggtcacaatttaaaaaaacataaggagtacaagcctcgtctccaactctcctcccctagagctcctcgtgtgcgccaaccaacattcgatcaaggtgcaagctcaagtgcagccccccctcctcctcaagggtatgatccaagtgcttttttccatccacaatatgcctactttggaatgcaacccaatgacttcttcaacccggtccttggggctattaataccctaagtgaaagcattcaacgcttatccactgggcatgaagcattgcatgaggatgttcgtggcttgcgcaccgatgttggcaacttgaatacttcggtgggaagattgcatactagggtgggtgtattggattctcgagtcccgccttagagagtacccaagcttttgtctatcatcgccgccgtgatgcttctcatccttccacttcggcgcgtcctccttctcctccacaagagtgaagacctttttggtgcttgatgccaaaagggggagaatagtgtgttctatgttttgtgggttgggactagtagtagtgaggttagtcacctcatttttaataggttaaggaggattgggctatatttggtatgggtatgggctattactctatattgtgtgttcctttttcgttttgttgttctctatgtcatttggacccttcgtggtcttgtaatagcctatatttatttgtgagccctttatgtggtcttaatgtgaacttgtgctatgatggatgattggtgtgacattgatatatttgtgaccatcttatgctcatggatgaatatttcttgaagttcacattgagatattgctcttgtgtttgtgatatgttgaaatgtgaaattgaattgtgcattggctccatatttgctatttgtgattgttatgcatatgtttagggggagcttttgcttgtcaatacaacatatgtccatgtgctctatgtttgattatatatatttgtggtgtttgtcatcaattaccaaaaagggggagattgaagcatctaggcccccggtgttaattttggtaattaatgacaagcactaattgtggactaaccgttgtctttgagctatacattttaagttaggtccacgtcatatgtgcgcatggataattatcgatggattaaaattgacggcgcaaagcaaagggaaagaagacggtaaaactagcgctttaatttagaattgatcgaggtgtagggcgatcaaatttgctagtttaattttagtttcgccgtactattaagaggggtaatgacctagcaaagagatgattttaattgccacattaggtcattgcattttcatttgtgctctctttttcgttacacacacattcactaattcactgggtttgtcctgaccaggggcggtcacaccggccacatagtggctgtctgaccggcgtgccctggccggtcagaccggctacatagtggcggtctgaccggcaccactttcccggtcagaccggccccctggaggccgagatgatgctgctcgggatggccgatacagagccgacggagccgtagtcggtcagaccgagccgatggcggtctgaccgagccgaggccagtctgaccgagccgaggccggtctgaacggccgccccatgtcggtctgaccggccaggccgatggggccctctgacagggctacaacggctagttttctagccgttgcagagtagcacggtctgaccggccacatacctccggtcagaccggcagagcacaaagttgggggatttcacccccaacggctagttttggtgggtgggagtataaatactcccccaccagcagcaagggggctctcttggcacccaattcaattgcatacactccttgcacctctctcacactcacttgagctttgtgttcatccatctagtgtgttagagggttgtttagccaagagtcaagtgcatttgcttccattgtagagctagtgtggcacttgatcatctccacaccgggtcattgcttgttactcttggaggttgccgcttcctagacggcttgtggaggagttgcccggtgacctctccgagaagattgtggaggaggcccggcgccggtttgtgagtggtttggagttcaccaccttcggagtgaaggaagaactaccccgagtgatcgaggcttgggtagtcctctccgtgggccggctcccgccttgcccaccccttgacgaagggggcgtgcggtggcttcgtggttgagcggtggagttgggctcacctcaacggggagtaggaaaccggcgagtttccgaacctcggtgaaaaatctcttgtctcattgtctcatttgattgtcgcatttacatttgtgcaatttacatttctagagacacacttgagatcatatcaccctaggattgcaaaacattgacataggagcgtgatttacttttctagagatataattgagccactatcaccctaggtttgctaaacataacttagttgcttagttagagttcactctcaccaagcctagcaacttaggttagatttgattaggtgttatttagttttaaatcgcctattcaccccccctctagtcgatatctcgatcctacaggcatacggctaataaaccatggagaaaatgaatggtgtaaaccaaagcaatttattttcataatgattcaaagttaacactagtaaaaaataagctatgataaaaaaaacatctcaaatcaattttaaaccgttaggtatcttagctaaggtggataaggctacgttcatttggaatggttgggatatttttctccatgcaggcaaaacaatgcgaattattagcacatgactaattaagtttaacttaaaaaattagaaattaaattaattaatatgtttttctctagcaatttttcaatttttatagagaaatgtagtatcgtttaacagtttggaaagcgtggtagagaacgagagagtaaaagctaaaaaaaatagagaaacaaattcttaaagcaagtttaatagtatgctataaacttatatatggaggagaggaaaaaaaagagaaaagtattagctatcatgtaagagcccgctctttacatggttaatataatgtactagctatcatgtgaagaagcgatagaaaaagaaaattaaagataaccttataactcatatatttatataatttagttttaatattaaacttatatctagttgattctaaactactcctttcgtttcatgttataagttgtttgattttcttcctagtaaaaaattatcaagtttgatcaaattagtttcaaactttatcaaacttaaaattgaatatatttcgataatatatttgttttgtgttaaaagtattattatgagttggtttggtttgtggcctaaataggccttaccaaatttttgtcagtgccaaattttggtaagttttggcatgactaattttggtaaggcaaagttgtgtttggattgaagtcaaaatagcctaaattcactattgaaatggcctattttcttaggcatgccaaaatttggcttcaaactaaatagacactaaacactattgaaattgccaaatattggtaagcctaatttaggcctaaaaccaaaccagtcctatattttctataaattttataaaatttaaaagaagtttaattaaaaaaagttaaaacaacttgtattatgaaatgaaggaaatactactacctccgttttagtttacaagacgttttgattttgatcaaagtcaaactataatatttataataccaaattagtttcattaaatcaataattaaatatatttttataataaatttgttttgggttgaaaatattttttttctataaatttagttaaacttgaagcagtttaatttttgatcaaaattaaaacgtcgtacaactgaaacagatagcgtgtcttaacagtttgacgagaatggttgatatgccctgaaatggtcctccaagtgagtgacagtaattccacgctcgcacgcacgcatgggcggtggtgctggtggtgtgtattcactgtttaggcctcagaccgaccatccgaaatccccgattgtaattaaagcatgccacgctagcacctccatatgatccatctaccccccttcataaat

SEQ ID NO: 1644 - DNA, 5169 bp, Oryza sativa
ctgcagcccgcctgactggcccggtgacccctgggctcacctgacggagtttgccggcgctgtcgacgaggaagtcaaatgcgccgaaggagatttgggtggtggcggggaaagtggtggtgctggcgatctcaaacccagtgggtgccatctccgccttgaaaacgatcaagcgccccctacctggcgcgccaactgtcgatttctatgatcggcaatatattttatggggtgcgctagatcaaggagagatggtgacgcaggtgtttatcctggttcaggccctcgagatgaggtaataccctacgtccagtgtgctttttctctgtattcgtggaaagaaaatgaatcgagaagcccaaaggatttcggaaggacgccggcctctttatacaatctcaggccgccggcgccaatcaagaccccgtatcctcacaatttggatacttgccttctattacatgattggggatctgttactataatctccctgtcttgcccaactatgttagacttactatatcggtcatgggcccttggcccacccccgaagcctaacttgggccgctaccgtgaggtacccgggtgccgtatcccccacagccggtcccactaacttccatctaaactaggggtaaacgcctctttcggttcaaaaaagtgtgggcaaaaaaacgaaaaccctaaaaagtaggggtgtaatcaatattggacatgaaagtgagaaaaaaacgaaattgtccagttatggttgaaaaaaagagcaagggcatttgtccatccgtgttaaattatttttgtatctacacgaaaactaaatgttactcgtaggcattattacttgtatcgtgcattggatggctagctaggagtatgtcttttttggaagtaatgtgggaatttccggttaatgtggaaatttttaactattttacctctttagatttattcttcatgcagcagagccccaattagtacaagtataaatattgtgaaaattctaaataatattcctctacagtatcaaatttaatgtataaaaaggactgaaaatgtacctttattcacagtggtctttttagatttctttgtgtgtaaataaaattaagggatttattaagtgtcactctaaagttaaatcccgtatttgtggaatattgccttgattttgttctaagagcgggcgttaatttgtagaagagaagattatgaaaacttgatatgctgggtgatttgatcaaatacaattccttattcagtgctttccctaaaaaaaatataattccttattttagatgaaaaattaaggaacctcttatgccaattacacggaggggccatctaaggttagagatgatacgtaggccatgagggtaaagcctcaacctttcatctagagggaggttataggataacatttttctttatgggagaaatggaagcgttaaggaacatcaggaaatatgtgaaagatgtttcttgatttcaaagtgatatcagaagagaaacaacacaaagggactatatacaacttcttttagataatgagaacttttattgaagtcggtcaattacatcaaagtatacaattatcatgagaacactgcgagtcggatatatatatatatatataactatatcccattagagagctctccaatccagcaaggcgtatacacgaacgaccgattaacgccttcgacgtgccaatggtcgaaaaaattggggcgtaacctacctaagtcttgagccttagaggtacccaagtgataagccaatcctctgcttgatccttcatctagaaagataacttctttgtaaggatgaaatccaaggattaaaaaaccaccatgagaagacctttgaaccctatcctccaagtcgagaacatcatcgctgtcagagtcccactcgaacttcctttccgctacttctgcattgtaattagtgtcatctccatcataaacatcacggcggctgtagtgtaaagtccatggtccgacactttcctcatcgtagttccagcgctgaaacgagagttgaatttccttgtcgtatttcagttcccacttcatctgctcacatgattcgttgagaatccaaacccgtagatggcaccgatcaagtactgcgaggtacacgcccttctccgatcttgcaagaaaaggatccacatatccatcttgcgctataggcaatttaattacttgatacttacttttcgacggagaaattctgcaaaatggatcaaagtagtaagcaaaaacagctgagaacatattaccctaaatataaatgatattattatatataataaacaaaaatgattaaggactagttagttctagtacctcataacaaaattagcttccctatgtacgtagagtgcacgtttccaatagaccgcgttgtactgttccaatagcggttgcgatctcatatccgcgatcgtcccggcggcctcaccttcacgtacaaaggatctctcttcccattgccctgtgctcgacgagaacacactcaagaagcaaggagagggtggccactctgattcctcaacctttggcctcagttttttggacacaaattcctcgggagtaacactcgggatcaggaacacctcgtagtgcggagatacggtgggatcgaacacgaggtactcgtcatgatagaagctcctcgtgatcccgggccgaggtggcgggggttcagggaaggccgcccaccgctgcgtggccgggttgaccacgtagcggctgcggagcaggagcaggccgttgcagtgatccacgacggtgctcctggcggcggagggggtgaagtcctcgaacttgccggagatcgccgcggcagggggccgcgcggacgggcggcggaggaagaaggacgtcaacacctcgtggaagttgatgaagatgccccccagtgacagcgggaggaggtccgcgcgcagcaagcggtggccgtcgacgacggcccgccagggcttgcagacgcagcggcacgcggctagtgggcgcggcgcgaggcggcggaggatgtcggcgagcacgtcgtcgggtagtaggtctaccatgttcagtttcggatcctccggctgctccatctctctctgctttaatttgctgttaactcaatgctcggccgtgtactgctcttgggttgatttatggaggatgggtggcatccgatccgattccgtcttggttaacaactcgagtccgagtccgagtcggagtcggagtcggagtcggaacgagcacgcgcggcgcggcggcaggttcaagctccgatagagtaacgcatgcatcgaattctttcgtctgtaacactagaattttgtgtccaagttctgcacaagtttcagtcatgcattggaatgggaatcaataatttgatagtaggagatgagagcagcataattagctacctacggtgtgcagccatggatccttttgggtgcaggattcttcaactgagaactacatccaagatgcaaaattactgtgtgtgatagatatcgttttgagcggcatctccgcatctgaactctgaaatttaattattcagtatgactcaattttttgtagagatattcgtgaaagcaaaagaaggctttctttactgattagattactagtgttatgaatcctcgataatgtagtagagatcacacatgaatcactgctttcttcaaattggttcgcgtggatctgtaccggtcttagaggctgtttggttggttgccacactttagccatgccatagttttttagcaatgtatttggttcgctgccgcaattgtgttatgccacactttcttaacattggaacccacatgtcatgctctcaaatttagagctaaatatgccacacttatggccaactatttctaaaccacatttgtgccaccatgccacaactaacataaacttagttatggcaaggttagacatcaaccaaacattcccttacttcagatgaaaaaaacctctatagccgacgagaaaggcactagaagtagcaggcaaacaaggaggcggcgggtggcaacctgtagcgcgaggaggcttaccacaccgtcgcaggcgctccctagggcacttgagataaaagggattttccgcattcgaatttgctaatctggctcacgcaattcacgcagctccggtacagtgattcaatgtttcagtgattgattttttctgtttagttctcaaaataaaaatttttacccggtcatattgaatgtttaaacacatacatggagtattaaaagtagaaaaacaaacaaacatatttcgctaggaaattacgagacgaatcttttaaacctaattacgccatgatttgacaatgtggtgctacagtaaatatttgctaatgacgaattaattaggcttaataatttcgtctcgcagtttcctggtagaatctgtaatttattttgttattatacaagatttaatactttgaatgtgtgtctgtatatcctatgtgatacttaaaaaaaaattaggaactaaaccggtcttaatgtttcacccgacatttgatcactcgattatttttaaggaaatcggacgtctgatttggagctctatcctctctcgaggaggctatgggctccgcgctggtcactaagatcgtggaccattccgaataacctccacacccggtcgcgattctcaacggtttgtacctggacactatctatctacattttattttgtaaataaaactcagtaattactattgattcaatttaaatgttattaattattataaataaaaaatggggcattgaagcatctaggcccccggtgttaattttggtaattaatgacaagcactaattgtggactaaccgttgtctttgagctatacattttaagttaggtccacgtcatatgtgcgcatggatgattatcgatggattaaaattgacggcgcaaagcaaagggaaagaagacggtaaaactaacgctttaatttagaattgatcgaggtgtagggcgatcaaatttgctagtttaattttagtttcgctgtactattaagaggggtaatgacctagcaaagagatgattttaattgccacattaggtcattgcattttcatttgtgctctctttttcgttacacacacattcactaattcactgggtt

SEQ ID NO: 1645 - DNA, 2996 bp, Oryza sativa
cccggcaccggtttgtgagtggtttggagttcaccaccttcggagtgaaggaagaactaccccgagtgatcgaggcttgggtagtcctctccgtgggccggctcccgccttgcccaccccttgacgaagggggcgtgcggtggcttcgtggttgagcggtggagttgggctcgcctcaacggggagtaggaaaccggcgagtttccgaacctcggtgaaaaatctcttgtctcattgtctcatttgattgtcgcatttacatttgtgcaatttacatttctagagacacacttgagatcatatcaccctaggattgcaaaacattgacataggagcgtgatttactttcctagagatataattgagccactatcaccctaggtttgcaaaacataacttagttgcttagttagagttcaccctcaccaagcctagcaacttaggttagatttaattaggtgttatttagttttaaatcgcctattcaaccccccctctagtcgacatctcgatcctacaagtggtatcagagcttggtctctcttgattgggtttcaccgcctagagagaagatgtcgaacgaggtgaaccatgtagggaaggctcccatgtttaatggcacaaactattccacttggaaaattaaaatgtctactcacctcaaagctatgagcttccatatttggagtattgtggatgtaggctttgccatcaccggcacacccttgacggagattgatcaccgcaacctccaaccaatgcccaagccatgaatgccttgttcaactctttgagctaagaggagttcgatagagtgagcaaccttgagaccgcatatgagatttggaacaagttggcggagatccatgagggtccaagtgagtacaaggatgccaagcttcatttcctcaagatccaatataagacattctccatgttgcctcatgagagtgtgaatgacatgtatgggaagctcaatgtcattgtgaatgatctcaaggggcttggggcaaactacaccgatcttgaggttgcccaaaagatgcttagagccctaccggagaagtatgagacccttgtcaccatgctcatcaactccgacatgtcaagaatgacacccgcaagcctcttggggaagatcaacaccaatgacatgtacaagctgaagaagaaggagatggaggaagcctcaccctccaagaagtgcattgctctccaagccgaagttgaagacaagagcaagagcaaggtgaatgaagtcaatgaggacttggaggaagagatggtccttcttgctagaaggttcaatgatctcttaggaaggagaaaggagagaggaaggggctccaactccaataggagaagaaatagaagacccaacaagactctctccaacttgaggtgttttgagtgtggtgagaagggacactttgcttccaagtgcccttccaaggatgatgatggagacaagtcatccaagaagaagagtggaggctacaagctcatgaagaagcttaagaaggaagggaagaagattgaggctttcatcggggaatgggactcaaatgaggagagctccgcctcatccgggtccgaggaagaaggtggtgatgatgcaagctccaagaagaagaagatggccgttgttgccatcaagaaggctccatcactcttcgctccactttgtctcatggcaaagggctcctctaaggtaacatctcttagtgatagtgagagtgatgatgattgtgatgatgtttcctatgatgagcttgtgagtatgtttgaggagctccatgcttatagtgagaaggagattgtcaagttcaaggccctaaagaaggatcatgcttctttgaaggtcttgtatgaggagctaaagacctctcatgagagactcaccatttctcatgagaagtttaaggaagctcatgacaacctcctttccactactcaacatggagctcacattaatgttggcatatcttgtgatttgcttgatgatagtgctacttgccatattgctcatgttgcatcatctagcatttctacctcttgtgatgatcttatggatatgcctagcccttgctctagttctagctcttgtgtttctatttgtgatgcctcacttgctgttgagaacaatgagcttaaggagcaagtggctaagctcaacaagagtttggagagatgcttcaagggtaagaacactcttgacaagattttgagtgagcaacggtgcatccttaacaaggagggacttggattcattccaaagaagggtaagaaaccttctcaccatgccactcgttttgtcaagagaaatggtaagtattgctccaagtgtcgtgaggttgggcatttggtgagtgattgccccggaggtaagcctcctaagacatgcatgtttgattctcattatatgcttacaaaggctcatgatggtagcattgttgctagatatgtgggtttccctatactcggtggtaaaaacaatgccatttggatgcccaaagctttggtctctaacctccaaggacccaaacaagtttgggtacctaaaagaacttgatcttcttttgtaggtgaactaccggaccgatgggagccattgggtgcttgatagtggatgcactcaacacatgatcggtgatagggctatgttcaccacatttgaagtaggagggaatgaacaagagaaagtgacatttggagacaatagcaaaggaaaggtaattgggttaggtaaaattgctatctctaatgatttgtcaattgaaaatgtctctcttattaaatctctaaatttcaatttgctttcggttgctcaaatttgtgatcttggcttgtcatgtgccttcttcccacaagaagtcattgtttctagccttcttgacaagtcttgtgtgttcaaaggttttagatatggaaatctttatttggttgatttcaattctagtgaagcaaatttgaaaacttgtttagttgtaaaaact

SEQ ID NO: 1646 - DNA, 1390 bp, Oryza sativa
ctgcaccccgagctcttgcatatggatttgtttggcccaacaacctataagagcattggtggtaatagtcattgccttgtgattgttgatgattattctcgctatacttaggtgttctttttgcatgataagtctattgttgccgagcttttcaaaaagtttgcaaaaagggcccaaaatgaatttagttgcactcttgtgaaaattagaagtgacaatggttccgaatttaagaataccaatatcgaggactattgtgatgatcttggtatcaaacacgaactttccgctacctactcacctcaacaaaatgctgtagtggaaaggaaaaatcgtacattgattgagatggcaaggactatgctagatgaatatggtgtttccgattccttttgggcggaagccataaacaccgcttgccatgcaactaataggctttatttgcatcgtctcttgaaaaagacttcctatgagctaattgttgggaggaagccaaatgtcgcctattttcgagtttttggttgcaagtgttatatttaccgaaagggtgttagactaaccaaatttgaaagttggtgtgataaagggtttcttctaagttatgcctcaaatagcaaggcataccgggtctacaacaagaacaaatgtattgtggaagaaaccgccaatgttcaatttgatgagactaatggctcccaagaggggcacgagaatttggatgatgtaggtgatgaaggcttgatgagagctatgaagaacatttctattggagatgtcaagcctattgaagtggaagacaagccatccacctccactcaagatgagccatctacttccgcctcgccaagtcaagctcaagttgaagtggaggaggagaaggcacaagatccacctatgcctccaagaatacacaccgctctttccaaggatcacccaattgaccaagtgttgggtgacattagtaagggcgttcaaactcgatctcgtgtcgcttcgatttgtgaacattactcgtttgtttcttgtcttgagccaaaacatgtagatgaagctcattgtgatccggattggatgaatgctatgcatgaagagctcaacaactttgcaagaaacaaggtgtggactttggttgaaagacctagagaccacaatgtcatagggacaaagtggatctttaggaacaaacaagatgagaacggattggtggtgagaaacaaggcaaggttggtggcgcaacgtttcacacaagttgaaggtttggactttggtgaaacttttgcccccgtggcaagacttgaggctattcgcatccttcttgcttttgcatcatgctttgatataaaactatttcaaatggatgtgaaaagtgcttttctaaatggtgaaattg

SEQ ID NO: 1647 - DNA, 752 bp, Oryza sativa
ttagtagcctaagtttccgtacatgcagtttgtaggtggctcggtctctcaaggttcagaattgcaaatagaggtggcagaatttctatggcaagatgttgaggtaagtagtaaccatcaaaggacatagtttccttctacattttcctttatatggcaaactaactttatttgtttaagttttagctcgatggaagcctaatcgttttagctgacaatattatgggttcaaccaacaagaataatactggagaacaaataatgcactatggtgccaggtaaaatcctttccttgcactcttatctgtaaactcttgtcctgtacagacgaaactcaaaactccatggttgttgaaaggtgtgggagatgcaaactgcaaagtgttaaaattgtgaataaagggatcaactggattctgccaataatgtctactggaagcatgatgtcgagagatcagaatctgtgaagatcattcttcatgaaaatgccgaatttgaggcaaaagatgttgtccttaaggtgcaattatttataaacactttgaattccattatctaaaaaataaacactttgaatagtgtccccgctttttcttttttcttactattgaatatccttgttctaccagggtaaccatatctttgaagttcccactggtcatagaatgcgcattgttcaagatggaccaggtttgttaaatacatgtcctattttcctcttatctttggtgccattttgcgaaaaggctacc

SEQ ID NO: 1648 - DNA, 15265 bp, Oryza sativa
attcccccaaaaatgtctccttttgtttccatcactgttatatgttatgagcaacattcaagttacaaacttccattgtttcaacctttgaggtatgcttgaatcaacttatttagtaaaacgtcattctttacagcaccttttgtaaacatgttacaacttgtgccttgggcttttacaggacctatttattttgaaacagcatgtcaatgatctggagcattggtgatcaaagttgagcttggctgctgcagtgggtatggaaactaaaagtcaggagaaagcaaattgagggatttgaggtactgtgcatgcttgttgataaagttggaatattcaacactgcctggatagttaagattgacagtaacagtttattgcattgtgttggtgacttggtggtaaattacctggatatgaatagcacaacagttacagatagtcagaatttgaactattatccccttttgactgctttagaataatgatgctgacgtgaatttgacaaagaaatgttgtgtcaaacctgtatgcgttgcatgaactggagttgtcggatgcaaatggctattagctaatatttttaatttacatatacctagaatgactaaaccgtactatactgctatggtttaattggatgatgtgcaatgcctacagaataaaacaagtatccacttgatggattagttcgctctctaccacacaaaaggagttaggattggagatccatttgcatttattatgtacatctagcaaaataatactatgcacatccagcaaaataatactatgcatttgtctaaacctgttacctacatgttctatctgagctttttattcatgtatgaccacacgctcggtttgaacaaggctggaaaaagtgtttactctatgctaccctaagaattaaggaaacatcattttcattagaattgagttcctatttaaacttttggttgtttttctccagaatggggtggggaagggaggagggatgcataattaatactagcgtattaaacaaacacctgtgtccagataccaaggtactagtcatcactgatgtagtcagctagattcactctgccttgccagatccaggaggcaagcttcttgtccctcgagcatttcatttcattcatgtgtagatgactaagggctgacctaatttgattcctttattgtggatcagcagaagtttatatcaacttggcgtggctgatgcgttcattattcagcggtgctgcaggatggtggacatgtctcccagcacttcagctctctctctcggtaagtgttctggtgcacctggtctctctcatatacccctcttggggatgtgcagtttttatacactactagtacagtaaatcattatcctgaaactggggttgccctggtctttgccacaacatgtattcatatgcttcaaattgctgcaagcattgtgtaatgcaagttgtggctacaaaattgggtgattgactaaacaaagaagtagcaaaccataaatgctgggatctaatgtcgagtcgacggccccggttttggttcatcagaatcacccttacacgacgtgcaattatatactggtacaacaaaatggtggatctatagtttggactgaacattagtcatcttgtccagtattgtattataccttggcaacttactctagattccaaaagaaaaaaacattttcacgttgagaattacattatatatttgtgaattgtgagaatattctagagaagatgagatataccctattggggccgtatgatgggagacgaatagacgattggggtggagttggggcaagactttttttttgagaaccagttggggcaagacttgagagggtgggtatatcttgtccatgttttttgcacatcttttcccacttttcaccttgtttctagggatgtcatatgtatatacgagaaaattgcatcttgcaccaggtctatccgcatattttggatgacaatgtaattagtatttgaaaacaaaaattcgtaaagcaaactcttcggtcagtgtaccaacgtacgtacagtgtataccgttgtcagttaaaaacttcaagataagtgctcgggggtaagccaagaataatccaaaaaacacttcaaacggttttgacttaaaaaaaggttctggtctacaacagctttcttggtcagaaagcgtgccaactggccaccatctatagtacatcgtctcaaatctagaaattgttttctagcatgaaactagttgaatttgccgcaaaaattgtttgaaataaaattgtatctcttctgcaactatatttctatttctaaattatatttatgttatgtatagacgagctgatgtcaaatgtagtcttcgccaacaaatggtttgtcaccgtattttttttgtcacagagtaaggctgtctttagttccttaaaaaagttggaagtttgaaaaaaaaaagttgaaagtttatgtgtgtaggaaagttttaagggtagttggggataaactaaacacggcagtagtcgggtggctaagcggtgcctacctcgcctagcacctctttttagaaacacacacatattatgtagtcaacagtactctcctgtttcaaaaaatgtatgtctagattattttataggatttgagtttttttagacaaagggagtacttcctccgtacctgtaaaggaagtcgttttgtacagcgacacgatctccaaaacacaactttgacttcttgtttctataaaaatatttattgaaaagttatatatgtatacttttatgaaagtatttttcaagataaatctattcatataatttttacattttcaaacttaacaactttagagttattcatgatttatattcctaaggtttggcttaaacattatcctaaacgactttctttacgagtacgaaggaagtatatatcattataatttgcacctacttgttataaacgtaaatattgtgatttgccactcgaatgacggttctagttgcatttttgcaattttctagtggtagttttgcaataacgattcaaagtagtggtaaatttacaattgcccctaatttttagaccttgattggcttctttcaggctgctcaagtgattggattttctctaacagccctttcccatatggagctgattttttgggatagtttggaatatcccattattcaaacatgcccttagtatctcctgttcgtgcaggtagtacatcgtatctgctccgtgagttggtttcgtgcgcatcaattacactgtactccttctatagtacaagaggagattcttttttcagaacaagctcaaattctaatacaagtaggatgatacccaaggtccgatacaaggagggtggcgatactgctgaatctacatgtctattctccacaaagaagccaatcaaggtttggacttaggaatctcctcaactaccatcattaaaaagacaaagtgggcataaagaacacgaaaaactcaagtcatgtatcaggcctatttattttcttttccttcaggacaaaccaagacatgccacatctatgaagagaagaaaagttttaagtaaaaactaaggaagaaaaggcgcatcacgccacacacaaccatatcccgtgggccatcttgcgagaaatggctgcctccggcgttgactcggaggctttggctaccctgctcccctcgccatttcattggccgtttcgtggccatccatcacgaactcgatcgattcccctcttcgagcccgtaccaattattagctagtttaactcgtacgatgaatcacgccgaaacacaatataaatggtggagtcggctcgctgtcaaacgcgcgggagctcgcgccacttgtaatttttcgcgtctcctctcgtccggcacagcacaggagcgcggacttgaagacctcaagtagcgattcgtccgtgcggcgcggcgcaagaagggaagggaaggggactaggggagggcgagatggcggcggcgggggcgtactcggcgagcctaccggcggtgccggactggctgaacaagggggacaacgcgtggcagctgacggcgtcgacgctggtggggatccagtcgatgcccgggctggtggtgctgtacggcagcatcgtgaagaagaagtgggcggtgaactcggcgttcatggcgctctacgcctacgcgtcgtcgctgctggtgtgggtgctggtcggcttccgcatggcgttcggcgaccagctgctgccgttctggggcaaggccggcgtggcgctgacccagagctacctcgtcggccgcgccacgctgccggccaccgcgcacggcgccatcccgcgcaccgagcccttctacccggaggccacgctggtgctcttccagttcgagttcgccgccatcacgctcgtcctcctcgccggctccgtcctcggccgcatgaacatcaaggcctggatggccttcaccccgctctggctcctcctctcctacaccgtcggcgccttcagcctctggggcggcggcttcctctaccgctggggcgtcatcgactactccggcggctacgtcatccacctctcctccggcatcgccggcttcaccgccgcctactgggtacgttcgtctctcgttttttttcctttctttctttctttcctctcctcagttggatcacatgtcattgtcggaatcatgacgtcacccaccccggtttttttgatccggcgacttcactgttccggcgtctcgggtttgtccaacgcgtgttaggtactggtactaccctgtaccatttgtttgacccatcaatctggattcctcatgagaatgcatcacactccatgacaaaattctcaatagaatttagtcgtagtacgtacaatgtctagaccagaaattacttcatgttcaaagtcaccatgggggaaaattagtagaaaataatggaaatcaatgcatcagctggttgtagatttttttttctaccctttgggaagtcacatgatacgtagcatcacattgccgctgataggctgatagctgcacccaataaaagggttaaaacaccttttaccacatggaatgtgtgaacattggaccgcgtccatttgcttcggctggtgggcggcggtgatggctgccgctgcctgccgtgcccggaagacttcgttggcgcgcgctccattttttttccttccttttgttcttgcggttgctgttgtgtttggggtcgcaatcgtgtgtgccactttgcagcagcaagcagatacacgcgagcttattaagaaatggtgtggttccacaccaacaccaggaaattcagtctagcgtcgtggccggaaatttattatctcgatcgttgtcgtcgatagtaactgcacgctaaaatatctggtgatattgcttctcgtgttatccaacttgtgtggctaatggtttgggtcaagaatagagaaaacggcaagttaaaaatgggcttattttctgagtttcttttgtgatcggactatctgaattttgcaaggactgtactagctaggcacgtttggaatgaaaatctttttccgtaataatccgaaaataaactttttctacaaagtcgaatagaatcatcttgcgcgttgaattttgcaaggactgtactagttagtagctttttcatgcacggatggttttttacattaaaaattttgacaccttgagttacctaccaaattttataatttaaaaatgtatgactcctaatatattttcaaagatgctaaaaccaccctttaaccaatcgtccattaagacttctaatgcgtgtggctggcaggtggggccaaggctgaagagcgaccgtgagcggttctcaccgaacaacatcctgctgatgatcgcgggcggcgggctgctgtggatggggtgggccgggttcaacggcggcgcgccgtacgccgccaacatcgcggcgtcggtcgccgtgctcaacaccaacgtctgcgccgccaccagcctcctcatgtggacctgcctcgacgtcatcttcttccgcaagccgtccgtcatcggcgccgtgcagggcatgatgaccggcctcgtctgcatcacccccggcgcaggtaccatcacgaaaaatctccactccttataatttctgaatttatcatgtcccatttagaacacggagattttatatatttgaaatgataaaatattaatagtggtaatgttcgttatttcacatcatccctaatcccctattactgatatttgagccttacaatcaacgagtctatcaacgagtcttcttccattttattattggctctttctaaatttcgaaataacctaattgattgtgaatatgttattaattgacttagtaagctataaaagggagaatagctaatatggtccttaatctttcatattgtacaaacaagccctttaattttgtcatatgtgttatatagtccttggtctcaccaaaatcgtcacatagatatgccatgtcacattcctatgcaaaatctatatgatttgtccaatttaccttacatatatcataggaaaataaaaaacaaaaggtaaaatataagagcaaaaatatacctcaaaagggtgaaaaaaaggataactattttttcctatagttatgtctaattcacccttatatttatttttctacgatatacacgtaagggtaaattggacaattcatcatagattttgcataaatgatgacatggcatatccatataatgattttggtggatccaagaactattctagaccttatgacaaagtttaaggatttctttagaccatttaaaaggttagggactaaactgatcctacagaaaaactttagggactaaagtagctattctcccgctataaaaactcttctttcttttttgcaacgcacggttcctggctagtcttggaatgattctacatttatatccgaggcaaataaaaagaagtttcgtatgtttttaggtccggtttgcaattgttgtcctatgctgcgttgtgcttgtgcttatttttccaaatgtcagcagtaatttgttggttttattcacaattgtgtaagcagggctggtgcagacctgggcggccgtggtaatgggcatcttcgccggcagcgtgccgtggttcaccatgatgatcctgcacaagaagtcagcgctgctgatgaaggtggacgacacgctcgccgtgttccacacccacgccgtggcggggctcctcggcggcatcctcacgggcctcctggccaccccggagctcttctccctcgagtccacggtgccgggactccgcggcgcgttctacggcggcggtatcaagcagatcggcaagcagctcggcggcgccgcgttcgtgatcgcgtggaacctcgtggtcaccacggccatcctcctcggcatcggcctgttcatcccgctgcggatgcccgacgagcagctcatgatcggcgacgacgcggcgcacggcgaggaggcctacgcgctgtggggcgacggcgagaagttcgacgcgacgcggcacgacctgtcgaggggcggcggaggcggcgacagggacggccccgccggcgagcgcctctccgccctaggcgccaggggcgtcaccatccagctctaggcgcgccacgccacgccacgccgcgccgcgccgcggcctggcctctaattacacgcgcgtttgtactgtttttggacgtgttattgtttaggagtagtgaagtgaaccaacgattgactgcaaggtgaagggtgagaacgcgagagaccagaccactatagtctatagtacatatggatgctgtaatgatgttgatccgagttcgtttttccaacacgataaaggccgacatgcctattaaattttccaatctatcaggtcgtgcttgctacgtgcaaccgctctctgatcaactagtacgcgacgtgatccaatgttgcaataacgtagtagatgcatgctgtattcaataacaccaccacccaagtgacttgttttttattggataaaagttcaacaagtttgtgatatggtacaagctctgcaaagaacagtctcacaggggtgtcaaaatgcagagagctcgcgtcctagaagacggccatgagctcggcttctcccagcacatgcccctcgatggcgtccatcagcttgtccttggtcacctgcaagcaatcaagaatcaaccaccgttaaactaatccttaaaacagcacatgtaatcgcaacaagatatggttcgatcggatcaaaacttgccttgttgccgaggtgcacctcgtcgtcgagggcgtagagcttgaactggatgcggtggccgcgggagggagggatggggccgcgccagccgggctgcttccagtcgttgacgccctcctggatgccgccgtactcgcgggcggcggcgccctccttgccggagaagccctcggggaggcccttgacggagggcgggatgttggcgacgacccagtgcgtccacggcacgatggggccgtccgggtccggggcgtcgacgtcgtgcaccaccagcgccagcgaccgcgtcccgtcgggcaccccgtaccactccaccggcggcgagatgtccttcttcgcgccctgcccctccagcgtgtagtgccgcggcagccgcccctcgtgcgccgcgatcgggtgcgacaccagcctcaggctctcctgcgccatcgcggcacaaacaaactctgttcttgcttgacgaacgcttcgtgtgttcgcttcgcgctcgtggcgtctcttggttgatgcgagaatggatgacgatgacgacgagtgccgcggcgtgcgcggcgcgggggtttaataaacggaggaggagcgattcgagcagcgtggcgcggcggacgtacgcgtggcgagggtggtggagggggtacgtggaggtcggcgccggagtcgtgtcgcgttttccagagacgggggaaaaaggcgcgttggggtcggccgcgtgacgaagtttcgagaggcttacaggtttatcctttaaggcccgtttggttggagggatttttacctgtttagaaggatgaggttattacctgttttgtttggttgggagacatgaaaattttgatgggatggagatggggaattgaggaaggaactctttccttttcaataccttggtaggggtggtaatttggagggaattcctcatttactttacctaaacaaatctcagctaaccgttttcattaatgacctaatctctaactaaactctatgtcaatttccaccacctctgccaaacaagatattgggaataaaaatcaaattcccatcttaatctcaccatcaatttcctcatgtaagctcccaatccccttcacttaagttgccaaacaaaccgtaagcacttgttaatcggcgcagtgtttttctcttctctgtccgtctaggtgtctcccgctcccccgcgcgcgttttagcgcggaggaaagagagagagagtttggatttctcgtaggaactgggcctgaattattatccatacaaggcctgagcccgttccgattatattatagatgggtttaggccgtgacaaaattccttcagctggaaaaaggccgtgaggaaggcctgtcactgtaaggaagtccgttcggattgccttaaggagtaagtccacttggagcccctcaaatatccggtgcaatatagctccctcgaagatatcggtatcacgtacggatgagggatacgaattagatttgacctatatttaagggagttaaaatggacttattccttttccttatgccgattatatacgggcccaatcatcaatacttctaaagctagatggggacccagccagctgattggtccacttgtcccataagtttttcgacacgtgtcgcttctagactctcaaatcgatcgcttcagtaggcaccggctgggccgtggatccgcgcatacttgtgagctaggccacgccggcctaaccagctcctgggctgaaaaaaaatataaacaaacaagagagctgcccctgctcctaaaaaaaagtgagagaaaataaaatatgaaaaacatatccaaggaggatgtaatgataaattacatcagtttactgctaattaatactaccatgaactagcctatactgtgagcttgggtatttcttaatcctctaaaaacgttacattcaatagtaacttaagaaactgcacatgttttaaagtagcgagcgtgccgattctggatatacaggaacaatatggttctctgcccatttcaaaataatttatgttgaattactatgaaaattttgtattacaaattgatcattcaatgaaaaaagtggtagctgaaagtcatttccccagaaaataataatgaatctaattcaattcaatttttctaagctgaattgagtttttcaatttttctaagccacacactacagtactgactatccacgatttaacccgtgataaatactaagttgttttttcctttgacgaccaatatctaccaacttctattctaataccattttcattgatttattcaatatttaactatctagctagcacaagttcataaacgcaacaactattttagtcaccagcttttacgaatccagaagaacgaaactataataaatcaattctactatgaaacaagcaggttataaaatagtaggcgtgcctatcggcacgctaattttctagtttagtttaaattcacaacttggatatcaggtcattaatggatttgggtcgtgattttagtcttaatttcagcctacaaatacggatgggtgaaaatttcggacactaactgaaccaagttgggctcggcctggttaagactacgcactaaaggaggtcttttttctcgtcgcgtcctttacgtggaaatccaggccagttggccattccttgactcgtaccgaactaccgatgagaatttttttactctatgagaaactgaacaaaaagctactaaattggcttattttttacgtataccaatgagaattttgagtaccatttgcatttttttaaatgaattgaatgaagaagaactaaaagaagaaaagttttctcaacacgaggagagatcccttcaaaattgcattattgtaaagggattttaagtatttatctagggctaagctctgggcctctagctaggttgcattccggctaattggcgcctctacttctctgcactacactgtaacactatctgcacgccacaggatcaaacggtgattctatcatgagctaattagtagattaactgtactcccttataacttaagacgagaaatgatacattctaacactatgaatctgaacatacacatatatttgtagtattataatatatcacatctctctctgtttttttttgagtagatcgctgcttgcatccatccatgcatatatcattcgatggtcacttcagctttgacaacagtgccactctatattcagaacaccgctaaacgatgcagtcatgcaacagggcagggcctcgctgctttcggcggttcggcccccgccgcaatacatttccttgagctgataacagcgacggatcaatgaaccgtacatgcgagccatcatccacctgaccggaccaccagtcctccaccacaaacctcctcccttcctcgaggctcgatcgatgaaccgcacgcgatccgtcgtcagatcgatgcaacaccatcgtgcaacagtggtcacaggaaactgatcagctcgctttagcatcagactcgcactcgcccagccacaattagcccaagtaggctacctctttttcgcgagatgttatagtacatttaccgtgcatgcatctgctcatcgtttctgctggacagctgaatgtgggcacagggcaccgcacgtcgatcttgcgtctactctccatcatcagctgcgagaaaatcgatcgatccaaagcaagctagataggagtagcaattatatgatccatcgtccatccaatcgcatgacagcgtactccgttttctaacttgcactgcgtgaaaaaagttgtcacttcactgatatgatcatgctttggctaagtagccaacaactactggcaagtacgagaacagcgagtagaatgtagccatgacggaaaccgtacgatggggatgagtgggatcaggggactcatagtgcgatgctggtgaagaagatatggcgcttttgcagtttttgtccggttggatcgcctactttttccgcccacagcttagctagttcgcactttgccatatgcaacctgggcagggcaacgccatatgcgccttttacccgagcaccgtgcctaatctaagcttaagctcagcccaatcgtaatgtgcactaggtgcaacaaggcaacaacaactgcactgcactagacgtaagcccaagaaaggaagaaagctaggaattggtgatagaacgcacggaaagtagcctggacagccttcgtctccttcctccaggatatttttcagaaatgatgatagataatggaagtgatcagacacatggctttctggctttaattcagtcattgccccttttttggagctgctagctaagctagctagctatctgtttctctgctttaatttgtgtgtagcggtcattgttaggcatgcaataatctattagcaaaaggagcatgatagtagattagattgggaattaaagggtggtgtgtgtgatatatatgtatgcagctagtgatatgtgtgatcgaccactcaaagcccggccggggtccatggtgtgcagcgagcttttcgatcgggccacagccttatctcgatcaatcgagctcaaagcgatctgtgatttgtgaccgctaccgttgctgcctttgatctcgcgcgccgcgcgcgcgcggtcgagccgagagatcagggtggatttcacgtaacgtcgcacgccatgtgtcttgttggcttcctgtctcggtggctagaggcgtagtgcacatcagaacagaggcgccaaactgaacagttactactattggtattttctccttttctttatctttcgagatagagaaaaaaacaagtgctggtattctttttagcggtctagatattttgttttcatgttttctgtttgatttacattattcagtttactatcgtagattttctacttgaatataggaacaattcaattaggtatttttaaaaaaaaaataaaaacaagtggtctgaacaaacaaaagaagaaagtttttttttgagaaaacatattttttttgaagagcagaataaataatccattttaatgattcggtaaataatatgaaaagattacttaggttattgctgcatgagcattgcttcaagttatttcaagtgttaactactgaaaattgcttgaaacaagacggtatgaaggcgaaaaaggccgcactacttttgtcttgctcgattttattatcatccggttcaacttccggttgtaaataaaatggtcatgttaactcatgtgtctacttgtaccagcagctgttaggcgcatagcatgaagacatgtacactccaatcatacaaacctgcgtggaaagtcgtctaccggatgcaataatatatggagcagtacacaccaacttatgtacacaaacaatttgaatatttacatgacttttgtggctcaaaaccaacgccctccattgcgacttgcgagtcaataatattcccacaagccagcaaacgtgccagcgacatcgctcggtcaacagctagcgaccaaatctttccaagtcgacgcgaaaacgagcgcgcggagccagtcggccgagcccgaaaacgaccggatcgctccgaagcttagccagccggccgagccggatgcatccgttcgagcggctgtcttcgttgctgcccctttcccggaaaacggagcggttcactagtacttaaaaaaaacatatcgtttactccctctgggttgataatacttatcgttttggataagggcacggtctctaaaaaataattttgaccattattttttattataacatgtataaaagtgttaacaaatatatgattttattaaagtactttttaagactaatctatacatgttattatcatgtttgaaagataaatattttaaaaataattcataatcaaagattctaaaatttgacttcactcttgtctaaaacgacaagtattattagcccggagaaaatagtagtttgaaaagcgtgagcgcgaaaaacgagagcggggagttggtaaccaggggaaatgaactaggatggactcctccgttttcatattgtaggtctttttaacttgtttttttaaacatttttagttcgagtaagattatgaaaaaaattagtaacatcagttttattaaaaatatattttcataatatgtctatttatactagaaatattgatatatttttccataattttagaaaaaaaattaaaaatgtttaactaggaaaaaaatgacttataatacaaaacagaggggtatttgagaagacggggaaatgagaaaatttaaaagatgtgagaaatgaggtgtgccattggtgtatgattaattaaatattaactattttaaatttaaaacaaaaattaatataattttaaaaacaacttttctgtatgtttctttttcttttcttttttttttgaaaaaacgaaccttttagcgtttaggtgttcgactgcgcgcgcggcagccacgcctttaccaaccttaaaagggacggccctgccgccttgaatttgttaaaacccacacgacacccatcgcgtttcgcactccggtacaccacggtgctcgcgctcgcgtcgctcgccacaccacacgccaccaccgcgcgggcacgcgcgccacttgcgcgcagacgcgccgaagcttcttcgtctcgatcgcgccgcgcgcgatcgagcgcgacgtacggctagctgccgccaccaccaccaccacacgccggccggaggactggtcaatctcccatgtgcctccaccgcatatagcgtggagagctagctagctctactactgtggctgtggcctgtgggagcagggagcaatggccgcgcaggagagcgccgcggggacgacgaaccaggtgatgcggtggcggtacggggacgtcgacgacagcaacttcgcggtgcacggccgcgccgtgtacctgctggtcgggctgctcgtcgccgtcgtggtgttcgtcgccctctgcctctacctccg

SEQ ID NO: 1649 - DNA, 2780 bp, Oryza sativa
ttctagtttctgcaattggcccccttttctatgaacaatttatcaaacctatctaacaagctcaaagaaacagcacaaaacagcagaatagcttgttctctaaagaaacagcagaatggcatttattcactcgtgagcattaaatactgtgctagtacttgtttttgttttaaggtccaaatgactgcctttttaaagtaaaaacagtcaggagctaaatgtaagcatttgctgccaatatatctgctaaaaattatatctgcacaaacaggaatatgggggcatcaaggggcccaggtaaaaagaactctgcctttctcgattgtgccttgacagttgcagttataggcaagtagctaagctattcgtataggtaagaaagccacagcacgtttaccattttggaataggcaggtagttaatatgttcgtttagagaagaaagcctcagagtcatgttttcatatttgctgttacacaattacagtaactcagtaacataccttctgccttgtgatatcccaaaatggacctaaagcaggatgaagaaatataagaaaaggtggtccagaacgcaagtattcacagttgtctttgacctgaaaataggaaagaataaatttaaataagccattagaaaggtagcccacgcacaatataagtggtcagtgctcactaagtttgtcttttgaccagacaactgaaaaaatcataggaagttggaatccaattggcatctaatatttttcatatacagattttatgttccagcagaacatgtcaccaggaacttttactccctagcacatactccctccatcccaaaatataagcatttttagcatagtgacaagtcaaacatttttaactttgaccattaataacaaaaaaataaaaaagatcaatcatataaaattaatgttattagatatatcattaaacaaactatcataatataaactctttttatttaaaacatcttacttctatagatattgttagtcaaagtaacatcttggagaccgtgtcagtgtcctaaaatgcttatattttcggacgaagggagtaagtgactaagttgcaatgttgccattaattgactaaacatcaatatggccccacctcaagatgaggcaatggtccaggaatccaggtatttgaaactacatagtatttttttttaatcttttcattattctatctaacagcagaagtaaatcagataaccatatctatcaaacaaatttgagtctgttgatttgttctcatgtgaatgtaatattgtttcggtttaatgaaatcaatacgaaatagaaagttgatacttccaaatatagatattcatgttaccttactggatgacattttaatgaaccaagttttaaagtttcaaaatatcaactaaaatactattgctaggtagaactacaaccagcgttaaccaaccataacaccataggttctgtgttactgaagtaggctagcattacatggaatgtcgattcatgtcacatgtaaaaaaataaaattaagaaaaaaaaacaaaagtaaatctaccttgggaacctttacattgcagctagaaaggagatcataagcattacgcataatgtcaaggagtgaaccctctggagtctgtaaagcaagcaaagtgtatacttgtgacatgcaagtttgagaaactttcagttgctcaagttattatggcaagttttagaagaaatagcgaattgcacaaccaagtgcatgccagaaagatctagaatcaatgtcatcatgctatgcacacttttgagtcccaaaataaattaatgaatcaacagttttatgttcaaaacgggctcaattacagggtagaaaagaaatattattataacaataataaaaggcatgatatagagttctagacaggcaaacattcatgcaagcaccagcatataactttgaacgcttggcactttggcagtacatattgctaagtgctgatccaccaaatgaaattctcagtaactgtcatgacaataatcagatttcacaatcaatataaacaagcaattttgtcatttctgattcacttatttggatctgcagtgtggtcaaccagacatcaggcaaattgtgaaaatataccaacttggggatttttggtggtggtggggtgtgtgtggtggtggtggggaggttacagaagtatactaccaggcttcgcccagtagttgattttataaattaagaaaacatgagaatccaataattggattgagaagcatggtatactaacctggtgcaatgacttatcttctgatttcagcttccttttagctgacgaagtgacttttttcctttcgttgtacacaatgaatgtgtctagctcacctgtgacatgagattgctaaacatcaagtatcccaacaaacaaaggggaaagggtagtttgatggatacacgatgaatatcacatatgaaaacaatgacatactttctattcctttactgcacctgtagttatatgtgttcataaaattatcgctatgttttgcatcgtgcattctaacctgcctccagcagcactgtaagagaggaaaagttaatcattaaagaagagagatactataatactatcgtagtaaattgaataaactaaacaagacttggtaatatctttaatgtgcctccaatgcccaccttacacaagaaatggagtaatcaatactacgcaaaatgagagaaatatattctacatcattgaacccatcgctcagaagcatatctacactgaaa

SEQ ID NO: 1650 - DNA, 5653 bp, Oryza sativa
gggactaaagatctcctctctttagtcccggttgataacaccaaccgggactaaagatctttagtcccgggtatttgaaccgggactaaagatagcgatctttagttccgaattggtagtaccgatttgaaaatcgggactaaaaagcacttctccaccagtgcaatttttttcccaaaaacattatatcgaatctttggacatatgcatgaagtattaaatatagatttagaaaaacttaattgcatagttagggaagaaatcgcgagacgaatcttgagtctaattagtctatgattagccataagtgctacagtaacccacatgtgctaatgatggattaattaggcttaaaagattcgtttcacggtttctagacgagttatgaaattagttttttcatttatgtctaaaaacccgttttgatctccgatcaaacattcgatgcgacatcaaaaattttgttttcgcaaactaaatagtcccgcgaaggattacggccggagtgatctcatggctactagtaattgactacccgtctacccgcccgctctctgcacaaatcaccgcacgtttttgctgcggcgccacctggtacgttttcaatccgtggccccccgttgccattcagcgcgcgacacgcccccatctccgtgcgaaaaggcggaccggccccacgccaccgcttgcaaaactggccggcagtggcacacccaagttttgactcctcgacgtacgtcggcgcaacatctgttggactccaaccaccttttttgcgccgcgagatggcgagagaggcgcagcctcgaacgaagattctaacgaagattctcgcggaggcggggattctgtgttctcgatacggagtccacggaattcggttcccttttgctgcttggtttggtccctgattcctttcgccggcaggatgtccaatgcgcgcgggttgcttcctgcagatcccattgccacccgcacgcactgttcaccactcatacacatgtgatttggacgcatacccatggaacgaccaatatgtggttaactaatgctagaaccaaatctaacagtagcataattcaaatcacgtacgattgctcgctgttttgaaaggtatttggggtgttttaaactttgtaattgacgaatctgtgggtcgcaactaggcttgcggagtgctttttattttcctcataaaggcaggcatgcgcacctgatagccaacagcgagaggaatactgtatgagatcgtttggctcctttcccttttgctactacttgcatatcaaattattaagcactactccattcatctaccagagttacccatattacttttgtcatcaagactaaggagaaattaaatcatcttagatagtacaaaatcaaggagtgaatgtaaacatacaaccgataagtatttagatgactcattaggttctcatcaaatatttaatttatttcttcatttaagtcttaaatgcataaaaactacaaataaaaacaacttgtttggaaaaatttaaatgtgaaatatgtctaatttttatggatagagcgagtacgaatcttgcatcaaagcctcaagaatatcccgttatactagtaagagcgaatcaaccaaccaaccaaacccttggacagttggactgtttgtttaacattgtgcggggagcgagcgacgacagcgacgtccttctcactttctcacactgcaccgtacgtcaatttaaatttagtactgccgcgactaatcactgaggtaaacccggggacgcaaataatcaatctgcgttacggcgtatgtaataccgaatgggaaactgaagccttgtttggatccaaaaaattttgataaaaacgtaacatcaaatgtgtttgacacatgcaagaggcactaaatgtgaaaaaaaaatccaattacacagtttacatgtaaattgtgagacgaatcttttgagcctaattacgccatgatttaacaatgtgatgctacaataaacatttactaataacgaattaattaggcttaataaaatcgtctcgtaatttataagtggaatctgtaatttattttgttattagtctatatttaatacttcaaatacgtgtccgtatacttaaaaactttacaataaaaaagtaaacacaccctcagaattcagggtagtacgacgcactggtgcactccgcagtcaagcatgcgaataacgttgcaaaggtatagcaaaaagcacttatgtgcaagcaagcgcgagtaaaacatggtgcctcaaagacggtggaaaaacggtcggcaagcacgtacgagagccgagagcggtcacgggtggacggcagtacagcacggtgcacatcgctgttacacggagagaacccaaggcggcagagcaacggccgcctggataaacaggctaggcaggctagccacgggccgcgcgcgcagtattacgcagtaacgcagtaaacccaggagcttcatcggcacacgttactgcgtaatactacagtaatacagtatgatgagaaactgacaattcactaattcagggtagtactacgcactagtgccctacgccgtcaagcatgcgattaaccgttgcaaaggtcgtggacggcagtacgtacgcaacgcggtgcacatcgctgctaaacggagagcgcccgaggcggtggagcaacgggcgggccgcgccggcagagatctgacctaagggggagcgcggacgagcagagcttagagcaagtataatagttagttataagcttactataaatttagaaggaggaaagaggtagtgaaaaaaaaagaatgttggctctcatacaagagctagcttatcacaagctccaatataaatgcattaaatgtgtaagtgagagataaagagaaaaagaaaattgtagctaaccttacagctaatttattatatatattggctttaagatggtctaatagtaggaagtgagctctattattatccttgctcgagcaagtttaatagtgcagcccgttgccggctctaatttcacacacatcatctgcatgtgatataagagccaataaatacaataagcgttggcccatctgctataaaacaaatttactttattatatgtagggcccactatttcagccttttactctcagcaagcctgtgttacccacgtgcatgtaggtttggagtttatgccaagcctgcgataaaactagcgcccgttttacactctctctacttttccatcttccacgtatgatatagccagcgtatgggtaactattgtacctgctcttacctagctaggcgttacagcgtagccggcgacggcgcccgcgtccaggtgcactgcgcgcagttgcacatgcgcgggcgggtgggcgcgcggcggtgcccggtgcacgaggtggcgaaaaccaggggagccgagacgagccagggggcggggatccaaccgcgcaacaagtccgggcccggcttgtcggctggactgaatgaccgatcacactgtgtgggaaaacataggcttaattcactatcagcaattcagcagatggattattgaattactagcacgataatgaattggagcgtatacgcgtcgtgtagcggtgtagggtgttcgagttgattgttaaattaaaaaaaaaacggcgcctttttcccagttgatcaagaacgcctattctctactcggatacaaaatgaaatctttacgtagagtagcataatactcctccaaaaaggtatatgcatacgtatataccagactaagagtcatgaggtctagttagaacttagaggcgtgttgatcaaatgtggcactaataaaatgctaaattaacttcacatcgacaacaagggtttaatttcgcattgcttatttagattgagagtagtatgtccacatcgcatatcttcttagtacgatttgttaatgaaaagatggacgatgattcgatgaatgcattctagactggaggttccagttccagaccggttgacggtatacaccaatgcatgacgcacaaggtttggccagccaaaccacggcgaatggagcacgcgaaacaagtcagccgattcccagtttgccacccatctcaccagactacaattctgcaagcagcaacggcgccaaagacggttttttctccttcctctatataagccccacaatgcccaccaccagcttgtcacaactcacagccaaaacctcgtacattttcagctagccacaagcaacacaagtccaagacaagtcaagcgttcgcaccaagtcaaaccgcgcctcactgccaccttcgtttgcgcaccatggagcttgccctggttggcaacccttcgaatggcgtggcgaagccgtcgtgcaactccgtcggctcgctgcccgtcgtcagctccaacgccgtcatcaacccgccggtgaccagcgcggcgggcgccacgctcggcaggcacctcgcgaggcgcctcgtgcagatcggcgccaccgacgtgttcgccgtccccggggacttcaacctcaccctgctcgactacctcatcgccgagcccgggctcaagctcatcggctgctgcaatgagctcaacgccgggtacgcggccgacggctacgcccgcgcccgcggcgtcggcgcctgcgccgtcacgttcaccgtcggtggcctcagcgtgctcaacgctatcgccggcgcctacagcgagaacctccccgtgatctgcatcgtcggcgggcccaactccaacgactacggcaccaaccgcatcctgcaccacaccatcggcctcccggacttctcacaggagctccgctgcttccagaccatcacctgctaccaggtccgcgcaatgagccctgcctctcgtctttcttttgcactggatgtctggatgaatttcgtcgaacacctgagctgaacagagtgcgttgcacgcatgcaggccgtcattaacaacctcgacgacgcgcacgagcagatcgacaccgccatcgcgacggcgctaagggagagcaagcccgtctacatcagcgtgggctgcaacctggcaggcctctcccacccaacgttcagtcgcgagccagtgccactattcatctcgccaaggtagtgaactaaacatacatgatacatgcacgcatctcgggttaaaatcttcttttctccatagtttctcaattttgacatatgtcctatcaggctgagcaacaaggcgaacttggagtacgccgtcgaagccgcggcggacttcctgaacaaggcggtgaagccggtgatggtcggtgggccaaagatccgggtggccaaggcgaagaaggcgttcgccggcatcgcggagtcgagcgggtacccgttcgcggtgatgccgtccgcaaagggcctcgtgccggagcaccacccgcggttcatcggcacgtactggggcgccgtgagcaccaccttctgcgccgagatcgtcgagtccgccgacgcctacctcttcgccggcccaatcttcaacgactacagctccgtcggctactccctgctgctgaagcgggagaaggccgtcatcgtgcagcctgaccgcgtggtggtcggcaacggcccggcgttcggctgcatcctcatgacggagttcctcgacgcgctcgccaagcgcctcgaccgcaa

SEQ ID NO: 1651 - DNA, 11041 bp, Oryza sativa
acggctccaccccgggcttgatcccccctcatggggagccacgtgggttgggaggctgcccgaccccaagctgggatggggcagccgccgcaataccccgggctcgaccccccccggggagagccacgtgggtttgagggcggcctcctccctctagctgggaggggatagccaccgctccaccccgggcttgatcccccctcgcggggagccacgtgggtttgagggcggcctcctccctctagacgtgatacccccgggcccatatcaccgacagatataattttggatacaaataagaacattttattgctaaccatacatctgtcgatatttttttcttttaaaaatttattaaatgtaaatacatgtagttaccaaagtgtagttacgttataacttgtatataactacaatataatttgtttacataatgataaaatgtgacctttaattcagcagaagctacaatatcttattacatagttctctattgagaactaagtataatggtgtctaagaagggaatatgtcctatatacacaagcttcccgtgcccattaactagcaaatgtcatgaaaaaaactacaaaaaaatagacatttactcataatagtattacacatatatacaaagtctcatattcaaattcaatatattttatctgtaacaaaaaaaagttaaaaatctgacattttaaaggtaaaactctgtcagaattttttcttttttgttacggctaaatataatacatttgaatgtaagatctcacacgtaggtgtaatactattggaagtatgtgtccaattttctctagaattttctgtgatatttgctaattggtgtgcacgagagcttgtgcgcataggatatattcccatctaataaaggatggagggatgacacttttcatgtggttttgagtctttagttttgcttcggtattcatgcgtatggatggggggattctatcctatgtcctcggctcgcggaagtagtgtattaccgcggcgtttctgaaagttactccctccgttcaaaatataaacaattataggattatcagaaattatacataatataaaatataagtgtttttctaggcattgattctagcaaatgtaaatatatacattttccgtcaatgaaaagcttgggaaggaaacgtaagcaattcaaaattcaaaagttggccactgaacagaactagaagagaatatttttcatctaccttatttttcttaaaaacttagaaaagcttatattttgtaatagaggagaaaatatgatttatattgtatagttaaatgcaagttactctgtacaatgtaattacattataattatatttatttgacaaatgtttagatagtcgatctgtttgggtcacaagtgtaggaactaatggtctgaatgcgggcctctttcaatcggaaaagagaataattacactatactatgtgtttttagtttctttgagtttaattggccctatgctgatttattcgtgtaaaggtacatcttataggttgggctgaaacaattcttcctagtcaacttagcccgagcttgaaaccttgaattctagtagtagaccaaaggccgatcttctaagagaccgacgcaactggtctgcatcatttagcccattatggcctgctacctcgcatttctaacaaaggaataagttcaccggaggtccctcaacttaacaacgagatttttttaagatcccttaaccataaaaccagaaatatgtaccctaacctcacacaatccgtgcactcaaagctctatagcagtatatatgggtggtttcgctgacgtggcatcctagtcagcaaaaaaaaaatttaaaaaaagtggggcccacatgtcagttgcacatctcttttttttcttctcttttcttctccttctcttctcttctcttctcttctccagtgaggaaggccgacggtgggcagagcggtgatgagcgagcgcgaatgtggccagcgggcctaggaggctacgggcggagcggcagctctgcggctgcggcggtcactacaagataattgagctatcgccaccaatttattacaacgaaaaataattcatggcaatatattgtactatcgcaatgatattttttttcgtggcaaataactacattttgttgcaacgatttacaattgttgttttattcaatatttttgttgcaataggaaatgagctatcgccaaaaaaaacattactattgcaaaaaaaacatgttctatcaccacacatttaatttttattgcaatttgcatagtacatggtacttttcactattttctattaccatgatcaacaaattcattgcaataaaaaaattatcatctcataatttaacttattcttttcatatgaacacgaattaggacaaaatttatatgaaatttataactctcgatgagatctacaacttaaatttttcatttgaaatcttttaaatactcaaattcatgattcaaatctcagttaggcagtctcaaatggaattatatgcatttttaaataaaattgatacgtaggtgagttggtcatggagagcgcgcgtgagggagagatcttgggttcgaatcccggccatgacaagatatcaaaagaaaatagttaggttgataaattaatactgaaacatttaatttggtacgtagaactaatgccacacatggagtggtggcaatagttatttattgcaacgatgttaagtgttacaatatatattttttgccacatccattttatggcaatatcaaattttattacaactaaataaaaatcgttgcaataacttattaccacgctatttattaccacggctagcaacgatttaaagattgtggcaacgattttagcattggtgctacgctatttctattgccataattttagtattgatgttacgatttttttcgtgacgataaattatttttctagtagtgggtggcggcgaccggctgagcgcgctgagtgacggcgtgatcggccacatcttgtcgttcctcccggcgaatgaggcggcgcgcgcggcggtgttctcgccgcggtggcaccacacgttcaccgccgtccacaccgtctacctcgtggagcccgacgcccccgttgtcgaccacgacgagcttgccaagtacagcccagggtggggccctccgtccgaccccaacccgccaccgccgctgttcaccagcgccatcagcgccggcctcctcgcccgccaccgccgcctcgccgccgtctccttacgcgcgctccgcatctccatggtcggactccgacgacgacaagaagtatcccatggccgtttacaggcggcagttcgagccacagaagtacagcgtgctgagggggctattcacctgcgcggtgctgcgctcactgtcgctcgggtccgtccggctcactctgcccgcggccatcgccctcgcggtcctcgagacgctgctcctggccgacgtcaccgaccacgagaggaacatgcagcgcctcatctccggctgcccgcgcctcgccgacctgacgctcgaggcctgctatgagatggccccgctctccgtggcagggctggctctccggtgctgccatggcctagacaccgtcgtcctcgacgacatgtcgtcgccgtcggagctactacaagccttcgagctacaagccacggctctccggtaactcatacaaaccatgcggtccatgcaaccgacgctctggccgagggtgaagccggtgatgccctcgtcgtcctcgttgcggtagcccgagcggtagcttcggtcgttggctgtctagttggtccaccacgtttgttggtgacgagcgcggtggagcagccggtgcggaagtagcagttgaggaggtgcttgctctggtccttgccgttgtaccagccgacgatgacgatttcgacgctgacgacaacggcgtaggagagagaaaattgaagaaaaaaaatgtgcagctgtcatgtgggccccacttacttttttctctgactaggatgccacgtcagcgaaaccacccatatatactgccatagaaccttgagtatacggtttgtataagtttaggcgtatgcatttatggttttgtgattaagggacctcaaaaaatatcactgttaagttaagggactttcggtgaacttattcctctaaccaatgcagaaaccacggcccacaaccgccactgtcaactggtcatcctgcaattccccctggccccatatgttgttgcaatccatttactatatactccctccattcctaaatatttaacaccgttgatttttttaaacatgtttgaccgttcgtcttattcaaaaaatttaagtaattattaattcttttcctatcatttgattcattgttaaatatacttttatgtatacatatagttttatatatttcacaaaattttttgaataagacgaatggtcaaatatgtttaaaaaagtcaatggtgtcaaatatttagtgacggagggagtaccaaaaacagtagatttttttaataatgaaaagaaatatatctcccatcctatgtaactagaacacaattgataaattctaaagtacaattgataaattctgactgaaataaaggatatgaggttatggggtaaaccttcatatccttctaaatgataacaagctaaactgatggaaagaattcacaaattttctataatgaaattccatagggaactacgcaacccaaaatggaataaatgatctttggctatcaactacaagattagagcaatattgtgaatagtatcatgcttctcttgtgataccattatagatcaagattgggaagatgcttcttctcggacgtccggacccaaggagaaaaatgagacgggctgcctctgacatacatatgcagctacccaagcctatattaatatctccaatatgacacgcatgcacctttaacgatatttaaaacgatttttttcataaattacttattcaatctacaatccgatcataccattatattcgttataattaaatctttacaacaagatatcgcatgattatattctgaaaaaagataatcatatgtttcaatccattatcactttttgtttcatacgtgatagggatatgtttcaatatgtgtctttagcgtgtttcacaaaattcgcaaaacaaccgatcactattctccctctccacctcatacatgcacatgcatgcatgtatgcattttagcgagtttcaaaacgatttttcttctaaactaattacccaatctacgatccgataacactgttgtattcgtcgtagttaatctttacaagatatcgcatgattatatttggatgaaagaaaaacatatggttcaatccattaacactagttgtttcacatgtgatagcgatatttccaacgtgtatctttatcatgtttcataaaatttttaaatgttttagctactgatttttttttcaccatgtataacttgatgtttcacgcgttgatcaactgaaacatttgactgactgaatttttttgggcatcgggcgtccgatgggaagtttcgcaatgcccgtgatcgagcgtctgatgcacaatgtttcaatcagaatttgactatgttgcacattttaaattttatgttgccatggatcttttaaaaatgttgcacatggcattattttgatgttccaataaatattttttttgatgtttcactagcttatttacgaatgttgcacgtggtattattggatgtttcagtaagtattttctaatgtttcactaattcatttataaatgttgcacatgttgtttgggatgttttgatgaatattttctaatgtttcaatacttataagttgttgtttcacgtacaatataaagatgtttcaattagtaatataattatatttataaattttatcataaatataatcaaatgagatattattgtaaagatttaattgtaacgaacataatggtgaaattggatggtaaaacggataagtaatttagaaggaaaaatagtttaaattttattggtagagaagaaggagagagaaattgcatgtaaatatgcaggagggtagcttataggcttgcagattccctgtgatagttttgtttgcacggactgcattcgattttctgctaaatatcggacgtctgatctgtagcagcctcttcaagattggagctggtaagacatgaaaaaaatctgtattggaaatactaaatctgactaacagaaaacactcgctccaacacaaagtcatttctaatcatttttttatggaaacaactatagatgcaacttgtatttgaagtgtttatctagatggtttttttcatattaatctacacttttattagatataaattgactaaactttgaacaaattttagtcacctgaatctaaggtatcatcttcaacctctgaatagagagggaagctaggcagaaaagaggcggtgggtagtagctcatcacgacaacaactatgcaaatcacattcttctaactagcattggtggctctttgtctttttcggcattgtgatgacaactatcaatttctggaaccgaagttagaacggaggtgagtaggggccaatgaggatggaaatagatggaaggctgagatagtagtggaccaatggcagatggacaagcgcttgattagttatgtactaactattatatacttaaaacaaaatattgtttgattttttaaatggaaaatctatacataaagcttttatacgaaacacacattgtttagtacctcaaaaatgtgccaaaaaaacctaaccgagggaaccgttaagctaaacagttaaatcaaatgagacattcgattattgagtggattatcaatttaattataggaataagttaataattttaaaaaataaatttaacaaataacttaaaataagtgatataaagtctaaaaaataaagttcaagaattttagaaaatgtatttttcaaagtgtaaagcaaatgagttgaagaaacaagagggcctttggcccagccggcatgcttgagtttggacctttgcctacttgttctttggacttgctgctcgtttgcttctaaccatgactacactatgggcctatttgtggaagttttagattctgataagcagctgtttggtagccagcttctgagaatctggaaaagctctgaaacccagcttttccagcttctgacttcttagttcatttttcagaatctgtaactacagattctcagaaactgtggactatttggggcagcttctagtagaagcagtttttgggaaaagttgcagctgggacaagctcccccaaacagggcctacatatacatttagcctgcatcaaacggatcatagtgcgccaatttgtggtttttgctacaaaacaactaaaaaaacgtgatagggctgttgagcaccataaaaaaaggataattagctataggatgcaaacattattttattattccctctctaaatggagagaaacatttaaggaaaagaattttgcagccgttgtgcacgccgtcggcatcaccaccaaattctagggctttgaagagggaatcggagaagagagagtggcttgggtttcgttcaaattaaacaagacccagtcaggatacaagcatatgaccccacaagggtaaaattttcttttccatgtggttctcgctatatttggattaaaaataatataataatggcgaccagttttttcagtgtctaacagtcgtatcatgtttttcatgggtgtcatataacaaattttaccaattaaatttcatcatttatggatgcacccattcttaggtctagcttccgctggtaaaaacaatattttaatagcaaaatttctaagtatatttaacagaactttccatctcttttaggttggagtccaaccaaacgattttagataaaaaaaaaaagtgagcgaagcaagctgaactaatctaaacaataaattagaggagtggagtggggtttgtaattctatagctatacagctttatttcagactacactttaaaagttagatttattaattgaagccctgaaactcaaaattgtgacgttgcgagcaagtttgagatacttgagcgtattgctctattttaaaggttatccttcatgcaatcatgctacccctcttatcggcagaaagcgaccggaaaacgatggacaaagggcttttctttgacggcacttgaccataaaaatacataatactttcaaaggaataccttgtgtgtgtagcttactccaggacaacctaattaatctaggagccggacgaatattaatggtcggcatgacgatattatcgagctgcaaaatagaaacaacagtaatttgtcacattgttggaaaaagcatcaactgaagttctgattggctagatcagtaagatatgaatattaaagtgcacagtcggtattcaaacttgtccgtcggtgctatgtactctgaaaatatataagaatttattaaagtgtgttattctgatttatgttgctatgacccctataggatcatttgtagcttaatgtggcatgccacatgaacaatgagatggcatcatcaccaactctataatgactaccttgaaaacaaaatttctttcctccacttccttttcttcttccatctcttttttcttccttttatcttttaagtggtgatgctacatcaacatctatgtaatatgccacgtagaatccaaaaaggtttgtagatttgtgataatttaggatcattataccatattttgatagtatgagaacttagatgacatatatgaacaagttcaataactaccatacattttactttgaataatacttatacatttgagttgtcacggtataacataaataccatgatatattattgtaaaggacttccctcatctacaaatataagtattccaaatgttcaaaatttatctatctctattattataaaaaattgaagatgtttttaccggtattttggtacgtcatccatgtataagtcggttattaagttcgtttgcttttggaaatacatattcgtatttgagtcggtttttaagatcgttcacttttggtaatacagaaggaatcatataagaaatatgtttaaaaaaactcacatgctaacttgagacgatcggactcctaactgcatctcatggttttctatctctactattataaaaattgaagatgtttttactggtattttggtacgtcatccgtgtataagtcggttattaagtttgttttcttttggaaatacatattcgtatttgagtcggtttttaagatcgttcacttttggtaatacagaaggaatcatataagaaatatgtttaaaaaaactcgcatgctaacttgagacgatcggactcctaactgcagctcatgattttctaaaaatatatatatccaaaagaactcccacagtaaattttatcttaactatacaataaaagaataataagattaaaatagacttgactcgttgcaacgtacgggctttttttctagtaatcataaacattcaaaaatactacgtgtcacgtcaaatttctttctgtattactccaaccgtacttccagagtatcttattttgtgatagctagggcgtctactatgagtgtgtttgaaggaagatgaaagaagacgattgataaaataggcaaattgaggtaagacaccagcgtatgattaattgagtattaattattttaaacttaaaaagtagattagtataatttttaaaagcaacttttctatagattttttttcatgaaacacggtgtttagctaaacagttcggaaagcatgtgcttggaaaacgacgagttttcttccatcgaactctccttaaaataacttaaatacttatatttagggataaagagagtaaaaggtaactagaaattcaaaatgtaaatgttaaagtaaggtcctagctatcatagctctgaatcgatgattcttggagaattatatgtctagactagattcacaaatccatatatctgaatctacgattatgttaatattatttgggaaaattatactatttctattttaaataaaaatataaattttaaatcactataattttgaacactacaatttaacatatgaacttttaatccgtgtgttttttttaaaaaaagaaacagtgcatctaggatccgaagctacgtcaaagtaaacataagattactacaagtaagagaaaactatacattcgaatgtaaacgtctccgtgctacaagcctgcaacttcaggcagaagaagctgggtaaggcctgatttggtttgagttttaaattaggcttaccaatatttagtaatttcaatagtgtttagtgtctatttagtttaaagcctaattttagcaaaataggtcatttcaatagtgaatttaagctattttggcttcaatgcaaatatctttgccttaccaaaattagtcatgccaaaacttgtcaaaatttggcaaatttggcattgataaaatttggtaagacctatttaggccacaaaccaaaccaaccctaagttttctccactgtgggcgacgccgatgagaagataaccgatacggtagtggcaggctggcctggtttagttcaccaacactggtggagaaaccatctttggtcggtcgaccaaattccacaatagtcccggttgcaataaaaaccgggactaaagatctttagtcccggttaaaaatctttagtcccggttaaaaaaattttgatctttagtcccggttggtaacaccaaccgggactaaagatcattttttagtcccggttcaaataagttggtgggtacagttaagctccaattatctactaaagatttatttttagtcccggttgtttataccaaccgggaccaaaataaactgccgatatctcctcggtatcccctcccctttttttctctccttcgttaaaaaccaccaagacttagtctcgg

SEQ ID NO: 1652 - DNA, 3420 bp, Oryza sativa
ttcagcagttcagctacacccaaacagcatactgttacagaagaaaagaacaaaaaagcagcttggagctatacatgaccatggcagatcagcaggtgtactcctagtacattgttagagcaagttcaatattatagacaactactggctccaattcatctatagccaatctaatagctcattcatacaatagttacatactacactattaatacctagtctcacctgtcatagacacactgcatcttggagtgctacagctggctacaaatctgtagtccgctgctattctctctcctgatttatctccttaaaatatgtttgcagctggcttatagcttgctattgtacctgctcttactagtactactcctggtactatagtattgacaccattctgtttgcagtcttgcactcaagtggtttgatgctgatgctgccagtattcaaccacagaccaaactgacataggaatataggattccctgcagtttggcacagtggaattcagactttgttttcaggtctcgtttggttgtttgcaatccagtgtacagtattactactatggccattatggccatgtttaggttgtgtaccaaaaatttcttgtagtataagaacacacatttaaagtattaaacgtagactaataataaaacaaattacagattttgcctgtaaattgcgagacgaatttattaagcctgattaatccgtcattagtaaatgtttactgtaacattacattgtcaaatcatgacgtaattaggctcaaaagattcgtctcgcaatttacatgcaaactacgtagttgttttttttcacatttaatgctttatgtatgtgtctaaacatttgatgtgacaaattttttaaaagtttgaagggaactaaatactgtctaatactgtctatgtgggttttcaagctgaaacaaaagggtaaattagggaaaccgtggaaaatcatgtgccatagtacttcttttgatttttctttgtgtgactaatcgtgtcgaacttgacaattaacttccatctaccactgttctcatgtggaaagcaaaataaatcacgagaagaaagagacttgcctaccttttccttttctttttccctttggtggctttattccgaaaatgtataaatataaatatgaaagttaagatcaagaaccgggctagaaacgtgttagtatatttttctttttactgtcgtttttcagaaattagcatgtgggtgacaccgatagtatggcgtggggtgagcgtgtagttatggcctccaggcttgacttgtctgctatagttaaacctatgtactactccctctgtcccataataagtgacgtttttggctttttatttgtaacgtttgaccattcgttttatttgaaaaactagtgcaaatataaaaaaagataagtcatatgtaaagtacttttgacaataaagcaaatgacaagaaaaataaataattattccaaaattttttgaataagacgaatgatcaaacattgacaaacaaaaactcaaaaagacaagtaatatgagatggaggtagtacgtgttagtatatttttctttttactcctatgtacgtttgtctcctacagtatatttccctgctgtaaataaaacgtttactaggtcgatcaacacattatttcttctaatatcactttgaaagatgattaaattaatcacaaccagatcacccaaacatattactctccctttttacacgtaaattctccctctttttcttgaagtttcgcatttttcgtcaataatagagtaattcgaagcagtgacctggaggaaaagagtgttcagaattcaggtcacgttaaataaacgtaccaagcttcctaccggcctgaaaaaaggggctctagtactgtagcatagctaatcaccaaaacttgggacccaaatgagttgttaaagaaacacttaaccgaaatgaactgtttgcaggtaagacatctttttcgatcgccgcttttgttgtacgattaccttttcaactttaaccctgaattccgccgtcagttaagatccattcacttgcagtaaatgttactcctgctaacacaattatcacagtaaacacaggcttcttatcagcaactcaccatccctccccaaacccaactaccatgacagcaaagtctcacagtaaatgacgcttcttctacgcctaacctgagtgagacaaatactgtagcagagcaaagcaatagtagtactaccctgttctgtaaatgcgcagttgataatccatattattactgctactcaaaattatccatacatacatgattgaatatattttaagatatactccctccgtcccataatataagggattttaagtttttacttgcactgtttgatcgctcatcttattcaaaaaaatttgtgcaaatataaaaaacgaaaagttatgtttaaagtactttggataataaagtaagtcaaaaaaataataattctaaattttttttgaataagacgagtggtcaaattgtacaagcaaaaacttaaaatcctttatattatgggacggagggagtaggttactttattttggaatggagagtactgtgatttcattatctccctcttgataaaataacaagaaactactccagtacacaatatttctaccctggaatcgaaatcaagctatctgggcggtaattggtgactaagtactacagtacccgtacctgaagcggttgtggttggagtagtgttatggtggggtgcgaccgtgcaagaggcaagagatattaaaaaaaaaaagatctggggaaagagaccggagccatcgtttcgtgcaatattacaaatgaaaagtaatttataaataaaacttttatatacgtgtttttatctatctaaaagcaagagctgaaaaataaattttgatgaaaaaaacctcaaaatcaactctaaatttaaagttgaaaatttaaatttcagttgataagcataaacacaagcgaaaagatgagatccgacgtttctctaaatatttttcaaaaaagaaattacgagtgtgttagaaaatttaacttatgacctcggaatttaaaccacatcttgcgactgtactgggcaagacgcaagtggatcggacggcgagggagctagggcggccggcacccgtcggggcgtcacgagcgcgcagagagaatcccccccagcgaagcagcggcgagaaggacaagccaccccaaccagaaccaggtggtggggagagcgggacagcgcaacagcgactgacaataatggcggtggtggcgggcgaggccacctcggatcgcggctgcctccctcccctcctcgacctcgaccaaccacccgcgtcgtctcgtcgcgcagttagcgaccgcgacgccgactccccc

SEQ ID NO: 1653 - DNA, 4551 bp, Oryza sativa
tgggtaactgctgccggtcgccggcggccgccgcgagggaggatgtgaagacatcgcacttccccgcctctaccggaggcgggaagaaaaagccgcaccaggcgcggaacgggggaggcggaggtggtggtggaggagggggaggctgggagaagaagcggctgtcggtgctcggggaggaagggagcgaggtgaacggcgggatcgaggagaagtacgcgctggacagggagctggggcgcggcgagttcggggtgacgtacctgtgcatggaccggtgctcgcgggagctcctcgcgtgcaagtcgatctcgaagcggaagctgcggacgcccgtggacgtggaggacgtgcggcgggaggtggccatcatgcggcacctgcccaggagcgccagcatcgtgtcgctgcgggaggcgtgcgaggacgacggcgccgtgcacctcgtcatggagctgtgcgagggaggggagctgttcgaccgcatcgtcgccaggggccactacacggagcgcgcggcggcggcggtcacgcgcaccatcgtcgaggtcgtgcagctctgccaccgccacggcgtgatccaccgggacctcaagcccgagaacttcctcttcgccaacaagaaggagaattccccactcaaggccatcgacttcggcctctccatcttcttcaagcctggtgagctccccggcactgagatccatccgcgattcggacaatcggacgaactgttttttttttcgcgcttttggattttttgggggagttttcgcaggattggtgggttggcagccggttgggtggaattctctgtactctgtagtagtgtagtggccgttgctgtagctgattgctagtatgttcttgcttgcgtaatctgacgagaacttgttctcttttggtaggacttctaacttttggaacaaacatatacgcactgcagagtgagctctgagttcagatactggaatcttaagaactaggttgagtcgttgagtggttgctgtttttggaatttgggaaactaccggtgggagcagacgtgacagttgctatttccaaatatagtgtcctggtgctgcccttataccaagtcttgcgtgctgattcctcattccacttcagtttagttgttttgggtaataagattcaggctttcaacacaacaattgtagcaactcttcttataattctatttttatcaactaattaatttggcaccaatgatcttggttgttaatgtacacataacaatatacacttgtcgaaccaggacactaagaatatgctgtaagagacttgaagcagtgctttacaattcttttttatgcttgtttatgcacttttctcaataggtagtattcttctatttcaattccattccccttgtcctctggttgaattctagtaaatagttaactacttggacaacaaatttccagtggctctatgtttgcttctatgcaatctcagattgttgcagaatgtttcacattgtaacagcctgaatcttatagagttctgttatgacaatcatcatcactcttatatcatgtggcattcatgcaattaatttgttcacctcatatccatttccatactggtcctgcttattggtagggggaaaacatattttcgccaggtagataagttccttaaaaataagtggctactggaattttacattaaaacatggaacaactgaacaatgtaaattctggagctacaaaacttgccatagctaaaccttgatgcatttcacagtttttgccaaaaaaagtagtcttcaaaatttgtgttgatttgtttgctgttgattactggagtcataaatgctttaatgtggcatcaacattgggaaaatatcgatcaagcctttttcagaagcactctcgttttcttctcataggattctgttggattagtaatgcctctatatgatatgatcgcctataggtgtggaattattcttattttgatacatattatagaatgaatcattgcattgtttggattttgtttaatgaccaactgttttttgtaagacacctcttcacatttccctgtgaaatgcctgtatgctatatatttaaatatataaaatgtttaatctgatccactatcttgattgttcaggtgaaaaattttctgaaattgtgggaagtccatattacatggctcctgaagtgctgaagagaaactatggacctgaaatagacatatggagtgctggtgtcatcttgtatattttgttatgtggagttcctcctttttgggctggtaccaactttgccttctctttgtgaaaaccttaaatcatttagctttgctcttctgcaaattcttaccaagcaaaattgcagagactgaacaaggagtggcacaagctatacttcgtggaaatatagattttaagcgagaaccatggcccaatgtttctgataatgctaaagatctagttcgtcagatgcttcagcctgacccaaaactcaggctaacagcaaagcaagttcttggtaagtggcacatagtgcttttaaagctggcacattgttaactaagcatgacttgtacttccttttggctatgtgatgcattgattgcactagtaattgttacaaatagttgatgatctagctatgctttattgcattttcctaatgtgatttggaaatcaacagtaagaaactggctgttgatgaatgtcgagaatagtatgagatgtttaattgttgctataaattcaaggtaaatttgagacttggatgaaccatagttcatactggcaagtgccagatggaaacaacttagaagatatgtaagtttgagcaaaagaggtaaaaaaaaagaagcatagttattaccaaagccatggacaacaactgatgcaattttaattatatcttatattgccttctaaacttattgagttgaagcatgccaaatggtgtagtgaattagacaggtttgttttattttgcttcttcatggttatgcgttattttgtacaatcatgggatgcttatcaaactatgaatcatttgcgtcaaaaaaaaaaaactatgaatcatcaaaggaattcgtcgtgttgtccacatgctgaataatgtagacaattaagcaatcatgttttaccacgtatttccttttttctttgatcagactcagacagtgatatacaggcttggtactcaagatagctgtttcacttctgttgtcgcagagcatacctggcttcaaaatgctaagaaagctccaaatgttccacttggagatattgtaaagtcaaggctgaaacagttttcaaggatgaatagattcaaaagaagagctctaagggtttgaatccttctctaattgattatctttttctaagtctaacaaacatatatatttactgaaccgaactgattcttgaccaggttattgctgatcacttatcagccgaagaggttgaggacataaaggacatgttcaaggtgatggatacagataatgatggtatagtctcttatgaagagttaaagagtggaatcgcaaaatttggttcccatcttgcagaatctgaagtgcaaatgcttattgaagctgtaagtaacctggaagtatttcacttgcttgttggagttcaataaaattgagttacaaaagatagttcaatcagattaaatgttcaccatctttggtgatagctgatactgtgtcacatgtttttttttctaagtctgatgtctggtgcaatgtaaaagtgttccttttacaccacatggtggaaacactggccaattttccctttattgcccttttctttttgcaataatggatcaagggcataatcaaactgttacttccatttgtacaattgacctgcctgttcttctcattagtcttgacatgtttatatatttcacggagcgtgctgagacatttactattaacattccttttttgttttgtcattttggtgtctttttggtccatagtatgcaatttgggagtcagacttgaatacatgataattaggtggtctcaatggtttgattagtgtaaatgtgtaatgcccttgagtattaataaaacaaaaagataggtgatttgcatatctgatatttttgtggttggaaaataggtggatacaaatggtaggggagcactagattatggtgaatttttggccgtttcacttcacttacaaaggatggcaaatggcgagcacctccggcgggccttcctatttttcgacaaggatggcaatggctatattgagcccgaggagcttcaggaggctctggtggaggatggggcaactgatatcatggaagtggtgaaggacatattgcaagaggttgacactgacaaggtgatgattcactaatgctggtagcaatgatataacctccagatcttatgcctttacttaacaaacatttcgatcgtttattcaggatggcaaaattagctatgaagaattcgtagcaatgatgaagactggcacagattggagaaaggcgtcacggcattattcaagaggacgttgggccgcaggaa

SEQ ID NO: 1654 - DNA, 7898 bp, Oryza sativa
ttgcctactacctcatttgttgctctcggtcgaatcgcatccctcatcacaaaactggttataacacctccctcagcttctagaactagtgcaaatcaatttattcagagatttagcaagcagtttatgctgatgtggtaggttgacttggtccatctgtgctaatgtggaagcctagtcatcaaatgaattgaaaataaaagtggggccgtaacaaggtaaaaaagaaactatagtgcccacttgtcagccctattcctcccctctcaatctcgacgcaccatgcagacgcaacccgcatctcaacatgtcgccttggcgtcattgccgcaggaggaaggggaggggactgtcacggcagtcggcagcaaaggatgcgcttggcgggcggaagaggacagcaatgatgatgacacgcggggcccacaacaatgactaccaccgctgtagccctctcttcccctcatgttgccatcttcctccacggcaacctcgaggttgacgaccaggaacatgaataggttggtgtggaatcgatcgaggcggagctcacacatgcggtgggggcagagtggtataggaggaaggtgaggttggtgaggagcacaaggaagaggaggagcgggagcgtgcgagtggaggtggacaaggacataaacaaataatagcatcggtggaggatgaggaggcaatggaatgagggagagagatgggtggacgacacatgggggccactatgatattttagtggctgtttggattgtagccaaaataaaccttactaagttttgtcaatgccaaaattttggcataatagtaataattgccaaaattttggcaggatttcttatgtattgaccaaatttagcaacaaactaaatgtagacatttttttggcagctttaccaaaaaatgatatagttaaaaatagcataaaagtgaacgtgcccttaagtttttctgctgactcggcaagtcaaacgtggttagcttaccatgtcaacgtaaaccactttctaaatcatcgaaggaattgatttgcaccgatttctgaagttgagggatgtgttatatccagttttgtggttgaggtatgcgattcgatcaaggtaaaagaagagggaggcaaaatagacttattcccaaatgggtagcaattagcatcggcccaattccataccaccattgtgatcaagtcaagcactattccagcatgactgggcgcttttctggtaaatttcggtgcagctttgggagaacgggagctactacgagtctacgagctacctctaccggcgggaagaaaatgctctactccaaaggcgattcctgtgcaatttcctcgacttacgtcttttgagagagaatcttctctctaccgcctgaatgctacgagaacagcttcaaatatttcctttcttccagcgacacgccataagtgctcaccactcgaactcgtgcggtaaaactttggtggtgtaaggcgaaagtgaaacgtgcaatcattaaccgaactccgaactgtgcactccagtgtccactccaactcgttcagtcatctcggcttatatggtccgacaggcgacaaggcgacattgtggcaccatatcaacagcagcaacagacacgcagcggtcggttttaggcttccctacgattattacgagttgacggctagttcgaaaattgaaactccacatattgaaatatcatattaacattgagtaaaaaagcgatttattacaatatactccatccattccaaaatataaggcacagtcacccttaatccaaagaccaagaatgtagtttgaatcatcctaataaatgtaatgcatgcatccaataggattagataacatgagagtggagaatttgaaaaagtaataatttaatagagaagatgccatggttgattgtatgtttgcatgcatgtcttatattatggaacatctaaaaaaagtggttgtgcattatattatggaatggagtgagtacttagttaggtattaactattataaatttaaaaacatttttttatttaaacacttgtgtaaagaaattcttttttacttaaaacacattgtttatcggtttggaaagcgactaacatacaaaaaaaaaattagagttgaagtttagaaatcatcataagccccacactgccagctaaccggaaccgggtgtgtttgcaatcctgggttcccgacatgcatagtacgtacgaaaaacggaacgatctattagcacgtgattaattaagtattaattattttttaaaaaaatagatcaacatgattttttaagcaactttcgtacaaaaatatttttaaaaacataccgtttagcagtttgaaaaacgtgcgcgtggaatacgatggagaggggttggtaacaggattgcaaacacaaccgtagcgcgaatgcgtgcgtacgtgcgatgtggtcatgtggtgatactgataggagtaggacacgcacacgcggtagctagcgaggcaggctgcccgcgtgactgcggctgagttcggacgggggatatgagaacccaactcctatcgcacgaaaaacggagcagtttattaacgcgtgattaattaagtattagctaaattcttttttaaaaatatattgattttatttttttaatcaactttcgtatagaaactttttgtaaaaacgtaccatttagcagtttgaaaagcgtgcgtgtggaaaactagagaggggatgggaaaagttgcatgcgaacacagttgttcggtagttagacggggagttattattgcgatgagagcaaacagctgttcggtagttagagcaattttaatagtatagccaactactagctccaattcatttatagccaatctaatagctcattcatataatagttacatactcccttcatctacttttgatagtcatatttcatcttgacacacagacaaaaaataagtgattctacttatcatccatttaaatatgctactagtcattcctcgtaaacaagcgattcattaatatttatatttctcgatgctcatgcaaccaatcttatatggaagaatgaagagtcatgtattaaatccaagaaaatcattaagatgataagttgttggattgaaatatgcatatcaaaaataaaattttcagatttggaaatatgactattaaaagtagatggagggagtactacactattaatacttggtctcacatgtcatacacactgcgttttggagtccgtgctacaaatctgtagcccgctgtccttctctcttattatttatcttcttaaaatatatatgcagctagcttatagcctgccattatacccgctcttagacggggagttattattgcgatgggatttgattaagattaaggcaccaatggttaggaggaaggcgccctgctttttggcgggagtggggcacaagggaaggaagggaggaggggaacaccgtgcgcgggccggcgcatgatggcgccctcggcgtggaaagggaggcgtaaagctgggctgaaccggcacggcaaggcccgttttgtttaatccccgggggtttggtacgcgcaccaatggctcttcgatagggataaatctattctatcgaaaatgtaattcagtttttttttattatgcggataacacacacgtacgaacatcacgctcgtacactcgcaatgttaatctgggcttctttttgggtttagcggaatgctgtggaatttgccgttttacgaggagcgatcaatgataacagtaagtataagagcacccgcaatattaaagtaagatgctctctataaaatatgtacatctcagtaatagactagattaatagtaaatcacctcaatagtatgtctacattggtatctatagctctctaatgcattgcctcgtttttctctatagactatcttcagattagtagatagttttgttctctctcttcattcaatctctttcaaataggaaaatatgctgacatggatctcttgcagagaacctatagataaccattgcgggtgccataagagcaggtacaatagcatgctataagccagctacaaatatattttaaaaagataaatggggagagagaagagcagcgggctacagatttgtagctagctatagcacggactccaagacgcggtgtgtatgacaggtgggactagatattaatagtgtagtaagtaactattgtatgaatgagctctaatattatagccaactactagctccaattcatcgttaatagtatagtaagcaactattgtatgaattggctattagatcggctatggatgagttggagctagtagtgggctatactactaggcaaaatttgccatgggacacccaaaaattgtgtaattggttgtgagacactataaaatcgtgtcattgctgatggataccacaaaattcatgtaatttgttataagacacccgagacaatattttatcatttctgattaaaaagatgggagagaaatttcaaaaagacaaaattgccctcagcgtcgctcgccatctgccaccgtcgaagccgctgccgccgcgctcactgaccgtcgtcgatgccgccgctgttgctcactgctgcctggccacagccacctccgtcgccaccaccgccatcgaagccgctgccgctgggctcatcaaccatcgtcgaagtcaccgccgtttcccgctgttgcctccgtcacggccatcactcgccgccgccactgccgttgttgaagccgcttcctgatctcgtcgaccatcgtcgaagtcatcgccgtagcctctaccgccaccgccgctgggctcaccgaacgccatcgaagccaccgccgccgaagcggccgccgggcatatgcgggccgcgggccgagcggcgcgaatgggcgcccaggtgacgccatagggaagcgctcacccacctcctcgtctcaggccgctgccacctccccggcgagcccagctgctagcccgacgccatcaccgccgccggagagatcaaccgacgtgaggctgatgccaccggaggggcacttcttcatcccgcaaccgcacttcatgcacagctactagcttgtaccaggcggcgacgccgaccaccaccaggtctccaacaccggcaacggcgatggatcaatcgatggatcgatggaagcgccgatcagaaggggcaaaactatcattttatgtggtttctttctcatcaattcagtgaatattatattttaatgtgcccagtgtcctgcagcaaattaccacacttttagagtgtcatcgggcaaattcatgtctttcgggtgtcccacaactaattacacaatttttgagtgtcctgtagcaaattttaccctactattaaacttgtgactactagctctaattcatccatagccgatctaatagccaattcatacaatagttgcttactacactattaatatctggttccacctgtcatacaccacactacgtcttgaagtccgtactgcagctggctacagatatatagtctgctgctcttctttctcatcttttacttcattaaaatatgtttataactgactaatagtctgctattgcgcttttttttatctccctcacaatatgtggaatatatatatgtaagggagtactgcattaaacttgttttaatggcatatgtggagccaggaaccggtgcagagtctggcgattggtcttggattcttgggaagagggcatctcgctgtgcttacgttttgtgatttttgtcagccgtccagtctttttttttagaaccgtcagccgtccagtcaaagtgatgatttatgttgttacacaagcgtgacacgccttaactcaggtagtttatgggtgtaaattttatcttgcgaaaaatggctgaaccgagagaattgagtaaatgtgtaggaatagtttaattgcattgtcttggaggagggtgacagcaagaatacccaaagtattcttcggtcttactccaagcaagcaaccacttttgaatgacaaagtataatcgaaaggaggcgtgatacgtttcatcagtcaaaagggaataagtggctctttcgaagttaggccaaaccagagaaacaaaaccaagcagatatgcatttttttaacgagaatgatagctaatggtttttcacaatcatcatcataaatgtgcatttatatatataatattattatcccagatacatggacgtgtccaatttaaatatgacacattcggtggccttttgacttatgagaaaagtcatttacttacaactgaaaagtggtgttcagagatataaagaaggaattggttctcttccttttagctgccctgcccatggtcttctcatcataacaaggtgaccatttaaggttaaacacaacaagacaaagcaaataaggtgatagtacttaatccttcgctgtaaataagaatttgtttcttgatatatcatttgtagaaagaatttatctcttgattatcataataagcaccaaaattcaaagtcagcacttcgttttcttctgctagaatatgtttcacgattaatctcgccggaatgtcttatacagtatttgcatacatggctgtttatcggttatgattgaaaatcttgcggataaactgcccggtataccggccagaataattcaaatttaaatataatatttaatgttttctccttgtatagtaagaacatactacgttttttttatcaaaagaacatactgcataaactagtattttatcttataacatcatgcttctagtatataaatgtaggggaatttaactatttgccactattgcgtttgacaattatccaaatacccctcttgcatttgcacttaactttttttacccttcttaaaaggtggcttcttaactatttgtcacttttactcacgtggcatgcacgtggcaacacagagcgaaaaatgatgtgggacccactagtcaatgtctcccttctcttcatctctccctccgccggccttctcacgacggcggctttttcctcgctaccgtgctttgcacggcctgccgccccgggtggtcgctgccaccgtcgccggtgttagcctaggcgaagtcaaagaagggcggatcgagggagatgaagtggaaggagactgactagtgggtcccacatcgtttttcgctcaatgttgccacgctggcatgccacgtgggcaaaagtggcaaatacttaataagtcatcccttaagaaggaaaaaaaataagtgcaaatgcaagaggggtatttggataattgacaaatacaataatgacaaatagttaaattcccctgtaaatgtaggagtatttatacatcgaaactatgaaaacctacactttagctgtatcaaaagttcaaatccaaagttcaataagttaattcgaaatttgggttcaaactcggttactggtgattgaccagaaagacaagtttttgtttttttaagtatttttctccaaacccggcatccgaaacttgtttgtacgatggtcgaaaaaataatacgaacatccaccaccggtggaatatccaacgatttctgcgagaataatcgctaagaaaattctgcaagaatcttgtgactaaaataaaccttaaacacaaccgtcatcagtcgcttaataatgcgctttccttcaccggattatccgattcctctcgtcacctcacccgcacccccacggtcgtcgtcgtcgtcgtcaccggagccagtcaaaactcgccgatgaccgtgggccccaccacccccgaactccaaccccgggccccacgaggcagcgacccatcggtcgccatggcaacgccacgtgggaatgttcctcgtctcgccgcgctacgcgtaccccgggaca

SEQ ID NO: 1655 - DNA, 14028 bp, Oryza sativa
cgataccgacatattgttggaagtcttgtatatcttgctgttactcgaccggatatctcacatgctgttcatgttctcagtcaatttactagtgcccctacatctgtccattatgctcacctattacgagtgctccgctatctacgtgggacaccatctcgtggtatatttttctcccgtgatagctcactagagcttcaagcttattcagattccacttgggcaagtgaccctgttgatcgatgctctattactggttattgtatcttcctgggatcttctcttcttgcttggaagtcaaagaaacagacagctatctctcgttcaagcgctgaggctgaattacgagctcttgcaactacaacagctgaagttatatggctccgttggctacttgcagatcttggtgttgtcctctcacaaccaacttcattgttttgtgataacacaagtgctatccaaatagcctcaaatcctgtcaaacatgaactcagcaaacacatagggactgatgcttcttttacccgatttcattatcaacacaggacaatctgtcttcattacttgccctctgaacttcaagttgctgacttcttcaccaaaccgcaaacacgagaccagcatgattttcttctttccaaactcaaggctgttgatccacctagagtttgacggggggtgttaatgtatacaccatatatatatttctgttttggttcagttggtccacttagcccatttggcccatgtatatgtatataaccttcactaccatctagggtttactgctgaatatatttttcgtgatttcccccaaatgttgaacatgcagatcatttactgacaacctgaggacacggcacgcatttgcacctacctcgaagttataacttttcaaagttgataagtgaagggatcctttgtaatcaacagtccatatatgagttgatgactctcgggtactgatagaagagcacaaagaattgtgagcaattgatattatctggtaaggaaaaacaggttaagagttaaggatttagcggatatataccaaatgctttcagcttggcattgctccatcgcattgacccgtacacttctgcaagacaatgtttgtataattagcaatgagtgtgatccaaaagatatagacagatgaacgagaattacaccttattttattggcatgtaaaagacaacgatgcactctgtgtgtactgtcattttgcgcaaatccatatgctgaacatcgtttgacaatccaagatgggtatgttttgtcaccttttttgctatgatagtttcccttgatcctaccatgcccagacttgtcattttcatcatcagattgtgaatcaatttgagcatcaaagctcaagggaagaaatttatcatcgaatggtgaatggtcatggacttcaccatacaggattcttattatatcacatgctttggaaacacatttgggagttgtgtaagcaataggcacataatctcttctttcatcaatagagctaacagtttcacatgaaactcttttccacctttgcagcattacacggcaatcatctccaagtactatctgttctgtgttgtctggatgaaatgccatcagtgctttgtccagcacatcattgtttcgtgatgtgtcccaaaggtgcagaataatgattgtaacaatcatgtcaagatagtccgcagaagcagacaactcacctattacatacatatagagacttttgcaagcttttctgaagcctgctggcccaaatgcaaatgtagacaaccggcgatggtagttccctgatataggtatatcacttcttgtccgccctgtcgttgttatataatgtgtcggttttgcaacttgttttggatctccaggtggcttcttaataaatctatcactcttttccctctctggcgttgttatataatgtgtcggttttgcaacttcttttggatctccaggtggcttcttaataaattcagcaacaaacccctctgtgataacaccatgtagccaacttgttgaagcattgcctacaaagcacatcacaatcccatctacttggacatactgtagatagtggcccttttggggtgtggtccaacttctggattccggacaatcgaagtcataaacattatctgagtgagatagagtccagaagcgatgattgcctatgcagtccatcatattctcataaagtaaccaaggatcaggttcatccaaattcaggaagtgatagttctgtaaaaagaagcaacaagtataaacgataaggaagaagtgtcattaaattgcactaaaaggttgcaacggatagaaacttactggtggataacggctgcagccttctaattcacttaaggggatgtcatttaacctagtcttaactggagtgtttgccaacttcttcagagcttcaagaaactttggaaggtcagggtaggctttgcaatcaacacgaactgttacagcaggggctctcatgggcataaccttcacacttgtcaatgtagagttcttcttaattaactggtctgaagtaaacacatacacaatgtttccagtgactatgattttctaatccctgtttatgttccatacaattaactgtagtgtatgtggccttgtcaaataagtctctatgaccagggatagaggagcaagaagaaccctcaactaactcccttttatctcctatccaaataagggaactcttaatgcatttgatatacaaatcttttctttcaccaataccatagctgggactcaagaattggacattcattccagatgtgactttcccggagaagacacgtcctaaagcaaaatacctgcctttgcctaatgctagggtcatcttggaacataaagaacaaggggcccttcagcatcacaatttctaacagaggtatggtaaatgttgtcaagatccacccaaaattcccaacacaatgtctttgcgccttcctctggagaggggatgtggtacatcatcatctcagaaagtgcactgcatgctggcagccaagcttggatcagatactttacgagttcaatgccaacaagttccttagctggagaactcacagtgacatgaatcttttctagcataggccacaatttgtgcttgctattcatgcaggcgttcatgatctctctgataggttcatagcaaaactgaacaaagcccctcttgcatgtagctgtgccagtgttcttttttgtccatttctttgtggccaggtcaaagaagttctcaccccataatctgtctatcatcttagattcctcaactttgaatttggaggaatacatcttagcaaaattagaaattgcaactgcccatccgtgcagaccagatgagaacacaacagttcccttagtgggatacacctgagcatctttgtgtgaagacatggtagcattgacactatcaattagactggagagggtctgataagctttctcaccatcaacattctgctcaaggaagaatctgtcgatcttattcagagtaaaaacaggctgaatcttcatattaagagcctcacgaatagaagtcttggtccataaagtaacaccctcaaaactgtccactacaactagagcaccatccattatgcaaagggcaggttggacatcattagacaagttgcaacacacaggagagtcaataagattgatcaagtgtccgttaccagctctcttatccttgtagcttctcagagaatcttcaggcatttcatagtacagagaaattaggctattgctttcagtaacttcctgggaagtaattccagcagttgctaccagggaatccaatattgcagtttttcctttaaaaatggtacaagacaaaatattagtacaaaaaatattttcacaacaaaattacaaatggaagcagcaaaaaaagtacaagagaagtacatcctataacgaatagtagaagaaagacaagatatcaaggttacaaactcaaatactccggacattatgtagtacaacagttccataccaatctcaatatatactagacccaccagaaatcgatatttacatacaggaagataattccagcgatacaaatcattcagattcaatatgttaatggaaagaaatggctgaaaagaataactagaaattctactaagatgccacgtcgtaaatgtgagaattaatgtaatttcataaacaaacaagtaaaacaaccacattttaagaatctcacaccactacatttcaatcttaccatggccagcatcagcaataaccaatacattccgaatgttgttcttattgcacataatgctgtgaagttcttccgctgtgaccaccatcatgtcgatttacttcatgtatccctgcctgtgccaaatgaacaagtttgataagaacagagaaaaattgagaaataagccatcaagtagtaagcaccacaattaattaacaatttgtatttaaaagacagtccagtgacttctcatcccttacatcagggacaaaacaggagttatgagctccggcacaatgacatgctcttgatgtgtgaggagtgaggactacgacgcctaccagcatgcaccaggacctgatccaaacagagtatgcaactcacaagatctctgcaggctgatactaagtgatcagaggcaagatatctgaagcatctcccagcaactcttcacttctcaaaatatcaagtaggaaaccctactaaggttggtagatgagagggcttttgaaccactcctgttggactactctttggtttcttccaccgatgcttagttttcactaaaatccgaccacattttcatatggaattggaagaatcctcctccttccccgtaagacaaaggtcgtttggattggattacgggtatcagcaatagcaaaatgagctcccaacgttcaactgggctccccgtcgctctcccgccgccgcggcgacgcaccccccccccccccccatctcaccccaccccaaccaagcacccagttccgcgacccagctaactcacgagacgcaccgaacccccatatcggccattcgtctggcaccatcgcggcgttctcagttcctaaccccatctgatccagtgagagggtttctagcttggatttcatatgaagaaggaatcctaatcgccatgaaagcgggcttccctctatcctctagtctcaacacaaaaacccaaagtaagcaagcaagtaaccaaatgttcgaggagtacagcgcgtgggggtgtccgaggctgaacctgcggagacgacggcgagcctgcggccgacgccggcgcggcagcgcgtagatgggcgtcggcgaccgatcgtgggcggcgccgcagatgcactgcgacgggggagcccgcgctggcggagaggagaagggggcggccgccgccgggcggcgaggaggaggaggaggggcgtgacggaatcgaggaagaagaagacggccgctgctcccgctttgggaggtggtcgtggtctcgtggacttggttcacgcagctctgaggtggcggcactgtgccacagagctacagtagagagcagcgtgcacctggtccaccggtttctctcctgagcacgtgctcagggaccccacatgtcagtgcctatggtccactgagacggaggcacggagaaaacctgtgctactgtaggagaacgcaggatttctctttccgtgatccactccgatactacgtctagtttcccgccaaaaagttgtagtgatggcccattttgattggcccgcttaggagataaggcccagaaatgagtcagatgaccctgggccgagagagggaactgatgaaaacaaacccaaattctcagtagcacgtttccctcaaaaaaaaaattctcagtagcactagttcattcaacaagaacgaatagtgttgcttatttcttaatgacgatacgcaaaaacttatccctcgaaattgcacgatcaaacatgtcgtcttacaagcgaagatagtttaaatgcttatgagagataagtgtcctgaaaacaaacattgggttcataggagtaccatgcccagcttctacttggagatactcattctacttaaccattcaacaggtatggaagaaaaggaaaaatacgaaaatatgttaacattccccggtgtttgtccaaaacgaaattcaacaagttggaccagcaaagtccaaatgcgcatcaaaacccaaacttctcacagcatcccccaaaaacgagagttcaggtacttcaggaaactgctaccatctaaacaagttctctcgaacatctcttccagtcagtcccaaggaacctacaaagcagatgagtacacatcagtctccctatctcataaacagagaagagaacagaacagatgaaatgaacaattgtcaaattaagttgattcagtctcttcggatacatccgataaaaaaagtagttgattcagtataaccacaaatatactgaaaccagagcatccttttggttttgttcctactctatcagtcaaggatgtggcattgcatgtctaagtgttgactgaagcaaaaattacaacctgtctagtgactactagtagtaaaggagcaggcaacaagctttagtttactcttgatcaacgggttatagaattttcgggaggacagtgaaggcgaaattggttaagacgctgagtaactttaggtttgagatagttcatgtctgctggttctgacagtagtgaccatcctttagcgaagtgacaattctcagcagtcggcagcactaacatctggcacttcagatgtatgaacagagcaagtacttcaccacaatttgagtataagatttaaaaggtaacgccaattttaggaggcagacaaatgtaacaactatcatttaagaacaacaaagaattcaaccaaacaatatgggattacaaacatcaatagcattgagataccccctctagtaaaaaaaatgacgctaggagaacaaaattcagttctccgggagtattaggtaattacgagagactactgaggatgtaacaattagcacactgaacgaattgtttcttaaaagtaaaccattacccattgcattgactacagataatgcatgagtaatccggacagaacaatgaaatacggctaataatggataataaaataagggtacacagacacaagttagacgagaaaaataccaaaagatgaatcgactgatgcagttcagttttaactgcctctatccacacgaaccagtgtgtctgccagagtatttctttcaacatcagtcttcttgctcgaaagggttgctgcaaccatgtgtacaagaactttaacaatagtagcacagagatgatagcgacaggaacgatgtatgtatccaataattgcaaaagacattggcaatgaacattgcatcaaaacactcgggcattaactacacatgaacaacataggtgttacataacagacattccactccaatgacaaaaggatgtgaggttcttctgccaataccaagttctggtgctgatatctgtccatgatcatcactgctatagtcaatttactgtgtaagtgtaagtcttatcagggacgattgactctgcttaacatatcagtagcaccagtgcaccacttaatttgagggcatctacgcagcaccacttcaatggaacatttgaatagtactgcattagactatttgagaagataggaatcaaggaaaaccttgtgaaaaaatcgaaattcgcaaactctgcataaatctaatcccaatattagacatgctgctatagtttgaagcagaaaaactcgactctttctacagtgatgacaaacagatgcactcccttgagaaaccacaatacggatacagcaggtatgtatttatcaacagaaatccataaattgctcaaatctgcaagcacgcgatttcaaaagaaccgtatgtgcaatccaatgattgcagcatagtgaactcctgcacttccaatactcggtgcaatttaacaattacaattgcagtatagtacctcaatactcaaacatatcgaacatacgaggatatacctgcagaggggatctgacatgattcgagccacggtggtaggatgcatggcacaactgaactagagttgacgtcatcaggagaactcctcccaatcacctcgcccttggccatgtccacggcaagaacctcgtggaggaatatcaggtacacaacgttggcgttcagtggatcgatggcgccgatccgcggcttctcgggcaccttgagctcacccttccagcttggggtgatctccatcctgtgctccagcgtccagctgctgccctcatcgtcgagcgagaatgcgctgaccacgaacggcttcttcgcattggacacctcgacgtaccggagcttcccctcgctgacccccatccgccgatacaagccaagaatccgtctccccccaattccggtcaggtccggcagtacgctgcccttgggcagctcgacgaagcgctcctccggccggtcgctgaacgggtcgacggagagggcgccccagctcacgtccacccaccacagccggccgccgaaggccaccacctggtggtccaggtgcatcacccgctcggccgccgccgccctctccgagcccgaggaggaccgcaccgtcgccacatcgtcccactcctcggtctccgacatgaaccggcgcagcacgctgctcccggactcccccctggtgagctccgcgaccacgtacctgtcgggcggcccgtgccgggactcggatcgggtgaggaggccgcgccccgtgctgtacttggtggtctcgatggcgggcgggaggcggtacatctggccgctgagcgggttgcagacgaagtgcgcgacgtccgggtcgaggacgccctcgctcgtcgtcctggacagctggagcgccacggcgaggcggacgttggcgacgacgggggcgtggtagcgggtgtcgtagaacttgaggaggaggagcccgtcgccgctgccgccgatgacccagccgacgaagccgacggcgtccccttcggcgtccgggagggggccggggttgacgaagtgggcggggacggagaggcgggaggagcgcgggggctcgacgaggtccaaggacgcccgcgcgctccgcgacggcgcccctgacctgtccagctccgcctcggttaggatcatgcgccacggagggcgtgacgcggccgtggagagcgcgcggcggagatggcggcccgctgcggcgccggcgaggcggcggagcagcagcgacattttcccaaagccggcgaggaggagtcgaggagagggaggagggtgggaaactatttaacagctcgagtgatgtccacccgtttatttcatctcatctaaatagttatgaaaaaaattaaaaatatatgaataagatagataaatatgtaatatatcaatccacaaacatacaagttaaaattcaacttctatagattgtaacaaaaataacaaacaaaactcaaaatactatatgtatatttacagttaaatttgttatttttgttacaatttgtagaagttgaattttaacttgaatgtttgtggagtgatatattacatattgatctatcttgccaatttttttgaaaatttttcatagccatttagttgacatataataaacgggtggacgtccactcgaactattagaatccatttccggaggagggtttatgtggacccgagtgttatatggggtccacgtgtcagcgagcagtactgcatgtgccgtggattgggatggagatggagttggggttttttcggttcacatggactcggttcgcgcaggtctgacagctggtggcacagctaaagacacggtggacatgtgccacgaaacagtttgggtgatggtccgcggagacgagtattgtcagttactgtaggtctatggaccttgttcacagaggatgggcaacagatgtccaggaggcaggaggtgagtttgaactttgaatgtgctttgactgtttgagctgcctcggctttagttggaatcctgtttataacacattaatgacacaactagccattaatttcccgccaaagggcagcgccgagccgacgagcatggggcttttgccggcttggcaaagcaccactgcaccagtggcgacacgtgattgagccttcgatttgaggcaaatatgccctctatcttaaaatataaaaacataatacgaaataaacatttcttagtattataaatcttaataaaagatccgtcagattcatagcactatgaaatatcatattccatactaagtttatatattttatttttatattttgatataaagatagttaaatttcggggtggcggtagtagacaacaacgagagtgcttcaaaaaatatcctatcccctactaggtttctatattttatttttatattttgagatgaaaaataaattttggggtggaggtcgtagacaacgacgagtgcttcaggcttcatcaatggcgaggcggaggccgtcggcgaacaggtatacggggagccagagccatccatgtcaggtctgagtgtctgaatgatgcataaggtgacacaggttcagattgatggttaaatatatgaactgagatcatgtgcaatttatactagggctgcaacatacagcttcagattgagttctgcgcagtggtgttttgcgatatatcctacagcttcagatagacattcagaagctggctagcataggattgtcactctcctgcattccggtttccaatttcagcgctgtctcaattctcatgcccgcttgagcatgcatagaaatttcccagaaatacataatgcatacaagtataaaacagtatgaatcacaccaaaggtgacgaatactacaatattttatcaacctctcagaaaataaacaggaaatgatgattttttttgtggcataactaataagttcatacaattgagtcactatctcactctaggttatcctttacaagccatttaattgaatagtagtgttcacagacaagctgcagagcttccaaactgctcgacgtcaaacagcaaacaatatagtactaccttgatagcaagatgtcgcattggcatgtgatattccaatgtcattgtctaagacaaggattttcccacatttttcccaaccagagaatctggtaatctgctgttgatgagatcccgcagttcaaactcactagggaacctctgctcagctaattttgagaaaacctgaaaagtgtaagcaattttcgttaaggaagaagtaaggaggttgtttactgctcaagtcatgatcgtaaatcaaagcctctttccatgtagcagttcttagtagaaaggtacaaagaaacatggagaaaaacatacatgctgaaacaaagtattcacatatctctgtacttgcatatcaaggtaaaagtaatttttaattggtttaatcctagaaataaaattagcccgtaatgtaaaaatggcagataaaaagaagttttacaggtgtgtctgacatagaaagcataccaaatctccattgcagtaaacttcaaaggcaccagaactttgtaggaaagattgcgcaaaattgccaaatagccagattgttgccatggttccaaatctattggcacgcagtgagtagtaccatgggggtggaaccattccaagtctggggaaaatatgatcaccagccattattgttgcaatggctccaacctgaagaattggcacaagtttgccaagtacacgtttggggaagggtggagggtaattgtgcaagataacatgaatgcctggaaatgatgtttccagcatgcgcttcatagtcattgcagtccccctacaaaatgttactcaaactatcagtgtaacctgcagatgcaaagcatagaatctattgaattgtcttttggatggacaaaagatatttttataaattagaaagaagaggagaggctatttaggcacacaactttaattgctctttcaactaaaatccattagtaatcaaggtaagacaacaagtaccaaagtccacagattgagaaatatacatatcaaactttaactataataactaattatgttctatgttataaatacaaagtaaattaagtaaatactcatgctttcagcttaggagatctatatccatatataacaattttttatatggtccatatcacattttattgcatgcaatatttcactgtaacctaaaattcaattgtctggtaacagtatacaaataattcaaagagttcttttactgcctattgagcatttttggaatgtcctactactttgtcatagcatgatcttagagcaaacttgtggtatttgtctgagtaatcaaactttccatggaacaaataagcctcctcaggtgcataactaattccatggaacaaaatgtgttttaccaaaaaaatagagagtgtaggaacatcgcaacaagttaagcataaaaagtaaaatctgcaaatatctattgatccacaacgaatccaagctaaaactttctgatcccaaagctataagtagggaaagtgtgatattcagtgaatgcacaaataccggcatttcatactaactgaatcacacatactcggcattggcatgtaacatctgaaattctgaacgcaagctagaggcttatatgtgcaaagcagctgaaagcatggatcagcacatatatgcaatgtatcatcacaaattgtctcatctcaaaatagaaagagctaaatgagatgagtgtcataggcggtgggcagagagatcgaggtcttagggacgggatagagtcggttggataggattagactgggtcctcccctccatccttatataggtgattcacactgtgtatgactgttatcatttacatttttctttctaatatgtccaacagatcattcacactgtgtattaacgataactgcagaacccatatcccatacaaagttccccactactgctaagatgtaatcgtgaatttaagaagcgaactggagtgaggcttacaactaccaagcatggagtgttatgagtgtacatatgaacacaggacgtatggcagtaatcgatcatatgtagcactagagtggagtaccaagcaatcccacctagcaaatctttgtgcggagtagatttttttttagatggttttgtgcaggataaatcgaactgaatattatcaactgtggcaagcacacaactaagccgcttggtgctcgctacaacaatagtatgctcatttaatctgcacagaaataatccaacgaaccaactgcggccactgataccacatgaacgcaaaacacactggactaacgaaactcacttgtacgagcaggaggcgcagaattgcagctcgacggtggtgccatatccagctccatcaacgttagcctgctacaaccgtgccaaaccccccaaaaaaaagaaaatcagcacgccgcttagatcgcagcaacagaaactcgggctagggttcacgacccacccacctgtatggcctccgcggcgggatcggggtgagggtgggggtgatggtgcggcggatgcgggtggtgaggcgggtgggggtgatgcggcggatgcgggtggtgaggcgggtgggggtgatgcggggggtggtggtgaggcggatggggatggtggtgcggcgggtggtggtgggggtgccggagatgcggcggcggcggcgcgaagatgtgggagaggtcggagaggaagaggagggcggggagaccgacgaggaggagctgcacgcggtccatggcttaccactactcacactgctgcgctccgcgtcgcctcctcctcctcccaaccttttgagaggacgcggaacggaaggaggacgacccgcgaccggcgacgcgatgcgatgagggagcgacgaagcttccgcttgggtcactgacaggtgggccgcggatatgcgggtcccagttgtcagtgggagtttat

SEQ ID NO: 1656 - DNA, 1871 bp, Oryza sativa
actaaaattaaacacgtagtatataatccctatcccttatcctctcatccacagttacggatcgaatctcacccctctcctcagatccatcctctctaactctcttcctcatcccctcttctccaactcctccccttcctcctctcctcccccttctccccttcctcctccccttcccatccggcgggccggccggcggcgggcggcggcgagcagcggcggcagtggcgggcggcggggccgcgcccggcggtcgtggtgaccggcggcggcggcggcatttttttttaatttgtgatgattcactgagatgtatttgactaagaagttataaatttatgattcattgtttggatctgtgatgtatttgagtaattttgtgattcattgtttggatctgtgatgtatttgagtaatttcttaggatattgtgatgtatttgatttgtgtgtataagtaactttatgatttgtgatgtggatttggtgatgtgaatttgggatgttagtttgatttggggattgatttggggatttgcctacttgattcaggagaaaataaaaaggaaaaaagaaaaagggaccagctgtactacccgctattgtctctttagtcccggttatttcaaccgggactaaagatgtccatccggttggaaaaccgggattaaagaggggttcccaaccgggagtaaagatggtttttccaccagtgacatcggatgtttggacactaattataaatattaaacatagactattaataaaactcattctataaccctgaactaattcgcgagacgaatctattgagcctaattaattcataattagtctatgtgatgctaccgtaaacatgcgccaattataaattaattaggcttaactacacgaggttgacgaaacaggaagcatgtgcaactggtattctgtatgtaccagatcgaagaggtacgtaactcaaatcttcttgtcgtcgccttggcctagcttccaagttttaactgtgcgtaaacttactgctggtaagctatagctagcttggaaaggcgagctctctttgtctgaaagtgtgttctgatttctctctgtctgaaagtgtgtttctgatttcactctgaatcggtcacggccggcgaactcatcgatcggcgccgcagtctcgcagagagagaagaagagcctcttttggctagcttgtgtttggtgacttcacttcagacttcagagaggcccgtacgtactacatatatactgttccgggattctagtagcacaaagttacacagtactgcagctagcatgcacgactgtctactgtctaatccatgcatgcatatatacttgtgtttggtgagagattaatgttctccggccttctgtcctggattattgtatgcatgcatattgtctgtgtcaaagagtcaagcttaagagtactagagatggtacttcttgtggcttttgttgtagctttctactttgacatatcgtccattgccaactagtactatatggacttatgcagcagtggctcatgtgtagtagtagaacttagcttggaagttatagtagagtagcatatgcttgagagggcgatttcagatatccatttctttcgctgcatgcatgcatggcaaaactttagtctgttgactgtgcaggctgctgctgctctctgcataggcgcagccttgcatgcatgcaaagctcgctgaagagatctgcacacttgtcctcatcgtctctttctcgatcgatcgatcacatgcacactctcacagtcacagtctcaggctcagctcacacagtgccacgaacacacagatcaggagagagatgatcgatcgataagctagcagatgcagtacg

SEQ ID NO: 1657 - DNA, 1750 bp, Oryza sativa
taggagaagtcgtgatctgtataatgcccctaaacaggagcaatgtggattcccatcactgaaaattttcacttgtggattgcgtttttctcctgagagtcgcacgcccacagtcctgcacctgtggaaaatcatttcagtggactatatcatttgcgatatacttcatcgtttggtcatagcgagtagatggggttgattttctagctcaagcacctgaaaagtttgtcactgtactcactgtttccataaaggagtatagtgtacgcgtttattggacccttgtgtttgtatcatgctcctactatttaagttgttttgtggagggagtgaaagcttcacctgaaaagtatgtaataggaggttgaaatcgaccaaggcttttgttcccacagagctaagcaacgtacttgcaattgatgctacatggttttcttccgaggaaatttgaatgctaggataaatcccccttatctttgaggggggggggggggataaatccttttgtataaatcctaaactaaaatctaacaaatgaaactcctgttagacattttccacctttagccctttaattctcttctttagcacccctgatgattgcagaatctgttttcaggaccatgcatgtggtggataattgtactgtacagttaatacaaaaaagccatggagaaggtaggtgctaaaaccttttaagtgttctcttctttgacactatgttattacatgcttctttggctttgtgctctctgttcttttctttgcatgaagctaacagctctgtaatttcagatgttgtagtcagagacttggaaactccgttatctcttcagccctgcccaccagcggttattcttgtctgtacacttctcatctctgtttggtactatttttgttttcatattgtctgacagtaggataccatgtagttgtcagctataaggctatatgactaactgtcatggtcaagtaatgtccttagtttttgagggtggtcatttatcagaaagatcaacttgtgtgaagtgtcaagggttttgaccaaagtttttacaaccactgtcatctgagtctgactgatgctaacatagaactatgcaattttaacatgctatcgattttgttagccaaactgagctcatgtatattacttacatgattcccttctttaggttgcaagtgcaggacaggatgctgaccatattactgcgatggagctccttagtgaagtgaaatctgctggtaagctggctgcatcaatatttttgaagcccttttgttttgagggacagagacgacaattagaggtgggatacttctgttgtaaaagttgagtttattttcttggtctatgagttacttcctgtcacctacttaaaaaacgtatgactgtatattaagtttaagatgtctatttgtttttttggatttgcttcttacaaacaattatggttctgcaggcaactgatttaattgacaaacttcaaatgtgctcaaactttcacattggtaatgcgtgttatcttaaatttttaacttcaaatatatagcttatttttccattagagcataaataaaatatatatactttgaagaagtaagcttttcacttcttccagtatgaaccgtatgctctttgcttcattttggatcttggttgagtgaatcattacaccttttgctgatttcctcctaggtagaaccagtgtaaaattaggaagatcaaattttattgtacatatgctat

SEQ ID NO: 1658 - DNA, 1915 bp, Oryza sativa
tgtttaattacaaggatcttgatccaaaccatgtttaggggctaagtggatagattatttcccactgctcctatctaggtttattaaccataaccactctttaagggtagaccaagcagttctcagtgcttattgggtacagttcacaaacacatgctttggggttagtcaaatcaacttccatcctttccatcatcagttgtgatgatttattttgggagctccgctgtatgctactgcaatgtcctaacctgcctaacgtcgatctgaaataactcaaatttaatacactataaggccctttttaaaaattttgaacccatgggtgagccaaaaaagagcatatattttatagtttctttgatgcaccttatgactaaatggaatacttgatattttacttcaacaaatatgatattaatttctctgtatcagtagttggagtcatttttcttgcctgcagccattatcttttgtatttctgaaggcctatgttttattcaggttatcctcttcaaattatagttgtaatgttcatattggattcacatcacaggtttccctctgggatggcattataccatcaaaagagcacgccaagtttttgatccatacaacaaacaagtacagatttattgaccaggttagcacatttctttgattgcatgttaatttagtgaaattcatctaacataattagtttgattgtggttgttgtttagcatttcaaagtagagggattattccttccatgaaaaagataagggtcattttgtgttgagtagattgtttaaaatatgtctacttgatgattgaggtgtgcttgttctgaaatatttatgaatgagaacattttctctttttcgcatattgtgttttggatgggctatgtcaattggtcctaaactcgtatatattgttttgtacttgaaaaaaattctgaatgcatgaaggctcactttttccttagtgatgttttaacatagggtagagtggttggtcctaagcaccgagcacagatttttcaccaacagcttttgggtggtgactcctgctatatgccttgactgtattagtctcgcctttttagtttttttttcttttgtgaagatatcctgttctgttctttgctgattacatactgaatgtaggttgcaaccatttatctaaatatttgcaatggcacattattcattcacacagttgatttcataccctcatctttttatttgggttgcagggaagcaacctcaaaggaaaggattttaacctgacaatgcactggcatattatgccaaagaccggcaagatgtttgcagacaagatagtcatgacaggttatcggctacctgaacagtacagatagaagaacctgagttagctcaatggatgctttgctatacaaatgcagtggttattgcggggagcagacattgcctatgctaagttttttgttctaatcgtagcaaaacatgtaatcttttgtgcttgtgttctaactgaaaccaggcgatacatatgttgtttgactcgtcatccagaagttgagaaagatgtaacagtgtagtgcccttttgatcgagaacccaggcgttgcaaacttgcaatcacgttaatttcaatgtttatgtagcaaatcctagtatttgcagagtcgacgtttgaaggaagagtgcattggttttttctttcccgtttggaatgagagagctttgcttttggtttggatgtccacctcgaattgaaatggcatcttctcatcgatctttctgagaaaacggagaatataccactctatacgtggggttttgatgaaatgacacttaataagatgcaccggataaaatatcactaagtacgttgccaaccggatgaaatgccactttgaggaatttttaaccatttttatgcccga

SEQ ID NO: 1659 - DNA, 519 bp, Oryza sativa
tagtacaatcatcggattctgatttgtttgcacagcacctcaatgttcgtgttttctttgacatttcagaacattgtccctcattctcatgttctttccgtgtacttccctcagaaatttgattatttttgtgcttcactaaagatggctccaggtgaaatctagaaaaactattttgggcttcttcacatcctgtactaataggcaaatagctggatgaggaacatttctcaattcgtgacccttcatcaaacacaagatttttgtgttcaagaccatacttgttcaattcaggtgatgcagaaaacttggtcacaacatcgctggagaatccagaagagaaaccggattttagttctttaaatattccagaatctctacaagcactcgctttctcttttacagtttcatagggccaatggccacctacagccgatgcttctgttacattcttcagctgctgtaatgtaggaacacaaggtcggttcaatacttcagtagagacctcattctggaaag

SEQ ID NO: 1660 - DNA, 565 bp, Oryza sativa
atcctacacatagaaacaacccagtaaggaaaaataaactgcaaaaatgttatctctgaatgtgtattatcttttgtgcaaatattgggtggttccaatcagaaagggtaacaattagaccagaattgcatattgacaacatatcgcctcctgtgtccacctgttcgcaactgcggatcaagctactacattaaaagggcaaactaaatctgccgtataaattgaaactttcctccttacatatgcttgaaagaaccgaaaagaattcctcttctgcatcaagagacgaaaaggaagctacaggattaaagaatcacaagctggcagcacgcacctgttggtagtcctcctctgcatctccacctcatcctggactcgggacccaaacatggcggctgctccccttccccccggaccaaatcttgctgtgtcaactgaggaggccgatcagaggagcagacggcgagcccgatgcttcttcccgccccaaatcaacaccatggcaagtcctcctcctgcttgagaagacttgccaaggactaggatggaacggacacagaaattt

SEQ ID NO: 1661 - DNA, 13730 bp, Oryza sativa
tgccggaggggataatccagccggcgatggactacgcgtgcggctccggcgccgactgcgactccatccagccgtcggggccgtgcttccggccggacaccatgatcgcccacgcctcctacgccttcaacagctactggcagcgcgccaagtccaacggcgccacctgcgactttggcggcaccgccatgctcatcaccaaggatccaagtaagcttcttcttcttcttcttcttcttcacgcaatccagtacaaaatgaacttcttcagattgttcagagttcagactttcagtgaccaaatggtgcagcaattatctagttaacagcctgtaactaatgtgaccttttcttttctgtaatttgattttgtttacaggttatggtggctgccattacagtacgatgtgatcagatcacaccaagaaatgcggggttttggatgttggacaggaacctctgaaagtttcaggcttcagaggtactttgttctgatgttgctaagggtgtttattgcagttgatcactgattttgtatagagtaaaagggctcaatcaatcctatttagagagattcttctaacttttctttttgggcacttcttattgttttgtattgttctgaataaggttatgtaatttgccatcttagtaaattatcataaaggcaatcgaggtaacatctgatgaaagtacaggtaactgcacaacagtgatcactgaaaaaccatcgactgtatgggcaacatttttcagtgccagatggtaatgtttattctggcacatagcacactttctcaagccttatctgcagcgtaagatttacatccatgcgcgcataaatcgacctattactaacctctgaacggttgccactgtgccctccttgctcatgctggaacttcatctgaagaagggaatgactcaagaacataaactggatcgccgaccttgatgatccttccttcatcttttgccgacagagattccttgcagactaaattttgcccaaaatagacctacagaaacagaaggcgatgaatatggtcagttcttatgtacttaaactactctcagcttctcatagtctcaagtctccctaggataaatccgtgacagtttaatgacaattacccggcgtttatttttgtggctcggccgcaacacttcatcaaaccggagtgcttgtagagcttccgttggttcctcaccaggaatcccattatcttgattaatagtaggcacctgaagtagagtacacaaaaactaaggcaagagtatagctacactagctgtctagcttggcagttcaagaagtgcaaagcatacagacaaactctgatggtttaactctctagcaattttacataatttttttttataaataactgttgtctgaatgactccagaatcatcccttagtttgtcggtgctaacttcattgcaaagttaaacatggcagatctggagtctatgaaaaagcaaactacacactttatgctcatgcagagaacaactgaaatatcaattacataaattaactgacagtatagtcgttaatagatcatacagagaacaactgaaatattctaagaggcagaacaactcattttttttccaatcttccatcatgctgcttccagacaggaaccagtactttaaagccaccaaagtgcacaacactagagctgacagttttaccttgcaacgatcacataacttgacacctaaaaatgtcagtttccctatctttatggtcttccacagatcctccgagtatggatgacatccatcaactataatactggccaaaagaaagcatttgcaaagaaaggcattattacagaatgacaggtagatttatgcaagtaggtatatagcaaaacaatccaagaaataagctgtgaaaaaatggccatactttggtctgaagcgattcattggtacaggttctttaaggatactgtttagtgcatccactgagccctatagtttcgatatgaactgtcaagtgtcaactagttacagtattgtgtttagaagaaaaaaagaacttttgtacagcatagaaggcctttctccagaaaccacagaacagcttaatcatacctgggaggccagcaggaatgggaagtcgtcagcaaacagaactttgtaaccttgagcatagtcaggattggtctctctaatttctgatgctgttgaaaatatcacaaagagatatatatttcataagcaaagcagatcctttttaagtcaaaatagaactttgtaaccttgagcatagtcaggattggtctgcctaatttcttgaaatgtataccttcattaaaccgtacgagtcgagtcggcttcccaaagtaactggaaaaccattcggccgcctcatctccttcatcatacgcagaaccagaccactcccagatagagacatcatcaactgtggcacgtttcgcgccaagagggatcttcagtggatccaatccgggtgctctgataactgcaattagcaatgcctcagataaaaatgatatccttagcacacccactcgaacatgaaagaaaaatggcatgacattgtgtgattgagcatcctgccaagaacattttagaaccaagaaaacttctgcagaggtaactggcttattttagcaaagaaagcaaaaaaaaaaagaagaagaaatagaattagtaaatcttattgattggcagtcaacctatcatgctgacacaaaagataaatcaaagtagcaccactgcactttacaacctccccttttcacatcaatgcagtatgcaacccatttttttttcacacaatcctatagcaattaatcaattgtattccatgttaacaaatcaatcaagttcacattataattgtacatactacatagaggtacaacatacatggattgtaaacagatgatgaaattgggaaatacccatgtgagaatcaggcgttggctgccactcagtgaacgcctcttgcggcatctccacctcaatcagcgcgagcttgggctccactcgctgggtgaaggctctccctgcggagttcatcaccagccacggtcgatcccacctcaaccctgcccatccaagctcatcatcaaataaatcgaggaaaattcccaaatttcaagaaaggggagtaagcagagcagagaagcaccggtggaggtgatggcggcctggggcacggagatgcccctgcatgatttgatggggtacacgacgattgacttcaccgtcgccgccgccgccggctccggctccggcggcgcctcgccgctgccgcctgccttatccatggctaatggcttgctgatgatgccaagcctcctgccatgcagtggcaccacgattttttaaaatcatgtccaatttttgcattttattagtcggattggttcttgaaattacaatactgacccctatctctatgatttgtagtactagtatataggagtatgtgaaattttacgacacgtgtccaggattcttggaattatgcaactttagtgtaagctactgtagtaaaatctgaactttactgtgcacaaagtgaatacttcctccagcatgggatgggcatatgaaactgactgttcttgtgattctctacattctctgaaagttttaggcttcagaggtacaggccgttatgatgttgctaagggagtttattgcagttgatcactgattttctattagagtaaaagggctcaatcgatcctatttagaggggtcttctaacttttcctttgtcacttcttatttgttttgtattgttctgaataaggttatgtaatatgcaatttgctatattaggaataactatgatcactgaatatcaattgtatgagcaacagttttcagtgccagatggtactgtttattctgccacataataaaacacattttctcaagccttgttgcagcataaaatttacaatgatgccgagaaattcagcattctacagtactactaggtctctgaacagctgccagtatgtcctttgctcatgctggagcttcatcggaagaagggaatctctcaagaacataaaccggatcgctgaccttgatgatccttcctttgccctttgcagacagagattccttgcagactaaattttgcccaaagtagacctgcagaaggcgagaaaacagggagttctcagtgacctatatgttctgaacctggttcatgagcaacttgaaattgcagattcagcacatttgcatttagtaattgcataattcaggactccaagagtagagtaggttgcaggaattgattacctgccgtttgtttttgtggcttggacgtagaacttcatcggaccggaatgtcagtagagtttctgttggttcagtgccaagtatcccattttcttggttaatggtaggcacctgaatcagtgtaacagagaaactaagcaagcggtacatgtatattggattaccaaagtaaaatgtcagataacaccaaaaaaatatggtgatgtgaaatttaagtcagactccatttcacatacaagtatataacctcaggcttcttcatttaatgaaaactacccatggcacccatcccattgtagaatcacttccatgattcaaagttatatctcaactaaacaaaggccacatgccaaaactaagttggtgaccattctatgtatctgatagaaatgaagagagtatggaagattcaaaaatccatgcagaatggttatatatactcagagagttatgatttaacagatcacacaaaagatttagtacaagtaataatattaaccggcagaaccatcagttatcaagtatccaagtatcctctcagacagttttattcaaggttaagagagtatgggttgataatttgaaaaaacagggtcatatttaccttgcagcggttgcataacttgacaccctgaaatgttaacttgtttatttttatggttttccatagatcctctgagtatgggtggcatccatccaccaaaatgctgccaaaagatatcactttgtaagaaagcaagtgcaacaattgtcaaactaacggtcataatttaatgaccgaacagtaagttgtccataaaataaaagcgcacagatgtgcgggcttactttggcctgaagcggttcatcggtacaggttctttcagaacctcatttagtgcatccaatgaaccctgcaattcaacatgaactgtcaactgaacttttatgttgagcagcacttgctcaggacatctatcagcagaaactactgagcagtctgatatgtacctgggaggccatcagaaacgggaagcaatctgtaaacataattttgtagccttgagcatagtcaggattagttggtctgatttccgaccctgccaagaaatccacaaaacagacattctcaataaacaacagagaaaggaaatccgtactctggaaatcagaaaggttccaagacaggaaaaacagtactagtactactaagatataaaccttctttgaaacgcactagacgacttgggttcccgaagtaactggaaaaccactcggccgcctcagctccttcatcataagcagaaccagaccactcccatacagagacatcattaattatggcttgttcagcactgagagggatcttcaatgggtccattccaggtgctcttccaactgcaatttagtatcgcagggtagctcaataaaatggtaatttaaatggcatgacagattgacagtgaagctatcctgcgtgtgcggtgatgtaaaattcaaaaggcccatacaggttctactttttttttaatgagggggcaaaatcaacatttgtccagtcctacttacggatcaactattaacattcaactacatgtcaagataaaactaacattcggtaggcgactaattatctaaagcaattcaaacgttatttaacacagatgaagggaaaacagcattggctaaacattcttcagattgtttaactgaaattaatcaacagatggcatatacagaagtggtagtaaatgatgagataatagagggagaaggcaagaatacccaagtaggaatcggcggtcggccgccactcctcggcgaatgcctccggcggcatctccacctccaccagcgcgagcttgggctccaccctctgcgtgtaggccctccccttggagttcaccaccacccactgccgatcccaccggaaccctgccgatcgattgacgccgcaaccatccatcacaaaccacttctagctaattcagaagaaagattcttaatctttggagaggatgagcgacaggtaccagtggaggtgattggggcctggggcacggagattcccctgcatgacttgatggggtatatcaggatcgacctcaccgtcgccgccggctctggcggcacctcctcgccgccgccgaggagggaggagaggaatccagcggccttctccattgttcggctggcttagcttagctttgctttgcttgccgcaagcaagaaaacgaaaaaaacaacagtgataatctctttctcgcctagtgaagtgcgctcagtgccagtgaggtgtgcatttggtttggcggcacacggcaatgccaagttacaaaaatgcccctgctttctcagcaaccccagatagtataatctttgcacttggtagatgtatactccatttatcccacagaaaagagtgacatattctaatacaataaattcgaagaaacatatgtttaaattaatagtaatagaatatgtcacatctaatatcaggttgggttttttatgagacagatggagtacttatcataggaaaaggtataaaaaagtgaactttcagttttgctctagttgtggttgtctttatctctatgcatatcaacttcagcaatgaaagtttcagttctatacttccacttaacaatcatcttcatgtggtgtctttaacaaatggggcacctggaactcccaaatttgcactttgcacagcactcactgtattaaaaaattctttcagcaaccatgtctgaatcatgtattcctaaaagaacatgtttgaagtttgaactagtacatcacaagcaagttcaattacagccttacagataacacatatgtacacatagtagtagtatagcctgtctaacatttatcgtatatatacagaacaactaagaaatgattcccaaaatccatggtccaaaaagatccataacattccatgcccaactgctcaatcatcgtacaagtcgagcaggagtgtagtgcagcgacagatgctcctctctcctgaaaaccaacacattaacacaagaacgtcagcactactgcatctatcatctcgcaatctcatcataccaatataagaatccatgaacatttcatgaaggggatgaagaactgagggtttaattctgcagttgcagatactgacatggggaagacgaagtagagcaatgcgagcagcagtgccagcaggaagcaggccaagccgacgatggcgtaggcgcggccgaggaaggcgttcttccctccgagccacccggcggtggacagcaccagcgacttcttgccgttgaagctgtacgagttgtagttgttctgcatcgtcacctctacacggtcaccggcctgcagatccatgtcgattctcccgtacagctttctgaatgttggcagtgctgctattctcatccagacgatcagatcttcctgctcactcagctgttgaatttgcagacacagaggttagcatgtagcaagtattacttcgatataaatttcaactcaatcttgttaactgttcttggcaatgtgccttggaaagttagacaatcttacactgtatattcctgaaaatagttctgaaactcaaaactgaacaactattttgctttgaaaatggctatttacgacgaaccgtagagaatggacgcatgacatttcagtcgcaagttaccaaaacacttacaggtttgcttggatttaactgccctccaccaatcaaagtcccattctgaaagtttttaggatacacgttcttgccaatctgcgattcctttcactcttccacgaaatgccatccttgttcactctcaatgtctcgttgccatgaccacgagtgaagctgtatgtgtcgttgaacaggctccaagctatgagaccacaaggaacaataggtctgccattcgcagtagcttcagggctgcagtattgcgtgtcggccaccttcttcggatttctcagctgcatatcgttgaggctcttcacatacctgcgttcccaatcagagtgattcaactcagacagataggttttacttttgtatgaattggtcaataaaattattagccagatttctaccttctgtggttctggtagaacttgtcaagttgataatatatgtaaatcggcttcttcatatctttagggacctgcagggaaaaaagtcgttgttttaccttatcgatgaaagacacaaaatgtgttgttttcactgtgtactcaaaggaaacagttttaccttgaagactcttgtgcaagtcttatctattgatgagttttggataaaagcaactttgttgcgaagcatgttccgtggcacgcattttgtatcgtaacgatcaaccaattcaacgacctatttgaagaaatccaaacataagatggaagaaaaagcattcatttaccaatttgaataataatagcaagcacaattcaaccttaccttatttgaggctgcaatgcaagcaagaccaattggaatgaaaattaggcccacaaacactagtacaagaataacctgtaaattattcaaaattatgcagacagtcatcacatgttaaacttcccagccatattcataccgagaaaaaaatgttgaacagtgagattgtagcaaacaactgaacttacagtctggggtatcagtataggcttgcatgcttgaagttcttgctgcgtaaaccgatggtcttcaaaatcagaaagagtggatgcaaataagcacttgtttcatcagaagtaaatttcatgtactataaatttatccccaaactccggaagccattccaaaacaaagataattgcaagtgttgctgcatatactatacagtgctgaaatgaacacccgatagaacagttaaagatccgaagcaggtgaaggagtatacttctcgaaccaaagcggttgtggttaccataaaaattcaagtggcagcagaaagaaacataaattcaattatctggggagagagaaagagagagagagagagattacacttaggcctgttgcgcttcttcacggcggctgcagagccatcctcgccggagcttggtcctgctccgtcgctattcactggtggcattcttgtctccggccaagaacttgcctcagtgaagaagaagactcctctcctgcaactgctcttgagaaatgcaaagagaataggtaactgcccaaaatgtcagacaagaaacaaatagcgaggttataccggttttcagagaggatttcatcaggagagtacagaaacgagggaaagaattaaagaaggtttaggagtagaggcaaagcaaggaactgaaaggctactagtaagagtgacaacctgtcattgttgagagcgtcttaaacactggaaagttaaggatcacctaaccggtctgcatcacatggccctttcctctgaagattttgttggtgtttggatagcattggctggttgaacctgtgtatgtacctcgaatccacatgaaaagtcttgctttgctccgatatgttcatcaacaagacaacaacctaagtgtggggcccatgtgacagctccaatttgctaaggacataatttggatgccacacaataaatgaaaaaaagggtatatcataggacatgctccagagcatgaagtgaaatgatgcaaaatatccaaaaaaaagagagagtttaacctgacaattttaagtcactgtaagcaaagtttgccaaagttttggacaagcaacacaacatggtacctacttcaaccccaatataaaacttcacccctttttaagggaacagctcatgaggtcaacattccattgaaattattgaggtacaaacggctgcaaaaaatgcattgttgagtagtaaggtaacgccatcctcagcacaaagcaggctcaatgaagctcctgacgatcgcctcttacgtcttttctgtacctcaatatctcaacgcctaaataatcgacgattccttgtaccgcaacatgaggtttcccaactttcactctgacggctgagatttgagggaatttcagcaatgtggcactcgcgatgcgatgagctactgcttccaaaaggttccgcgatgggctttcaacaacatccttggcaatcttatagagcatgaccaattgaacatacttcagttttccaatggttggaattggtaagaataagcaaatagcagccaatgactttaccattcttaggttgcggaaatgaataagcaagtttaaatttttaaaaagtattcatccaagccattttaggaatactttacgaagcaagaaggcagaatttggttaccaataatgccattaaatccaatagaggccctttattttattattgaatatttaattacctggtaaaatttggggaagctactggaataagatcgcggtcagtttccccagcagcactcaaatccatccacgcatcaacatccacaacaaacttttggcccagagtcttctcttcttgtttcactccatggaaaccatggaactgcaaacctctaagtataagtttatccttgtcgattagctccctttctgccataacagtacctaaaacacagaatggattactcagtcagcacatggaacaggaggggcaatgaattacgaatgcgcctagatgataagaccatatttctgctaaccaccaacaacaattctgtcacctagccaacttgaatgaatcgatctgaagacttggttgaacttgtactaacctgacctatccgtgctcaattgattgtgttgtgaactgaaggaagctgtgtgaactgaactatagccaggagattgccgcctgatggcgaggaagcatgggagaccactggagatggacacaaaatgtttatatcctgaacttttagacttaggcagatgtgcagtctgacccccaaagctagtgcgtgcaaatgagagcataagctgcagcataacagtagaaggaacacaactgtcttatcttattaagtgtcagataatgagaaagagcaacagcatattcacacaacaatttgatatgcttcacagaattagtaaaagcatcgtgattacccagtaaaaaagggaggcatgtcatacttggagtgctaaacaacatcaatcaccaatcatccaaataaaaaacccccagggcctcaagcaagtaaattacagattgatcataggcgctaccacgaaaattgcttatgaaatttgcgaattacaatatcctccattcttcatacatggacgaatactgctaaaacaatcaaatcttttccgttgtaatactaatccgtccccaagaatttcccaactcaaaaggatttctcataatcggtttaaagattaggccagaggaacgaagaaccaatcttcaggagaaaccattatcatcacaagaaaaaaaaaagaggaatctctggagggagatatactaaacaagaaccagcgaagaacttgagggagatgaggaaaagaatacctgagaggccgtgaatccttgcgggagtggatcaagaaacacaaaaacccttctcctgggcttgtcgatggagaaggcggcgggagacgacgaggaatgagccaagatgcctgcttcccactgttcgtccctcccttatcttatctcttcccctttcctttttcgagcttttctcctttcccagaaaaaaaaaagtctttgcagcccaaatggcaatagaatttggccgtcatgtcatcggcaagattttcacagctttcaggttggtcgacttgcgatcagcttctgcacttcacagattcagctaagctacgctggatgaacaccaagcaagacgagagaaaaaatgttggcagtaaaagtgcagtttctggcgacagtaaaagtgcagttcagagaaactttttagcgcaaacgatgattgttctgcttagaaatggagctcaaaatttcccctttgaaaccacattacaccgcctcgaaggcttgaaagaaatgataacgcgtaataattcagtgactagaaagagaagcataaaacatttgctcggttattgagcagcaactgaaatcaggtttcctgagcaaagttatagtaagacccagaaactacaaaattttggtcagctcaactctttaactacagcagcagagcatctacaaattcgagatcagcaactatgagtacacagtctcatccttcgtgtcacagtattcaaaaaatatttcagtactcaaatttacgaaattaagacatgcttgtgctcagccggacctaatccacgcacatggccttttcttgtttatcagagcaggacttttattgtttcttgctgatgctgaactttgctgatcaagactctccaatttccaacaactgggtcagaaggctctaaccagtagaacatgaaccagaatgaactcacaggttagaatgtccaaactcgagctcctttacaaactggaaacacagaagcattatttctcattttgttgcctggagactaaacacatggcatgcgaggctcctattgcaacagaaatgacacgatgagggcccaaatcctcatcaccgtctgtgagaaaattaactttaaccggtagcggctgaatttctggcaaaccagggacacctaactggcaatctcttgcatttccccacatgtacaagtcacctttctctgtccagacaattaaacaaaagtaaactcgggttagttgcttagagcaaggaaatttagctgcttgcatgatgtagaacaagattaaggaaaaccaagctaaaacatggcacagagaaggaatctttgtacagcaaacttcagcattttctactgacctttgacacgagatattttttccattttatttaaaaccaagattcccctttataccatatttagttagcaaaactacaagagatgactaaaaacatctcaagaatcccagcacatcaataaagctttcacctgatattgcagcagaagtcgaacctccacaggctatatagacaattcgttcttcagacaaagctttgatagctagtgggactctatgattctgaagggttggatgcccaagttggccgtgtccaccatgtccccatgagagaacgacaccttcatctgaatacagccaaagaagcaagacgttagttgtgtgctacaataaccaccatactttcttctataaatgcaatttatgagtgaaaaaatctctctaactattattgccttatactgtttgttgcagttccaaaagaaacttgactcattatcagacatggtatctgattgaaggtcatcattgcatggtgcaaaactggcattaggtatggtcaacaactcacttagataatattttaaaatgcaaatttctttatttttcacttctgtatgaatgttcgtcgggaccttggttgcaaatgcttgtttcaccagtataatacagttttgaatttag

SEQ ID NO: 1662 - DNA, 1419 bp, Oryza sativa
ttcatgtatcctgccatggaggagggcagcagctacctgcgtccgttgcatttcttctccatcttcgttgcattcgcttccttctcacaatgtggtatgctcgtaattccccatgctcttcatcccaattcttgtctgtattttgtggtgatttaaatttggatcatgttcattgttaagcacaaccaaggcttaactacgtcgtgttcagatactctgaccgtcaaaagaatatatatccttcaataagctagtctagtgccacaaattggtttttttttttgacggtttttttctcaagcatcaaattcgttgacccctataagctgacaatcaaatgatttgttggttgaacaggagcaagagtgttaaggccagatgagctactactcgatcactactactaccactcgtcgtcgtctgatccatactacagcacaccgatccttccaccctacggcgacgcattctcaccgccgaaccctcctccccctcctcctccgatgtcacccagctgcctcctccctccgatcattccggcaccaacattcacatacagttctcctccaccgccgccactctactaccctccaccgccggatataagcccaagcccgccaccgtctgttacaccattgccacctgtagtctacccgagtccaccggaagtcacacctagtccaccggaaattgcaccgtatccaagcccacctgaaattgttcctagcccaccagagatcacaccgtacccaagtccacctgaaatcgttcctagcccgccggagatcacgccatatccaagtccacctgaagttgttcctggcccaccggagatcaacccgtatccaagcccgcctgagattgttcctagcccaccagaaatcacgccatatcctagtccacctgagattgttcctagcccaccagagatcacgccatatccaagtccacccgaaattgtgccaagcccacctgaaatcgcacctagtccaccgatcgttacaccgatgccacccataatctacccaagcccaccggaagtcacacccagcccgccagaaatcacaccttatccaagcccaccggaagtcacaccaggcccgccagaaatcacaccttatccaagcccacccgaaatcacacctagcccgccagagatcacgccgtatccaagcccacctgaagttgtacctagcccaccaaagatcaccccatatccaagcccgccggaagtcacacctagcccacctgagatcaccccatatccaagcccacctgacatcgtccccagcccgccaagctatgagcctagcccacctagctatgaacctagcccaccggagtacgcgccagaaccaccggtgtacgcgccgtatccaccggggatcttcccgagtccaccggagtactcgccggagc

SEQ ID NO: 1663 - DNA, 1032 bp, Oryza sativa
gcatatatagtatacatgaagttgctccagcacatatttaatgccggagcattgttatcagtaccagttttctcttttaggtgagaatcattatagtggtaccatatatctcttcttgcacatgataccctcgtttgtgcatgacatttctctttttagccctcattttggcctttaagcattgccaaatatttgggtgtaaaggaagcatctttttatgtctttttacgtgcatcagaattaggatcttatgactacttgtaccgcggtccacattttgattccttgcactgcttggttttgatgattgtctaaactgaatgtgctgaaaatatttgttttataacctgttgagtcgcagtaacttgtttagcatccaatggagagttcataccatgttgtcaattgatttgatctttgcatggacaaaatattgctgctatatagtctaatgttatgtattctgtattttttcatggtcagtttagaagggcttggattaaaacaacttagtaatttagtatagacttaagcttccccacaaaaaggaatctctgtgaaattaatcttaaattattctaaagataagtttaggaaccatctgtattaactccttaggtttagcgaagtttaggcataactgcagttcctccggcaagtccctaaactcttgttagatgaagttctgtttgagttattctgctgctactatagaatatttattttctcatcagtcacggtattaacgtttcaatatttctgagtagctgatttgttcattcatctttgtcagatttttgtaactaatcttctttaaatccagttagtatatcgcatagttcatcaaactcttcctttattacacttgcaatactgaatttggcttctgatttcactctgcaggtcaagttctgcatgggatacagtatatggatttcttgtgcttcatttttttattatacattcgaagagtctgcttccttgttgtgaagctttttatagaaacttattctttgcacaaggctggagcac

SEQ ID NO: 1664 - DNA, 1049 bp, Oryza sativa
tctttgatatattcatccaagcccatcttctccagcaccacattctcctggctaggttttgaccgattcttcaggcgttgctcttccatttcctcccacatctctgtacccctctccatgttatcttcagctttattgaagagttccaggacttcagatgatggccatgtgtccaggtctacgctactaccaattgcataataccatgacagttttgcttgctcaaaatgttgatgtgcaagtgcaagaaaaccttcgaaaaagtttggctttgccttcacggcttcttcatatctcctcccagccttattgtactcttcttttgcccattcatacgcttccttcacttgttcaagtaccgattcctgtggagagtctcctggcagtaacaacctcttcctggcccgagacatatgaacattaccccaatggaaaaacgcaagcgctgccatctcctggaagttgctttcagcaagttgaaacacctcctgggcttcctcagtagtaattgtgtcctcgatagcctcggtgtacagcttcatgctgacctcatggaggtccaaatactcatcagagctgaccccgacatggttcttgaaaagccgagcaaactgcacaatccagtcgtcaatgcaagtcaccgtgctcctatcctcatcctgcctattgcttctggtacttccattgtcggaattcacgtttctctccaacggcccgctgttggtgtcatcaagataaggttcatgctccggattggcctcggtgacatagagcctaagcgagctccctggctcggccaaatcctcagcccatttgagctcatcctgattggtgattgtcaccaggtcaccctctttgtccttgtacttgacaagaacagccttgagccccggaaacttgctccggacagcctcgcgaagctgtgccatgctgcagctcgccggcacctgcgcccacctgatgtcctcaccaaacacaagcttcacctgccttggtggctcctccacctccttgacaggctccaccaccttcgcctcctcctcctcctc

SEQ ID NO: 1665 - DNA, 2042 bp, Oryza sativa
cacaaatccccttcaaaattctcgcaaaaatcggtacaaccgaggtggaatcgggtagaaatcccaccttcccgcggagaaattattggaaaaaacgaagccgcgcgaggctctgctcaaaacccaagaaggcttgaagaatcccccaagaagaggtcaaaggaaggaggggacaggaagggaacaaacacgggtggtcggaacgacggaacaggtggtggaagaatctctcgggacgctgcgtgcgatgcgtggaaccaaatcaacgaacaaaccgcaaggccaaatcagccagccaaagaaactcaaaattcttgagacgagacgcgaacgtgaagaagaggaaagcgtggggggattattttggaatttgatgatgcgtgcgtgcgctgggttttccgggtatacggcatcgggtcggcgggcgcgtgtggtggcagcggcgggagggggcgccgatgcgtgagctggagtgacgccgtggaccgtggtgggggtcgttggttggcgccgattatgacctgccaaaactggtctttccgcgtagtaatgacctggtaaaaaccgcacttgcttagcttctgctaatactactttccttcttcattaggttagggtttcgtggctgctttcggtgaccagacaccgtgagagaccacctctggtggcctggcccacctcatggaatcatgggccgctctagtaccggcctgcatatcatcaggcaggctactgggcctcttaccaggctaccggttccggcccattgcttcccttcggccggttctgaacgcaacccagtcccagtgattcgtgttcaaataggctttaattatgctgctgtcaatttcaaactcatcgtgcagagtgtgatagagtttttcttgtactacgtacacagccaagaagcacatagagttttcactccatcgatctgacttgtgtaaagtgtctgcgatagaaaatgcgtacccatgagcagaagaaaactgaaagaaatcgtaaactatttctacctacgtaactgcaagccttccttgatgaggtatcaagtagcagttagcagaacgacttcgattccaaacactgacaggctctcaactctccgtgtggtacaagcccgacgcttggtttacgaacaacccaggtgccacgcttatactgattaactacccagtgcagctataaatccatatgaacaacgcgaacgtcattttgacatggggatcgagtgctagcaaacaagttgcgatgaactttgcaacgcttgtttttatctcagttaactttaaatactctcagtatggagtagttggaacaagtgcaggcagtatctgtttaatgcatggttcattcctataaatatcagtaatctcctgttccggacgaagcaatttaattaagctcgatctcagattctcagagtgccaattaagctgaccacaggttcagatcgaggcgatgatttccgctaagttgcctctcattttcgctctactatcttctgctactctcatctccgttgcaccttctgttcgtgcagctcgcctaccatcttcagtccttgtgagaggcgccggtgaattcttggagcacatagggaaggaaatcgcgaatcagttgagtgggagcagagattatccgaacgaaggtgatcagtccaacagcacccggcggggcttgtcgtcgacacccggcggggtgcaggagaaacatgtcgagcctcatgtgttcctgggcattggcacgccggcgatgaacgtcacgctagtgttcgacaccaccagcgacctcctctggacacagtgccagccatgcctgagctgcgtcgcccaggcaggcgacatgtacgacccgaacaaaaccgaaacctacgcaaacctgaccagtagtagctacaattacacatacagtaaacaatccttcacctcgggttacttcgccacggagacgttcgccctgggaaacgttaccgtggcaaacatcacgttcggttgcggcacgcgcaaccagggctactacgacaacgtggccggcgtctt

SEQ ID NO: 1666 - DNA, 2180 bp, Oryza sativa
ggttgctacctgcgagatcggttcttccacactcctgagaattttcagacaattttatcgcttatcaggcccgttcatggttggtggaagctcttcagtcaccggtctagttgattagaatccatactgatcaaattaaggttcccaatttggtcaattttagcagagcacgtgcgagctcaaagtgcgacgtggtgtgtaaggcgtcaatcgcagctaacgcgttggttgcaacattcggggaagaaggggttaaagcggtcaaggtattgaatctttaatttccaattacgttggcatgcgttctttaatttcttggtctagtggtggtctgtccaggccgtctggaaaaattactcgcggtcaagagagtgaaatggtcaggaatttacagcagctatttctgcttgacgggggcatgcacgcacacattcaagtaaaaagttaaaagaggagattactcgtccacgtagaaacgtcacatgtaattatactttttttaagagcaggtacaatagcaaactataagccagctataaacatattttaaaaagataaaggaaaagagagaaaaacagcgggctacagatatgtagccaggtacagcacgaacttcaatacgtaatgttacgtaatgtgtgtatgacaggtatgaccagatattaataatgtagtaaacaactattgtatgaattggctattttattagctatagatgatttaaagctaatagttagctatactgttaaacttgcttttactgattctgaactggaagaataacatgaaacgatatcaatttgttactgcaaatgtatagcacttttgggccttttggaccttatttacaaacgaagaggaatgtatgggccgggcctacctcctcgatctgtacgtgggctgtatctgtaattgatggcaactaaaaaaccgagttcgaattggagtacgtgacagtgccaactgaattaatataaggtgacggaaaccgctctcagctcaacgcgccgccacaatggctagggccgcgaaccgccgccggcgacgtggtggggtcgtctatgcggtggtgctcgacgacaaggaaggcagcctggtcttccgcttccgccgcaaggatctcttctccgacgacgacgacccgccaccggcggggcggcgccgctttccgcgccccgtggcgcacttccctcgcggctactaccactacgtgtttcactccttcaccgtctccggcaagcagatcctcggggtgagccccttcggcgccaccgtcgtcatcgaagacgacggccgccccggtggcagcggcgctatgcgggccggcccggagctgggcaccaccacgtgccagcctatcctgctccctatccgggaagacatggtgctcgtcatggcctatcttccacagccggccggccggagtaacttcgccgtgatgcggcggctcccagacggcggcggtggtggcggcgggtggcgtgtcgtccctgttccggagccgccgctcgggggccccggagactactactgccgcaagccagcgcccgtcgtgacggcctacatgaccatcggccggagagcgtgtgtctccatagccggcgaaggcaccttctccctggacgccggcggcgcggcggcgtggcggaaagagggaagctgggagctgccgctccacgggcaggcgatgtacgtgcgggagctcggcgccgccatcggcttgggacgcgggccgggcccctacggcggggtggtgctgtggctgtgcgcctgcgacgtcgaggccaggccgccggtgatccgccggtcgtggaacgagaccttccccagggagctggtggccgcgcactcgcagtatgactgtcctggtaacctggtgtatgtcggcgacggaaggttctgcatctgctgggtcgccggcgtcgagcacgaccgccccgagacaaacgacatggtcgcgcgcaccgccgtcgtcaccatggcagtgcggctgaggcgctccgccggcggcgagctccagctcaccaagctccgctaccacctcatgtcgccgcaaggcagacgcgcctacttcgtccagccccacattccttaaatcgaaggagtgaccttggaaagatcgaagaaaacagacaatatgtcagtcactctatacgtgggcgatgaaataccactcaaag

SEQ ID NO: 1667 - DNA, 2792 bp, Oryza sativa
gatacagagaaattaatatcatatttgttgaagtaaaatatcaagtattccatttagtcataaggtgcatcaaagaaactataaaatatatgctcttttttggctcacccatgggttcaaaatttttaaaaagggccttatagtgtattaaatttgagttatttcagatcgacgttaggcaggttaggacattgcagtagcatacagcggagctcccaaaataaatcatcacaactgatgatggaaaggatggaagttgatttgactaaccccaaggcatgtgtttgtgaactgtacccaataagcactgagaactgcttggtctacccttaaagagtggttatggttaataaacctagataggagcagtgggaaataatctatccacttagcccctaaagcatggtttggatcaggatccttgtgattaaacagagcaataagaatgtgagaaactagtggtgataacataataatgatgcgtggtgaggcaaaatcatcgtggttctatgcttccagagtgacaacacacccactagtgatctctgtggacattttgtttcccgtacagaagaaagccatgtaaatatttgaagatagtagacaacagagcatcgaaaaataatcatcaatagactcacttgattcaaggcattttgtggagtctcatattcagctgcgacaaaaacaaagacctacaaacatccaaggaagtatcattaagaaagcagcagcaggaaaaacttctttagtatcgaaaagagtttagatggcatgtccatatgaacttcagagcatgacaacataaaactacattaaaacttatagaaaacaaaccaccgctcaaaatgcattgaggtcattctgcacaccagaatcactaaacaaattacactcccctggaaaacatagcaacaaacttccattttgtttcactctttcacccacaagatatgtgttggagaacttgccttcctttagttgagcctatttcacaattgccataagcccataactcataaactaatttacttgatccttttgtcagaatcctgccttgatgcattatagggagatctaagaagctcataaggtatcaataataatgcaatactagtacagtttacctgttttgtgttccacgtgaacagagacgagaggtcagccgaaatgttcagcgtcatgctgacctaccagaggaaacataattgtgtgagttcatggcatatcttaatgttgtttgaacaaaacttttagagtttcaggagagagaaaaaatgatatgaatcacctcgtcgttgccgttggcttccttctgaaaccagtttatgttcaagatctgcgcaattaaaacgacacagaataattagcagaacgaaagggctcgcgagagagagatcggacgagctaatcaagcagggagagcacgcagatcgagcagccggcggcgaattaagttggccgagatcggtacagacgaggcgaggcgaggagggggttgagagagatagagcggcggggcgcggcgcgggcgcgggctccggcgaggtttaccttgacagaggcggtgggggaaggggagttgaagtggtcggagaaggaggcggcgaagcacatggcggccaggatggtcaccgcgaacgtcgccaccgcgttggcgcggtgcccgaacgaatgcatcctccccctctcctccccgacgagctgctccctctccacggtcgggtagatcgccgggcttcgcttctccgcggcggcgccggcgacttcagttcagctctcctccctctctctctctctctctctcttttttctttttctcagaagatttgtttatttttagcgttggggaagacgaactgaagtcgcgtgacgggttggggacccacgtgtcggagagcgtgggccggctgagttggcagccgctgattggtcgcagcacgtcacagaggagcacggctgtacgcctgcaggtgggctagcgcattgaacggcccgtgatgagaacagtttgggcctgcaggtccatggtaggcggaagaacttccaattgggcctgtcactcacacggctcatctggcttttcaccctatggtaagcaacggcttgccaaaatttaaattttaaaacttgatttttgatgtttttttaacaatggcttttactactaagtcgcaaagaactcatattaaaagttttacctataaattattttgttatcagtaataagtcgttgcggcatataatcagccgtgagcaactgatggggacctcttttcggatgcgtggagaatggagatgtgccagtttaagatgcactttgtttaacaatgtatgacgagaaaaaaacatcgaaataaaatgatatctcgaatctgtaagttaagccaccagatatattactcaaatataatataagataaaaagaaaatttaacgacacaaaaaaggttcatacaaactatggaactatacaaacgtgccatctagatggccaagcttgcatgcatacagttacatcgatcataacgtactaaaaatctagctgcaaaatcacacacaatgacacaaaatcatagtacaaatacttggattaattccgtatagaagtcgtcgtacgttatcctgtggcggcgagaaaggccgcgcagtcgagcggctggaacgagacgacattcttggcgaggtcgtagagcacgagcgtgtccagcagcgcccagctacccagcaccgggacgccgttcgacgagcttggcgtcatcgtcaggcagatcaacccgcccgccgagtcct

SEQ ID NO: 1668 - DNA, 1061 bp, Oryza sativa
tttgaaatgttaacatgagacgaaatcgataatcttttggcaatttataataacatttgctgatttgtgtacaacttaaagtcaagaggatgaaatcatgggctggccttattattagctaagtgatttatttgtttccagtgcaatttcaccagataataatgcatttcccccctacacagttattgaagctgattcactgcttgagacagaagtggaaacccttgctgaagctctggaaagtgccaacaacgctgttctgtcaactattagcatgatatctatcatgatgtctgtgagtcttaaatcccttattttttgtgtttgtatacaaaggatcacattttactgttttaatcctattattcttgaataccaggggttaaatcagacgttccggagttcgattaatgctcaaattatggaagtccatcctgatgaactaggacaagtaacctcatgaatatctttactgcttagttgtatgatctgcacttatctttttcctgatacatacaactgtaacagctactcagaagttatggagaagccagaattggatttggtgctggttataacatccagtctgcaattaaacaagccgtcttccactgtccgtttcttcgtggtggaatcaaggtccatatgatcatctaattttaacttttaatcttacattgatgctcacccactttttatcaaaagaaacaggaaatggaattttagtcttgtgttgatatcctcatatacaaatttacctgtgcaaaacatcacaaatgctatacatttatacctctgcaaaaatgttgttgtaaccaacaaatttcagactttagaaccatcaaatttcaagtgtgtggccacttggccagctaacctgcataagatgattgcttacatattttggtaactataagttgggctgttgatatttatttcttataattaataagtacatccaacgaaagtaagcaactacgctgcacacaagaaatagattcataatacagtggacataatttctcatgactgcactacataagagacagatccttggagat

SEQ ID NO: 1669 - DNA, 602 bp, Oryza sativa
ataaagctgaagataacatggagaggggtacagagatgtgggaggaaatggaagagcaacgcctgaagaatcggtcaaaacctagccaggagaatgtggtgctggagaagatgggcttggatgaatatatcaaagatgtatccactgatgacgcagctgaacaagcttctaatatgaggtctcagataaacattttatggggtatgctactttatgaacgttcagttgtggagtttaaattaggccttccaatgtgggaggattgcttgatggcagctattgaaaagttcaaacttggaggggcttcagctacagacattgctgtgttggttaaaaaccactgtgccaacgaaactgcccaagatggtaaggcaattttaacttactttatctcatcatgttctcctgggaatagtatatacagtgttgattttgctagaaaataccagaactagaaaattatagcaactctagtgtcattaatattgcggaacaatgaattgcaaatttctcatataccttatgtaccacccagaatatttttttcaacttcttatgtttcaatatatatatcatttaattctcaaaagcatacgcaactt

SEQ ID NO: 1670 - DNA, 505 bp, Oryza sativa
cagtgtcattccctctttagtttttacagtagcatagacacttttggaatgtgaatttacagatgcttttaacaaggcaagccaaagtacaaaggcctgaataagtcctagaagccaaataggctcaggatcatctttccaccaccccaaggtccggcccgactgttttgctggtagaaataaagcataaggttagtaaaactaacatggatataagaagatataatatacctggtaagtgtagtacagtctgtctgatgcaacattaagctgttctatggatagttgattggggacctgtagtgtgtaccaagtaaaaacatcctcaaagcaagtgggtggtacagttccgtaacctgagaaagttggaaatctttgagaaagataaagcgcaacgattagacaaaaaatgaaagttatatagtcttactttgcgtatagtgacaaagttgcccagcgattttgacattttctggctgtttacattgacaaagccattgtgtat

SEQ ID NO: 1671 - DNA, 503 bp, Oryza sativa
gagtggatatgagtttctgtctgacagaagatagccaagttttacagttttattacatcatacatattttgttctcgagtcagctgatatggtgcaacattttgcctatttttttacctgcagagtttactgcgcgatactttttagaaacatcagtacaaaatattgtgtgctgattcattttttgaatgataatacggtttggcatttcaaatggaagtaaagcaaatgtataagctattcggagcaaaatgttttcaccatcatttttctccatcgtgtgtttctgttcatacttgttaaagattcatccagtattgaaaggtatgcttgtgcttgagaactctgcttctgttgctggatctattgcttatttactggtatcggtcgtaatctatacgtaaattttccagccaattgccaccaaggttggctgacgtggcgaggacgggcccacaaatcagcgtctcgcggcctccgcttcttcgcccacctcgcgttcg

SEQ ID NO: 1672 - DNA, 846 bp, Oryza sativa
tggctatttctcagagtcactgagtagatatgtactgatatattatcaatatagttgccttcacttggaagaccagaaataattgatataattattttgagaaagtgttttcatttttttagggtatatgtcacctaagtacgtagttttttttaaaaaaataagatagattaacataagttattcactccacaaacatatttgatttctaagagataaaaaaaatagatacataatactagattcagtttaatttattttcgaatttaacctttgttagtatataactcataaatctatatattttcttaattttttcaatgatcatccctcgagaggaatgagaaaaattgaaaaaccatcgtcgaaagattttgattaagtttaattgatgggagctgttcataactaattaattgcagtaagtgatgaagactagtgtggctgaccggagagggcgatcatgtcggcctgagagaggccgttggcggcgaagagcgccgtgagctggtcgaggttgaacgtcggcggcggcagcctcccgttgacgctgctcgccgtcgatctcagcccgtccagccgcccaagctccaccgcgtacgacggtcctccggcctgcacaccattgattccgatcagatgaagattcgctttctttgcatatgtacccatgccaacacacacacacacatctctcagcaaaattaattagaactttggttaattatgcgacatatatgatgataaatcttgatggtgacgtggcgtgtctcctgttataggttacaagatgttttaattttagtccactctaagtttgtctaattctatagaaaaaagtagggg

SEQ ID NO: 1673 - DNA, 788 bp, Oryza sativa
ggcgaattcgagctcggtaccctgcagtacattcaacaggtgctgacagacatgttgggcattagcactgcaagctccattcagttgcccattgaggtgaagagtaccgtgattgatgccctcgttgggatcctcatgcccaggcccaaccatgacagtgtcgtgttgtccagtggatcaacatcgctagccaagaatggcttgcaggacaagttcataaggcagtacgcttcgacaagttaccatggcggtagcggtgttgtccagtggatcaacatcgctagccaagaatggcttgcaggacaagttcataaggcagtacgcttcgacaagttaccatggcggtagcgctagtaccattatccccgaatcaaagggcaatcaagccagcatcatcttgacctggcacgctgcgacaggttgctacgacaaagactatgagcaaaggaagaagatgaaggctactacagaatcgccgctacagcacaggcagtatcgtgttgtggccaccgctctatccaagtactgcatgtacttggtagcttatgtgcctcagctgctggccgggcagcagtcctacacaacatctgtctacaacgattttgtgcgctcgccgtcctacatcttgcagagtggtacccagctgaaagatgagctctgcgaggcggtggtggaagatgaactgaggtggaaggtgctagctgatttctgggtcgagatgttgctctacctcgcgccttctgacaatgtcacggctcacatcgagcaactcgcacaaggtggagagt

SEQ ID NO: 1674 - DNA, 18023 bp, Oryza sativa
cattagcagtcaatgatatatgaagtatgatccaaagctagactagaggatcattgttgagcatcctaatttggacaaactatgatacacacgcacatgtacacgtagtactaaagcttacgatcatatcaggtccctaactaataattaatctatttgtgctgtttgtccgtacccgtaatatatacactataaccatcatatgctgtttccataaaaaaaaactatatttagttgcgactatgaagaatctctcgtgctaactaaaatgcatgattttttttcattaattatttgttagatgaatcgtataattaccaatacaattaaatagataatagaaaaaccagtacgaattcatgggttaccgatcgagatgggtaaaatttgatctaatcaacaaatgagtgatgacatacccctctgtttcataatatagcaaccgatcgagtacaaatatatcacgtcctatattatattgctatattataaaatggaggtagtatacgcatgtgttggaccatctcactagcaccaactgaattttggttctcagtcaggcagaatcagtacgtatattggcatcgattgagactgtcctaattgaggtttgactggtccaacttccatcttagctagcttgtccctccacgattgatagtactattacatatatgtacatagatcgtttggtacagatcatgcatgcatgtacgtactcacaaattaattgatcgctagcatagctccaactaatttgattgagctagttagctagctaaatagacacacatagctgaaatataattcatttctttttagctcgaggtagcatggaaattgacacgtacacgacttgtatatatttttcttagatatacaatgtatatatatggctcaactcgcatgcatgcatgcatgaatctgcaattcatgtaagttaagttgcatgcatgatgcatggtgctgagattagccaccatattacacatagctaatatatatagtcctctccgtcccacaatattataatttcttgtatctatgtacatagccacaaagttgttacatttgagatgaaggtaggtgcactaacatgtatgtccaacaacgaacaaggacagatccaaatttgatgaggagggggcttattttcttctttctcctacaactccttgttattctttccttccttatgtcctctctatgacgatgatctaacagggtaggaggggcttattactggagatcgtgtggttgtaacgcagaaaatccgaaggtgccaaaaccatgtgagtcatgttctagtagctaataaggctcaaatggagccccttacgaagttctggctatagaaagcaattgtaatttcatcttacaacttgttggtgaggactctttagttaagtaatatacttatgcttttctccacaaaaaagcagggtgggaggggcttgagctccccggcatccatgttcgatccactacccctactgacaaaataggtaaaatagatgttaccagtctcatattaaaacttaaatatgtaactcctccatatctataaaccttaatttcccaagcagcgtaggtatagatttaagtatgggcaaaggatatagccctacttacaagttacaactataattagttatgctaactacccaggtggcgaaggacgacgatgagaatgagatatatacaagcaacaacctatttcctttatgacaaagtattagctagctgctgctgattaatcattacgttttttttatgatatatatacatgcaacaagctaacaagcgaggcaaacgtagacatcgatcgttctgttgcgcttgatttgatcgtgtgagtgtgtactgatctattcttgcccgaaatgggcctaatttgtttgggccctaagactacagataccagatccttgaaaagaaagccttgggccgcttccccttacctctctatattgggccatgaaagcgataccaaagatatttggaaaaagtacaccgaaggtccctcaacttgtcatcgggataaaaaacgtcctcgaaccgtaaaaccagataccgcgggtcccttaactatacaaaaccggtcacgataggtccctcgacggttttgatcccagttttgtcctatgtggccgccgagtcagcgtgggacccacgtgggccccacatgtcattgtgccatgtcagcctaccctctcttttcccctcttctcatttctctcactctctcttcgctcagggtggcgggggaaggagcggaggtcaccggcgagggcggcgtatgctagccgacaggaggggaggaggccgttgggcaaggccggtggggcgcggtcctgagccgccgcccgccgcgcggtccgcgaggcgggccgcgacggcatcgtcgtcgtcgccggccgcgccgtctctgcccagttcgccacggctagcgcggacccgtcctctggcgccgcgacggcggcggggaggcgagtgtatgtgaggaggccggtggggcgaggcaggaccagcgccacggcgcgaagcggcgggtgtgccggagacccagcaggaccagcaggaaggccttccgcacccaccctcccccgccgccgccgcccagctcctcccacggcggctcccagcccgcaccaagctccaccccacctggcgcgcattgctttgcccccgacaaccgtgccctgctccgcaccgtcaagctcaaccacggccacgacatcgccatcgacgccctcgagctcgcccgcgcggcgacgccctccccttctccaacgacgctgcccccgccgacgccgacgtcctcctctttctccgcctctcgggcctcttcgaccccgagacggtgggggaggggagagggcgagaaccgcggcgacggcctcccgcgcctaccctcccccgccgccgccgccacccagctccttccccggtggctgccgcacgcgccaagctccaccccaccggccgtgcactgctccacccccgacagccgcgccctgctccgtccccgacggccgcgctcagatccttccccggcggcactggcggcgtgggaggacggccgcgagaggccgtgcggcaccggcgtggcctccgctcctttcccgccgccctgagagaagagagtgagagagacgagaagagggggaaagagagggtaggctgacatggcacgatgacatgtggggctcacgtggatcccacgccgactcagcagccacgtaggacaaaaccgggatcaaaaccgccgagagacctattgtgaccggttttgtatagttaagggacccgtggtatctggttttgcggttcgaggacgttttcgtatcccgataacaagttgagggacatctggtgtactttttccaagatatttttcttcactattttcagaagtactaacacactacgtttggaatgcaggtaaattccctaagctcctcctaaaagtgaacttttttttactataataataacattataagtacaaaggcggtgctggaccttgcagtcgaacaagcccttgctccccggataatattgattctcacatattatgagaatatatagttttaaaatgagaaatatattaaaagccaaaaactggaaacaatatatgagagattagaggctaggattatatatctcgtttagttgtaaaaaaaaaaggttctactacctattactattaggggttacaatatgaatacatagtgcctacatgtgacaataacagggtgcataaaactcataatatgatcagccaccattcttcttcattttgttcttcctagcggccaaacactttggcctctgtatctcacaactatacatgtagctatagtaaggtgctatctgtgatttccatccaagtgcatcaaatcttccttgaggcctaacacttccaaacagagcatctaccagtgatatcttgggagcttcagcttcagcttcacagtgggaagatgcatgtgagcagattgtttgatagttatcaagaatcacaagaagttcagttgcttcttcacttggttcattcacccgatccaaagctttaatttgatctgcagcatacatgaatgaccaaatatgctggttcttcttcttgaactctctcagggttgcaagaaccaagctccagtaatgactgttggcatttgatctcagcaatctactgaagacattggcacccatgaaacacccttcagtttctattgcaatgtccatggctattgatgccatttcagggtgctctgaagcatccatgctcccaaatgttctcaccttgaagaagtaccagtaggcttccttggataaaagctgtaatctgagaggtggtgtggttcctaacctcgcaatcttgtctgatcggcttgtgactatgattttactatcgcgaggaatgcgagttttgtatatcgagtatagtctttccaataaaaccccatcgatatttttatctagtccttctgaatacctatccccatctagttcaacaatgaccaacacccttcctacacccgaggcacggtttcgatgtttgattacaccgccatctctaagatccacaatgctttcatcttcaagatcggctcgagtgaagaacacaatttgcgagaaatgattgcgcaccctttcatcgttgcaggcatgctcgacaagagtactcttcccaactctccctggaccaataatcggtagaactcctggttctagtgtgctatgattcccaggttgtaggagaaaattgatgagatattccatctccgtctggcgcccaaacatgcactggtccaagatcaagtacatgctatacggctgacgatgaaggcgagggcaactgcttaagaatgcaatgaactcagtagcatcagcaatggtgttctccaggtccccaagaactctctgcagctcacccaaactctgactgctactgtcactgcagaaacggatacgcttggcatgactgaatttagagatggcaaaagatggactcacttcaccatgatgatccttgccttgatgagctctgcacctgaaggtgtccagggtgtagtagcctctgaacatctccttcctcaggatgctcagctgctccagcatggcttggttggtgatgcaccgttcttccgcctcgtcgacgatgatgcgaaaccgcagcagcagcctttgcaggttctccaatctttcatcgtcgcttggagccggcttttgctgattcaggtatttgcttacaaggaaagatatggatctacctgcaagttcagtcaggatgacagaaatggttgcctccatgttggctggagaaaaccttgcagaatggttctgcaatggaatgagttacctctagctagaagtataacttatattatgtgatctgaaacttctgattgtgccaaaacaagtttttgtattatctttcaattaggattaggattaggagtacaagttgtaacaactaacaacaagcaatgagtgatcagaagtcaaaattggcaggggataacaaattacatagaatcaattagttgatgtcagttctcatggtgttctgcatgtcctgacgtcttgcgcatttgacacgttcaagcttcaactaatgaaagataatacgatatgctgacgaattgagtttgatggcctctcataaacagcacatttacataacagattggagtactcattcgctcagacagtcagacagtaggtgaaaatatttaaaaaatgctcagaactattacagtttaagataattacattatacagcagcttctcagataaacaggtgcaaatcttcggaaaacaacaagatggtgttaacaccaaaatttgacacctcgaacataaatagaaaaatatggccgaatttaaaaaggacctggtttcctttatggggctagtatgaccgccaccgtagagccggtcaaaccggtgatgtgggaccggtctgactggtggcatgtggtcggtcagatcgggtgagtctgactccgagttcaatttcgccgggtctcgagttcccttacttgagaaggtattttttgagttctaattggtcactatcctcaataaaacatggaaagggtcttgtaacaggaccgacccctttataagggctatggtcggttcgattctaacccccaaaccacaatccctataatctatcgaattgttcttttacctttacttttcagccatgctttctactttattttctacctaacaatagttcatccatctttgttgatttgcgccacaaatcatccgacttcactgcaagggtgcgatatctctttgtaggtttatcccgtaaaccttccgattcatccacgagacggtaaatcagtctagaggctaattttgatatctaaatcagctccgctagccagtttagttttgtatcaaggtggttggcgaccgcaagatgtttaggtgtcccgatcgtaattgtcttcttgctataagaaagttaccaacacgattttttgtgactatgctaggaaacgtaaaaaaaatttcggctatatatccgaccgaaatcaatccacatacattcactgccgccgtctacgtattacacactggatcaatgtattcggcagccacactgtccggtcatccgcaacagcaatcggattgctctcgatctgctgccaaaaattaaagaaaatcaaatcaaggtgagtttacaggaatagatcaacaccgtgagtgagtccgaggaaagccgccgtcgctgagtatttttcctatatatctgcagccgcgtgacgacgctgcatagatagatacggacatcgatcaattcgtcaaggccatcaggacttcagcgcttgccgtttcgctcttgtgttcctattttggccgatccagaaaaactaggagccgattcaacgtacgttgatcggcatatacaagccaactaggaagcctacccatcagtacgtggttgctctctgttgcgtacatccattgaaacaaaaaacaaaattcaatcaaagccattgcattgtttttgggaatacgcaaggagcgcatcattgtattaagaggaataaagtttatgcacatcggaaacgaaaaagagagggggacgaggtacaggagggtgactagaaaacgctaaatcttattctcgcaaccagttgggcgacctactaggcggagtttgaagaataagagctggcatagctgctctgccattgcattgtatcggctaaccaatattttggaacttttgctacctgcaaacgaggagaacagggaatatcagttagctatcttgtgtacacatctatttccctattcgcctacgacgggtggttaattatctccatatcaatctaaatcattctagaggctaattttgatatctaaatcagctccgctagccggtttagttttacaaaacccatcatggtttagcttcgtctaaatcgaggtggtttgtaaatccatatcaccgcaagacgtttaagtgtcctattcgtgattgtcttcttgtaaaaaaaaaagttgctaacagatggttaagtgcaaagtttgggcaatgccttgagccggacactcgatcaacgatctaaaaatcaggcgcccaccccgccccgccccgccccacccgtgcaccactctgcctttgaatataacttccctctcatcacttctcttattttgttatgcagagttctcttcacatgcatgtcatgtcatgtctagccatgcatgttcatgtaaatttttgatatatcattttgcgcatttttctctcttcttcatttttttctctcctaaaataatggtccgttctacgatccgataataccgttgtattgtttataattaaatctttatagtaagatatcacatgattatattttagtaaaaattcaaatgttgtttcaccccttgaagaaaattgtttcagtagtgttcaagagaaatgcaacatttaaaaataccaactgcaacaccaataaccacctatatagaactaggggtacggaaacggacggaaaccatctttatcgttttccttttcatatttctttttagaatcggaaacctcggatacgaaaacataatcgaatattatcgaaaccgaaaacggagcgaaaacgaaccggcgcgaatacggtaatgaaaatttatcggaataaaaaacccctcaaactgataaatccaattgaataaattatctatgtttaaaagagtaatgttgttgataaattccaatgtagaacaaaaaatattcttatgtaattttagatttgcataacaaatatttaaaaaaaaacaacagccaaacaccatggtattcactatttattgcttaaaaaaagaatccagggtatttcaatcacaaaatttttggtaattccgagaaaatttccagaaattctgagaaaatttccggaaagtttccgaccaattccgagttccgacggaaaccgcccttagcatttccgattccgtttccgagaaaatatttccgaattcgtttccgttttcgaaaaattccgaccgacagattccgttttcgaaaataggtccagaatccgaaaagttttcgtaccgttttcacccctatatggaacattgagtaccaagaagcgaaacaaaaaagtcatatgagagatacaatatatttgaaaaaaatgatattgttgaaatattttgtattattacgaatattaagctgtaactattgaaataatataaaatacttgccaaaactttcctggaacaccgcgtgcaatatttacaaattaactagtgaaatatcatacgaatactagttgaaacatacacataaaacatgtgcaacattgaaaaatatccatcaaaaaagctaaatattcttttcatcgaaatataacaatgtgtggtcttgttctaaatatttaattgcaatgaatttaatagtgcaatcaaattgtagattgaagaagttatttaagagaaaaggatagttcaaatattactaaaaaaaacttataccaactcaactaaccatattttcttttttactaaacgcatgcatgtactagtagtgacttggttaatttctagtaggctttacaggctgcagctacaccatgtctctgtagcagctagctgacagagtgacggaggatgaggcgggtgcccgatttttagctaaaaaatcaggcacccaatccgaagtcgcgtccgcaaagttcccgaggtcgcttatttcttgcaactatatgctgcgacttcagtacctcacagctgaacatgtagtcgtggtaaggtggaaggtgagatctccagccgagaaccttgaattttccttgaggcctaacatttccaaattgaaaatcttcgaaactcaactggggaacttcaacttcactctgagcagagtttgtacaacgatggagcatgtttggaacagaacatgtctgataatcatgaagaatcagaatatattcagaggaaattccgtttaccctcctaacatatgccgattcaaccacctcccaaggaccatcaaaatttgcatagagtgagatattcaacttcctgaattctctgattcttgttagaaccgtgctccaaaaccgagtgttgaaatttgcttttagaagttcattgtagatgcctgaagacatgaagcacccattccattcccttgctatctccatcgctattgattccagctttgggtgctcctctgcatccatgcttccaaacgcgcgcagtttgaagaagtaccagtaagcttcttgagtaaagaactttactcgaagagcttgtgtcgttccaaagcacgcaatcttattagatcggcttgagactataattttactgccatttgcaacacaacatttgcaaactgagtacaaccttctccacacaccctcatcgatgtctctggttagttcgatgatgattaatatcattttgccaccagtggcattgttttgatgcttgattacaccagaatctctaagagtctccatgcttgcatcttcaagatcatcctcactgaaacacacaatttgagagaagtgattacggaccctttcatcatcacaagcatgcgcaatcagggtggtcttcccaactttcccggggccaatgatcggtaggacacctggattttcagcaccgggagtatcctctttgagcaggaagttcatgatgtgctccatctccatttggcgaccgaacaaacacttgtctataagcaagtgcatgctatatggctgccggcacaaacgaggacaaaagttcaagaatatgacaaactcgcgcatatcttcgagggtgacttgtagtctgccaagaacttgctgcagctgatcttgcaaggtctggccaccatcccacaagtatcggatgcgcttggcaggatttaacttggatggtttaaaatagttactcacctcatgatctttggcattgtcttcttcatggccatggcatatgaagttgccgagggtgtaataccctctgtacatctccttccttagcatgttcagttgctgcagcatggcttggtttgtgataagccgtccctctgcctcctccacaatgatacgaacccggagcagcagtcgttgcagtctctcctccacggatggtaatgttggctttgagcacttgttgatcagcaaagatatggatctactggcaagatcactcagaatcacggacaaaaatgtctccatgtctacttctcatatgatcagcaaagatatgatctgaaattttgtaaatcactcaagtggtgaagagctggtacctgagaaaacacaatctgaatgtttatagagggtattgcactggttacatatacaaagaggggatatgatctgaattaaggcagccacgtactctactaactccaagtctccataaagcgaaaggtattgccctgtggttacatatacaaagttacatgtatatctagaatttatttcaaaccatacttttcagtgtgaactgtttggatcctaatttctgttttttctttgcagttccaataatataaccgtacaaggttgactacatagcggagacgattctacaggtttggttcagcgccatggaattctcgtcaagtttcaaaagcacatgcattttagttgaccagttcgcatgctagccaatgctacaacagcgacaggttagaaaaggaataaacattcagaaaatggttttcttcttttgtctcttttgataagggtcaagttttagcttctatttcttttaactagcaaaaaacattcagaaaatgatcccctacagcggttgttatgtccttcaatagctgactatctatgtttcttgaacaataaattatgagcatttttcccatccttgatgaggtactatgaggtaccaatctaatctaaccgttgatttagttggggcatgatggggctaacaaaaataagatctctcttctaggtcagaaatcgccgcatcctctcttccaggtcagaaatcgctgccgccgtcgcgcatcgaggttgccgccgtcgcgcgtcgaggccgccgccgtcgtctcccatcgagcctgccgccgccgccacgcatcgagcccaccgctgctgttgcgtatccagccgccgccgtcgagcgtcgaggccaccgccgtcgtcgagcgtcgaggccgccgccgccgacgattcaccgcactatcccatttgtcctgtccagtcattcagaacattggtgctcgtctcgaatttgtggcaagtttccaaatgacattaaaggtgggtattaaggctctatagaatgacatcacatttgctattgagtcttatttcaccctagcaagataatttccaagatctaaaagcaggggaacaccaaattcccagctcggagcacaggaacgccaaatctgagcagccgaggggaggaagatggtactgacttgccgagcgcgggccccatcttgttggtgagcgtcccgacgatgatcatgcagtcggactgtcgcggggatgggcggaagatgacgcgaaagcggtcgaagtcatagcaggacgcgccggcgtgcatcatctcgacggcgcagtaggccagatcgaccccctccgcgcccagttcatgaggtcgtctaccttggagatcactaactctgcccgaacgacacccgccgccgccgtcgcgtaaccagtagcccgccgccgtcgcgcatcgagcccgccgcgcatctggctgctcctgcctctcgcggtctcgacgccacgccatctctcgcggcctcgacgccacgccatctctcgcggctctcccgagtcccgacgatttttttcttctcgtgaaacaggaaaggacacaaatcacattatagaagtgggagcaggtttcttctcttgttaaaagaagttaattaatgctgacaaattgagtttggcaacctcatgaaaatatcacatttacataggagcttggatgtacacagatgctcatatttatacaacagtttcagacaataacaagatctcgtagcttagatactaaaaggtaccacaacctaacaatatggattactatctgagatggtcaggtgcaaagcttatgagatctcttcttactggtgaccatatgatgtggcctccgtacctcacagttgaaaatgtagttgtagtgaggtggaaggtgagatctccatgcgagaaccttgaattttccttgaggcttaacacttccgaagagaaaatcttgcatactgacctcggggacttcaccttcactctgagcagagtttgtgtaacaatggaccatgtttggaacagagagtgtctgatagtcgtgaagaaccacaagatattcagaggaaattttgtttaccgtccgaacatatgcaggtttaaccgcctcccaaggaccaccaacaagatacgcgttgtatattaagttgttcttcagcttgaattctctgattcttgccagcgccatgctccaaaaccgagcattaaagtttgctttcagaagcacactgtagatgcatgaacccatgaagcactggttcatctccctggcgatatccatggctaatgatgccagctttgggtgctcctctgcatccaagcttccaaatgtgcgcaccttgaaaaagtaccaataagcttcttgagtaaagaaatttactctgagaacttgtgtcgttccaaagcttacaatcttatcagatcggcttgtgactataattttacttccaactgcaacactaattttggaagctgagtacaatcttccccatacaccctcatcaatgtctcccattaattcgataatgattagcatcctgtctccaccaatagaatggtttttatgcttaattacaccacaatctctaagagccaccatgtttgcatgtcctacatcatcgtcgttaaaacacacaatttgagagaagcggttacgcactctttcatcttcgcaggcatgctcaatcagggtgctcttcccaacttttcctgggccaatgatcggcaggacacctagattttcagcactgggaatgtcctctttgagcaggaagttcatgatgtgctccgtttccatttgacgaccgaacaagcacctgtctaaaagcaagtgcatgctatatggctgtcggcataaatgaggacaactgttgaagaacatgagaaactcgcgcatatcttcaagggtgacttgtaggctgccaagaacttgctgcagctgatctcgtaaagtctggccactgcccgtgcagaatcggacacgcttggcaggatttaacttggaaggtgtaaaatagtaactcacctcacgatctttgacattgtcttcttcattgttatggcatctgaagcagatgagtgtgtaataccctctgtacatctccttccttagtatgttcagtttctgcagcatggcttggtttgtgatgaaccgttcatctgcctcctctacgattacacgtgcccggagcagcaactgttgtagtctctcctccacagttggagttgttggttttgagcacttgttgacaaggaaagatatggatctactggtaagatcactcagaattgcagacagaaatgtctccatgtgtaagtatgtagtctgaaattttgtagacctctcaatagatcagcaagaactgggatctgagagaaattatgtagtctgaaaaattttaaaggatcaggtgaagcagagtaggaattaaggctgccacatactcttatactgtggttacaaaaacacactttgaatgctccacatagtccagtatcccaacctagatatgctttttaatgtgaaccgtttggattcaagtatctgttttgtacattttgcaacaatataataaccatacagactgtccacatagcggtgacgatgaaagcagtaaagaaagttctacagattggttcagcaccactggtttctcgtcaagtttcacagtcacatgaatttttagttgaccaattccgcgttctagacactgcaatggccttctatttctacaaatgtgacaaaaagaaaggacctgacgaacatgaacaaaagaaatggcaaacttcttcattatgaaactcaacatgttaaaactgttgaaatttgagaagtgcttgtggtgcagctggcatggatagtccttgttttttttttctctgggtcaaaattcaaggctttgcttctagttaattccaagtcaacttttattttcaacttgtctgactgcaacactagtgaaaatgtcatggacagggaggaaacattcagaaaatgttttcctaccatggttgatggatgtgcaaggaatcagctgacaagctaaccacttttttttttctgaaattccttttggggatcaatacgcttatatggagaattgaagtattctgagaaatatggctacagatccttgaaatttgagttacctggatcgaaagaagcagacagaacgttgctgtcagtcgccgccattgcaggaagaacccgagccgccgctgccgccgacgtctccagatccggccggcgccgcagctgtcgccgccggcttccttggccgctccatcgccggccgcgctcggcttccttctcacttcgtggcggacgtcatcgctgctaggataggggaagtacaaccttgccgccattgctggagagtggggatccatccagtcatccagccaccagcgacttgaacccaaaagctttaaatatcgtaacctttgtccttggtaattaattaacttccttggtagagttaaaaataaagagaaaaaagatttttaaaagatatatttgagaaaataacagtgcctttgccttgatgtttggaaggaccagctacagggcgctttcgacactcttgtgctgctaatctgcgggatggtttggaaggagagagatgcgcgtgtgtttgtaaagaactgttttattcctcttaatgcaaaaatacgcatctagcgtattcccgaaaaagagatgtgcgtgtgttccagagttagagccgagtggcgggcatcctctttgccttgattaaagagtaggtcgtgatctgaaaagaagctgggggtttttaaagatttaggagagtagcgtcttgctgtagcttgtttttcttttcggaagttgcttatgggacaacatcaatcattcacttcagcagtctcttgtctaaatttgaactttgtgaatgtgtacatacctttttattaagtaaatttggtccacctgtttgttttaggctgggctggctaaaaaaaatagtgcccatttgatacggttggatgaatgatagggttaattaaatctcctattacaaatttgtcatattggaaaaatgatattattatttatcaaattggctcagtgtcataagtattttgtaaaatttaaattatgccattatatatgtatgtacgagacgtacttgaaccaatattttgcgtaacgtatttttcctacccacaaccattgcgcgctggtctcctcccagccagattcatacgtggggggtgttacgaaaatagatgcacaacggagacacgaatttttacgtggaaaacccttgcgggaaaaaaccacgggcgccgaccggtaatgatcactatagaggagtttattacaaacgtaggggaataacaatgggaacgtcaccccttcccatacggcttacaagagtatatatacgggataatagaaagacacctaataggactctgttgatagaaaacacagggcctgggagatctgcttaactccagtgcatgtccaaaactcgccttcggatgtatgagcgtgccagttgatttgatcctgcaatcaacaagaaacaaagacaaagaaaccgtaattaaatccataaatgatagccgatcggctaaatgccgatgacatgtcatttatctttgagccgatgtcatatgtaaatcgatcggcaattgttaagaaaacaaatcagaactaaatctactcgatcggctgcaaatatcaatgatacataatccttatatcgatatataattgaatcaagtgattgggatagatcggtcaccttgccgagacagtataaatcacttagatcgaaatatatattaataatgagattatatatatatattcatagcatagctgatcagatagatctagcgtgtatcggctaatactccgatactactttatattaagatattaaagcaaatagaatatactaaacagaaatctaatatacttaaatgcaacaagatcttaacatgaaggacagatctaacatgttaattgagcatgtagaacaaaagcaattggatcagataagatcggctgaaactccgatactaccctaatcggcaaccagtaggcaggctagagattgaaattctaagcacggcttaatagatcaaactcaactgatacagcattaagtatgaaaagaagaacaatatctagacgatcaagccgctggatgtttcatagagtggtggatatctcatataatctaagccaacgtcgttatttaacctaatcggctgccttctggtagcagatgttagccgattgtaggttaaatgacgatattgtcaaggattatgcaagatatatgataatttgacggactacataaacaagattagagtatcataaagatggaagcactaatctcgagaacacaagccgccataacaagtttacctcttgttgaagatcgaaaccgatgcagctcaacccgaaagcaataactcgtcgaaataaaacgaaagcaaaaagagtggcgatgcgccgaaattgtattgaacgtgtgtgttaatcattacatagggctcggggtctatttatacccgagaaatacaagatatgtccatattggacacgactcttatctctaacaaactctaagataccacaagtctttgcggcagacttttgctcacatttatctctaaagaatttacataaaatatcctatttatagatacaattgccttcccaggactctatccatgcgtggcattcattttgaagcacatcaactcgaacccaatgtcgcatacgggtcgtattgtcggaatcggctgtatcacttaaccagtccgactcagacttagccgatcccagtcgtagccgatccggactccagccgattattactctgtttccgaaaaaacccttatcttcgattctacttcgatttcattttcatctccaatactgatattaccaaatttggtcgttaacaggctcctactaggaaactaattcgaatatattgtgggcccaaaattcggatcacatatttaacaatatccaccttgagacgaatttcctcttgtagcataaaaacatcaatcaccaaaaatacctcatgtaggtaaaatcaccgcgcgccaaatagtctctaggactatactgtaacacccaccaagcttgagcaaagctcaaacttagtagcaggaactggctttgtcatcatatcaactgggttatcatgagtacttatcttgcataccttgacatcaccttcagcaatcaca

SEQ ID NO: 1675 - DNA, 5121 bp, Oryza sativa
  unsure (1)..(5121): unsure at all n locations
ttttgggcttatcttttgcaatagaacgttttggagattgatgaacaatagaagaatctgaatcttcaataacaggtgcatcttagttaatagcaacaaattcgttttctggtgcatgtcctgaactgatcaaatgctccacctgcacacttgctttctcctgactctcaacaggaacattagtagaaggtttgtcatgtaacataactgattcatggaagacaacgtttctactaatcacaaccttttttgtttcaggacaccataacttatagccttttacaccagacggataaccaagaaaaatgcacttaatagctctaggctccaatttaccattatcaacatgagcataagcagtacaaccaaatactcttaagtctgaataatttgctggggaaccagaccatacctcaattggagtcttcttatcaatggcataactgggtaatcgattgataagataacaagcagtggaaacggcttccgcctaaaactgtttaggcaaacctgcattagacaacatacaacgggcctttgatataattgtcctgttcatacgctcagctacgccgttttgttgaggtgtgtgaggaacggtgtagtgacgcacaatgccttcagacttgcaatatgatttaaatatcttagaacagaactccatcccattgttagtacgaaggattttcaccttcctttcagtttgtcattcaaccatagttttccactccttaaacacatcaaaagcttgatatttgtgcttcaagaaataaggccaaacttttcgcgaataatcatcaacgatagtcatcatgtaacgagcacctccaaaagatgtcttacgagcaggcccccataaatcagaatgcccataatcaagaataccttcagtagtatgtgtagatgtattgaacttcaccctcttatgcttgccaaatatgcaatgctcataaaatttgagcttcccgatgctttgtccatctagcaatcttcgcttgctcaattctgccaaaccaatttcactcgtatgcccaagacgcatatgccaaagattagtagcatcggaattagataatgaatcagaaactgcagcaacattacctaatatagttgtacctcgcagatggtacaggttggcagatttaatatcagctttcatcacaacaagagagcctttagttaccttcaaaattccgtctccaccggaatatttgtaccctttgccatcaagagtacataaagagatgagacttctcttcaaatttggaatatgccgcacatctgacaatgttctgatacagccatcaaacatcttgatctgaactgttccaatacctgcaacctcgcatggtgtatcatcacccatcaaaacagtaccaccttgaacagcttcataggtggcaaaccaatccctatttgggcacatgtgataggtgcatgcagtattaagaatccactggtcactagtttgtgcacaaccaacataagcaacaagcaattctgcatcagatttctcatcagtaacaactgcggctttaccttcctcttctttcttaccttttggtacatattttccggttctcttgtctttgtcctgtagcttccaacactcagatatatcatgtccatctctcttgcagtatttgcatgacttatacctgcctctggactttgatcttccatggtagctacttgaacttttatctcttgatttgctgtttgtgttcttctcctgttgcctgccccgaacaaccaagccttctgcttgtgaatttgaaccttcaaagggtaccatcttcttcatcttttctttggcatgcaaagcatcataaacttctttcaaagttagagtatcatggctataaagtatagtatccctgaagtttgcatatgagctaggcaatgaacacaatagaataaggcctaaatcctcttcatcatactttacctccatagactcaaggtcagcaacaatttccttgaaagcagagagatggtccattacagacccatcatcttgcaacttgtgtaaaaataacttttgcttcaggtgcatcttactggtcagatccttagtcatgcatatcnntgttccagcttcaacccacnnagcccagcggttgggtctccttccttaagcancctccgtgcaaaatattgttaagatagataaaagatgaatatatgacatagnccttacgatcccttttcttctcatcgttggaccaatcctgagtcctcttgtcaaatccagaaagcgcatcatcgaggtcttgttgtgcaagaacggctcgcatcttcacttgccaaaatgagaatcttgtgtcttggtccaggagcggtagatcatacttcaaactcgccatgggaattaatcctgaatttgctaaaagaaattagggtaaatctagcaaaaaaacgcgaaacccggtacacttctcgtgtgcacgtagcgtagatctgaaacttcctggtacacaagcttgtgtgcgcgtagcaattccacgtgaatagaaaatcacgtgaacaggaacctgatcgcttccctcgttgacttccttttcagcctcgggaaccgtgcgatttagtagatgtattgacgccggctgctactcctggacgtgcgcgtagacggcttgctgctgctgcttgccaatctcctgacgcgtgcgccgattccaggacctgggctgctgctgccctaatttcgcgcgggctgtagggatgacgccgatcagatcgatccggcgactcgacgatccggcgcctcgacgaaccggcggcggctgcgtgacgtgtagatcgatctccaaagctctgataccacttgttatgaaaatagatgcacaacggagacacgaatttttacgtggaaaaccctcgcgggaaaaaaccacgggcgccgaccggcaatgatcactatagaggagttgattacaaacgtaggggaataacaatgggaacgtcaccccttcccgtacggcttacaagagtatatataagggataatagaaagacacctaataggactcctactaggaaactaatccgaatatattgtgggcccaaaattcggatcacatatttaataggggggagtggaggtgggcaagtggcctatgcccatgggcagtggcaaggtgtagaggttttagcacatgtgccgaatacctgtacaccatcactacgctcctcctcatcctcagcgcccatccttgcgatcatcacattcctcaccactcctcagtcggatcccaccagagaacacatataaaccatccgcgtcgatggagctcctatctcgccacttcgctattgcagggagtggaatctaatccggggatgtccctttgtatattttttctttcaagttcatgtaaatggttatacaaaatgtaaataataatttgacaatgtagagtacagtaacatctatcgctccaccaataatcaacttcaaacttgatctatacattgaaaaaaaacaaattatgggatgaataatactatattgttcatatgttgaatttgcccttttcatttctcaatgtgtgagttgagtttaagtttaaattttattttaaagtgatatatgtatgtcatatgaatgttattttttgagatttttttaataactatttgagtggtgtttgagcaaatgagaggacatcccctcaagagtttaaaagtgtttcctgctattatgctattatggtcgctcaacatttagtctataatcgagtttgccgttattcattccacatccacaattgtttgctagctcacgtgtcttgcatgtgcgtcgtgggcaacgttgaggaaagcctcttgaaagcagcacattttacataggagcttgaagtaaacacatttgctcatgcactgggtgaaaaacaattgaaaatttctcagatttagattcagattcagataattacatcatacatcaacatctgagatagtcaggtgcaaagcttctgaggtctctcctccctggtgatcagatgatgtgaagtccatacctcacagttaagtatgtagttgtagtgaggtggaagatgagatcttgacgcgagaaccttgaattttccttgaggtctaacacttccaaacagaaaatcttgcaaactcaccatgggaactgcagcttcactctgaggaaagtttgtgtgataatctaccatgtcctgaacagaacatgtctgatagtcgccaagaaccacaagatattcagaggaaacattgtttatcatcctaatgtatgtgggttcaaccgggtgccaaggacagtcaatattggcaccgtatcctaagagattcttctgcttgaattctctgattcctgccagagccatgctccaaaacctaacattgaaatttgctttcagaagtacactgtacatgcttgaacccatgaagcacccattcatctccctggccatatccatggctatcgatgccaactttgggtgctcctctgcatctatgcttccaaatgtgcgaaccttgaaaaagtaccagtaagcttcttgagttaagtattttactctaagagcttgggttgttccaaacctcgcaatcttatcagatcggcttgcgactataatcttactgccttttgcaacacaccttttggaagctgagtacaatctactccatgcagcctcatcgatgtccctgctcaattcgataataatcagtagtctttcttcaccagtaccacggttttgatgcttgattacaccacaatctctcagagtcaccatatttgcatcctcaagatcatcgtcactgaaatgcacaatctgaaaaaagcggttacgcaccctttcatcggcacaggcatgctcaatcagggtgctcttaccaaccctccacgggccaatgataggcagaactcctgtattttcatcaccaggaatatcttctttgagcaggaagttcatgatgtgctccatttccatttggcgacccaacaagcacttgtctagaagcaagtgcatgctatatggctgacggcacaaacggggacaactgttcaagaacatgacaacctcacccatatcttcaatggtgacctcaaggctgccaaaaacttgctgcagctgctcttctaaactc

SEQ ID NO: 1676 - DNA, 2670 bp, Oryza sativa
  unsure (1)..(2670): unsure at all n locations
cacctcgtgatctttggtatggtctgcttcatggacatggcatctgaatctgtcaagggtgtaatatcctctgtacatctccttccttagtatgttcagttgctgcagcatggattggtttgtgatgagccgttcatctgcctcctccaggatgatacgggcccggagcagcagccgttgcagtctctcctccacggttagcgctgtcggtttcgaggacttgttgatcaggaaagatatggatctactggcaagatcacctagaatggcagacagaaatgtctccatatgtaacaatgtaatctcaagttttgtagtttgagacaagaactgagacagagagaaagtatgtagtctgaaagtttttagtggatctggtgaagcagagtaggaattgaggctggcacatattccagcagctccatgtcttcataaaaggaaacgaattgcactgtgatttacctcaacctagatttatttttcagtgtgaaccgtttgaatataagcttcaggttttctctgcagtttggattaatataatcatacaagactgaccatattgtgaagatgatgaaagaagtagagtaaattcttacagatttnnnnnnnnnnnnnnnnnnnnnnnncaagtttcacagacacgtgtatattttagttgaccagttctgcatactactactaggcaacacaatagccttctaatgtgacaaaaaaatatttgttttgatgcgggcgttatcttggtgacttagctaatttggaaagaacgcaatgctcgtgtctttgaggggcacgcagtctcaccggtgaatctttgtgcgtcaattgaggatgagtggaaattgtggtaagaagcgggcttgaccacctctctttgagttgtatagtgggtgcgagggttttcccccatagttgttgtgtatagagggtttctttcttttttgttgtgatagcacgccgtttcctctcggcgtgctttgagacctgtaaattctttcttacctcttagtatattccggccagttattgccgaaccagcgaaaaattgtgaaaaaaaaggacttgatgaacatgaacataaggcatctcaaactttttttttatgaatgtcaacatgttaaaactgttgaaaaatgataaatgcatgtaacatgttaaaatgaaaaagcctgttgtcccaaattaattttccattaaactgttaaaaattttccatcctattacaagttaataaattcccctgttatgccccagtacaaattctaagtcttctttttctttttttttgttgggccaaaattcaagttttttttcattttgttaatttagagtcaatttttttgctgctacttgtctgactgaggagtgaggaccagcaaaaacgacattcagaaaaagcaattttacagtccttaaagaggtaccataggaccactttttctattgtaaatttggtatctcttgctacctaggtactataagataccaaattttacactaaattttgatatttgctccgatccagcaaaaaataactcgaggtaccgataccccacggtaccaaatcgtttccgatcgttggatctaacaatgcccatcctgcccagctagacccaacgatcgcaaacgatttagtaccgtgaggtaccggtacctcaaggtactttttctggaccggagcaaatctcctaaatttttggtacctcatggtacctcctcaaggaccgtaaaattgctcttcagaaatgctttccctactaccatttctgcctatttatacatctgactagctacatttcttcaacgatagaattatggtacatttctggactatctagacactttctctgaaatttcttttggggatcagtgcacacttcaatggtaaatcaatatattctcagaatatgctacagattcttgaaaattaagtacctgaatagagagcagacatggatgtagaggagggatcgccgtcagccgccgccattatcgccaacgtctctagattcggtcggcgacatagcagctcgccggccaagttacagggccatgaagcaattcagaaattccccatcaataatcgacactttaatttcgttagtttttgggagtactacctccatcccaaaatgtagcaacctagaatgggatgagatccatcctaggataatgtcatgtctagatacattgttctaggatagatatcatcccctcctaggttgttatattatgggatggagggagtaaaaaaatgttttttttagagtcgacagtataagtggtactcactcccattccaaaataaaatgattattcgactgtactatatctgattatatatatagtacttgccactattgactctcactgattccatttcgacccctgattttcaaaatgttttttaataatggattaaataaaacccggtctccacatcccgaaggtcggatgtacacaaccacagtattacatcaccaagcacttgggcttacaaataagtttaaaagcaaacgccatcataggagacaaatagacgacaaagacatctagaacaagtctcacaacaaaagatttcaactaacaattcaatcttcctatccaattccacccagattttgagtagaattccataatggtaacttccaatttttgggctgcaggaat

SEQ ID NO: 1677 - DNA, 1936 bp, Oryza sativa
gatcaaatttcccatgaggttcaactctccttgacaagatatcttgtataccaatttttggagccttctgatcttctgcatgagcaagctctactcggcaatgttcaaagatttcacagtagtagttcacatttccatctgtcctaggaataaccacacacttgctcttcatcccaaaatcacctgaacctttgttaggcagtaactggctctttgattccttggtcctgaagcgctcacgcaggctaagccagtcgccattgtaaatactagcttgaatgaaggtagccatgttgttcagatcaatgaatggtccaatgaaagtattgtacatctcacgatcaaagtatccattaaacatcgccattgataccgatgccacctcggggtaatctttaggatctgagcttccgaatgcgagaaccttgaagaagtaccagtaagcttctcgagacaagaattttaggcgaagaggttgtgttgttccaagctttgcaatcttctctgatcggcttgtgattatgattttacttccagctgaaatgcaacttcgagaagaggagtacatccttctccattcgtcatcggaaacatcttcagttagctcaacaacaaccaataatctttctcctccacttgaagctaatgatgagttgtgtttatgccttatcactcctgaatctcttaggataagcaatgatttttgctcgctcaaatcgctatcactaagaaagatgatgcgagagaagtggttgcgcaccctctcatcattgcaaacatgctcaacaagtgtgctcttcccaactttggcaggaccaatgattgataggacatcaaatatgtcactatatggagtttctggatgtaacaagaatttgatgatatgttccatctccatttggcgcccaaacatgcacttgtccatgaacatgtaggtgttgtatggttgacgatgcatggaaggatagttgttcagaagcataacaaactcagccatgccagccatggtgatctctatgatgtcaaccatctgatcgaactctctcatatctccatgtcgtctagtaccagtaaggactcgagctcgcttgatagagttgaatttagacaaagataaggtgttgtaactcacttcattgtcatcgtcgtcgttcatgtcctcctcctggtgtttctgaattctgaaggtgtcaagagcatagtagcctttgtgcatatcttgtctcagcatgttgacctgacgaagcatggcttggtttgtgatgtgcttcccctctgcctcttcgatggcggtggcgagccggagcagcatcctttcagtctctgaatcttctcctccatgaacgtcgccgccataggcggcgatgacggcttcgaggagcatctgtctatcaagaaggagacggatctactggtgagttctcctaggattgcagagaagagagtctccatttgggaaatggaactttccttctccccttgcaagatggttcagacaacaatttgatgaatggatcaacaaccagaataagaggaatcctgcaatcgtataatggcaagtgctctagcttgtctgagtagcatttttttgatgccaacttgtttgactagtaattaaaatgacatcgattgatggtgaacaaaattttgtggatgcagtggttctatagaaaagtatgcaatcaatcaacaccaattattctttttggggttgagagttgagagatttgcttaagagttctgtttgatgactcaagtactgaatctactataaagcgagactttcgttgtgcatgatattttttcttgtattttctgaccagtgttgaccaaatacagggagactacacctttctatagacttttacatatttcgtcaataactaattcctccaagcaattattgacctatacagatttaattaacttgttgtaa

SEQ ID NO: 1678 - DNA, 984 bp, Oryza sativa
ccaaccacccagaggattagcaacggaagtgggcacttgtattcccataaccatgaaaagaatattccaactgaatgtgcaacatgacaataaaaaacagatgttcaattgattcttcagagttacagaacaacacttaccttttcgtctccttttaaccaaattgtcttttgttaagactactcctttgatataccaaaggaaaatcttaatcctaagtggaattctaagtttccagattatcgactttcttggtaccacattatggtacataagagccttgtacatagaactcaccgggaagactctcttcccattggcttcccatctaaaaatatctggactattagataagttaaacaagaccatttagcataccagcttgtatcacgcattcaggttatcccccaccaaagctctactaaagggcacatttagaggaacattgcccagtacatcgcttactctcgcatgcttgtttattgttagtaaatagagggagggatataacttatcaaaggagttagtcacccacccagcgatcctcccaaaatctcacttgttctccgtgtccaactaccatagatcctagttgcaaaaaatctttcttaaccatcataagcccggccctaaaatgtaaatccccagaccgcttttccacttgagtgattgttcaattggctaagtacttccttttgaacagattttgccacatgcttccctcgttaaacaatttatagagccatttgcttaataggcacttattttgaatgtctaagttttgaatccccaaccctccatattccttaggcttacatagaatactccattttgctaccctatacttctttttatgttcatcacattgccagaaaaatcttcttgagaatacctttagttatttcaaaaggttaaactacttgcacaaaaaaagtcagattcagcacttctgataatagagcaattttacggtccttgaggagg

SEQ ID NO: 1679 - DNA, 792 bp, Oryza sativa
cattggcgagccgccattgcagatggcggttgtgaagcagcctcagctggtgctcctcctcggctttccctgcgcttgcagcctccctggaacggcagacgccgccgccgtcgccgagcacctcgccggagacgggctcgccggcgaaatggccgccggcttagttggaggtggctgtttaggcgacggcctggtgaatggcgaagagagcagcccgttgaacagcgacttgaccgacttcttcttcgtcgttgtcggcggcggcggcgccgtcggcgtcgtcttgggtgacggtgaggccaggaacctcggagtgcgcgacatgaacggcgtcgagtggtccgcgaagcgctccgagcggctccccatggcgtcgcgcgagaaccgcgcgggcgaggccatgatgcttctgggagacggacgcgctctggcggcgagcttggcgtcggcgtcggcgtcgccgtccggtgacccggcggacgacgtcgcgctctcggtgtcgtccgatgacagcgcggcgcggaggggattcgggacgtccaccgacgcgcgccgcggcgtcatctcgtcgaacgccacggaccgcgtggcgacgccgccgcggaaaccgtagggcgccgagttcgccgccgccgccgacgccggccaccgggcgtcgcacaccttggcccgcaccgccgccgcgccagctgcgaaactggccctcttcttctccggcgacggcgcatgcggcacttgcttggccttgccgccatccaagcagtagctcgcgtcctggaacgcgaccgacac

SEQ ID NO: 1680 - DNA, 702 bp, Oryza sativa
cgacgagaagcactcttcatactgtttttgcggttgagacaggcatctaaaactgaactcattcctgcatttgcagaagcaacaaaacccttagcaacttcctcgtcagggcttcctgaaatacccgctgaatcgtcaacttctcaataccaaccagaaaagctacagaacaaatttgacatactcagataaattcaaattatataaggattgcagcattttggataaagatacatacttttctctttcggaagctctgcgcaaacttgttcaggcacaatcttcggttgcacgtcatgattgtttccacttacattgacattgctcaagctaatttcccttgaaccttgcgcaatatgctctgaagatttcgctgcactaacaaggttggtgccagtggccacattgtcagtttttgctgcagtactcactggcacaggagcggtattcatcggctctgcaagaacaacattctcagaaggatgcatggacaagctgttggtgtcactgatcataggttgtagttgcgaatcatgaaataagaagtctctgcttctctgcgtagctttgtgaatcattgaattaccatcttcatcttcatcatcatccgagatgcggttctcagactctgaatcatggcggacattcagcttactgtagcctccataagacaagtcctcagaaccttcatctgaagaatgc

SEQ ID NO: 1681 - DNA, 6993 bp, Oryza sativa
ttgtgtacatctgtttggatgtggaggctggtttaatccattatctaaaaaaaatgtactttcattcacggcacgggggttcagagaaatttcagaaatcttgggaattttcagaacgaaacaatttgaaatttaaacaattttgactaaatttggaccaaattcacaaaaaatgaaaaaaaaaagggaagaaattttccgaccaaattggaaatatcagacctatgttatgtgatcttaaacgtctgatcgtgccaatacgtgtttgtactgtatttcgttaaggattaggatgctttcttgcaagttgcaacaaggaatcgatggtcagaggtcaacagtggcaggtaatacggagtagcaattaacataggatcaatcagttgctgtcagttgtcatcgacttctgaactaatatccttgcgtcttagcatgttgacatcttcaaacttcaaatagcagaaaattattagatgctgactagttcagtttggcaacctcttacaaatagcacatcttacataggatcttggatgacatactcgctcagatactaggtaaaaacatttcacaaatgatcagttttacattacagcataagataattacattatatacaacacatggtcagcaggagcacagcttcagaaaacaaccagattgtcagctgcaaagttccagagatctcttctttttggcgaccacatgatgtttcctctgtacctcacagttgaacatgtggttgtagtaaggcggaaggtgagacttccacgcaagaaccttgaattttccttgaggtctaacacttccaaagagaaaatcttgcatgctcaacatgggaacttcagcttcactccgagtaaagtttgtgcgacaaagaaccatgttctgaacagaacatgtgtgatactcatcatgaatcacaaggtattcggaggaaattttgtttactgtcctaacatatggaggttcagacgcctgccatggattctcaaaatatgtaccgtatactaggagattcgtctgcttgtattctctgatgcttgccagagccatgttccaaaaccgagcattgaaatttgctttcaaaagtccactgtagatgcttgcacccatgaagcacccttgcaactccctggccatttccatggccattgatgccatctttgggtgctcctgtgcatccatgcttccgaatgtgcgcaccttgaaaaagtaccagtatgcttcttcagtaaataattctactctaagagcttgtgttgttccaaatcttgcaatcttatcagattggcttgcgacgataattttactgccatttggaacataactcttggaagctgagtacaatcttgtccatacaacctcatcgatgtctctgattagctcagataacgatcaatattctttctccaccagtgcattggtttccattcttgattgaaccacaatgtctaagagttaccatgtctgcatctttaagatcatcgtcactgaaacacacaatttgagagaagtggttacgcaccctttcatcgttacaggcatgctcgatcaaggtgctcttcccagctttccgtcgaccaatgatcggcaggacacccggattttcagaacctggagaatccactttgagcaggaagttcatgatgcgctcgatctccatttggcgaccaaacaaacatttgtctagaagcaagtgcatgctatatggctgacggcacaaatggggacaactgttcaagaacatgacaaaaacgctcatatcttcaagggtgacttctatgctgccaacaacttgctgcaactgctcttgtaaactatggccactgatcctgaagaaccggacactcttagcaggattgaacttggattgcgcgaaagagttactcacctggtgatcttttgcatcatcttcttcatggccacggcatctgaatctgtcaagagcgtaataccctctgaacatctccttcctcagtatattcagttgcagcagcatgcgttggtttgtgatgagccggtcctctgcctcctccacgatgatctgggcacggagcagcagccgttgcagtctctcctccatgtttgatgctgtcggtttcgagcacttgttgatcaggaaagatatggatttagtggcaagatcactcagaatcacagacaaaaatgtctccataagtgaagtatgtaatctgaagttctgtagatcactcaatggatcaacaagaactgggagctgagagaaaactatgtagcctggaaatttttcagtgtgaactgttttgagttcaaagtgtcagtttctctctacagtttgcattaatataacggtacgaggctgaccacgtggtggagacaacgaaagcaagagaattgtacagattcagttgatcagtcagcaccatctacaatggagacaaacaaaaatctgatgatcttgttgtcgcttgtagcacactagcaccatgttatcactctgccaagctatttgctgatttaggccccctttgattcaaaagaaattcatagcaattttagaggatcccattcctataggaatttttcctatatagtcctttgaatcaaagaaatggatcttatagaatcctatgaaattcctatgaaatgcctaataccatgcaagttttggaggaattttcatggaaacttttctttgagtatttatctctcctctaattcctgtgttttgcctgtggtccaatcaaacggccatttatgtgttttgcaatcatctgttttgcacttacattcctatcaaaatcctatgtttttcctattcctacattttctcaatcctgcgattcaaagaggccggaaaagtgacattcagcaaattgtttttccaactccggttgttatctccttaaacagtttactaggtactacatttcttcaacaatagatttatggctaaccatttgagcggaagccaacttttctgaaattcaattcgttgatcaatacacttatctgggacaataaaaagttcatgttatgctacatatccttgaaaaataagtacctggatcaagagcagacacagacagcaaggaggcatcgccatccggtgccaacattgttggaagaaccctagctgacgttgccaccaacgtgttatccatagctggtatagcttctgatactgctacaaagtgtttgcattgtcttctattaaggattaggatactttgtgtatcttgcaaattacaacaagcactgaatggtcagaagtcaacaagcaattaatttatatcctacttaatataacaccagcaaatgcagtcttcggtttcaaaaaaaaaaaaaaaaggtcagaagtcaacagcagcacttgatactttgtgtatcttttattaagataggagcagttagttcatgccagaagcaatgaatgtattttcatctcacgaatgttgacatgttcagatttcaaatatagaatgttagtagatgctgatagacttcagtttgacaatctcttacaaatagcacattttacatacgagtttggactacgcatttgctcagacagtaggtcaaactatttcacaaatgctcagatttatattaaaatttaagataattacattatgcatcagtttcagagaacaatgagatggtcaggtacagagcttctgagatctcttctttctggtgaccatatgatgtaacctctttacctcacagttgaacacgtaactgtagtgaggtggaaggtgagatctccaggcgagaaccttgaattttccttgaggtttaacatttccaaatagaaaatctttcacattcaccatgggaacttcatcttcactgtgagcagagtttttgtgacaatgaatcatgttcggagcagaacatatttgatagtcgtcaagaacaagaagatattccgagttaattttgtttacggtcctaatatatgatggttcaactgcctgccaaggatcatcaaaaaaatatgcaccgtagagtaagagattgagcttcttgaattctctgattatggccagagccctcctccaaaactgaaagttgatatttgctttcagaagtccactgtagatgcttgcacccatgaagcaaccattcaattccctggcaatatccatggctactgatgccagctttgggtgctccactgcgtttatgctcccaaatgtgcgaaccttgaaaaagtaccagtaagcttcttgagtaaagaattttactctaagagcttgtgtggttccaaagcttgcaatcttttcagatcggcttgcgactataattttgctaccacttgcaacatgactttttgaagctgagtacaatcttctccatgcaccctcattgatatctctggttagttcaataatgattagtatcctttttccaccagtggcatggttttgatgcttgattacaccagaatctctaagagtcaatatgtttgcatcttcaagatcgtcgtcattgaaaagcacaatttgagagaagtggttacgcaccctttcgtcgtcacaggcatgttcaatcagggtgctcttcccaacttttcctggacctatgatcggcaggacacctggattttcagtaccggtggtatcctctttcagcaggaagttcatgatgtgctccatctccatttggcgactgaacaagcactcgtctaaaagcaagtgcatgctatatggctgacggcaaaagcgtggataactattcaggaacataacaaattcactcatatcttcaatggtgacttcaagtctgccaaaaacttgttgcagcagatgctcttgtacactctggccagtgaccctgcagaaccggacacgcttggcaggattgaacatcgatggtgcaaaagagctactcacctcaagatctttgggattatattcttgatgaccatggcatctgaagctgtcgagggtataataacctctgtacatctccttccttagtatgttcagttgctgcagcatggcttggtttatgatgagccgttcatctgactcctccacgatgaaacatgcctggagcagcagccgttgcagtttctcctccacggttagcactgtcggtttcgagcacttgttgatcaggaatgatatggatctactggcaagatcacccagaatggcagacagaaatatctccatgtgaaactgtgtagtctctaactttgtggattactcaacggatcaacaagatctgggacctgagagaaactttgtagtctgaaaatctgtaataggaatagagattaaggcagcgtcaaactcgagtagctccacgtctccataaagagagatgcatttcagaacatagatataccgtataccttttaatgtgtctgaacctagatatgcttttgaatgtaaactgtttgaattcaagtttgtatttttccctgcggtttggattaatataaccgtcgaagattgaccacatagctgagacgacgacagcagcaaaggaaattctacaagtttagttcagcaccatagatctctggtcaagtttcacaagcacgtgtatttttagttgaacagtctgcatactagacaaaatgacctgacaaacatgaggaaaatacatgtttaaaccattttattatgaaagccagcatgttaaaactgataaaaatggaaactgctgatagcacagctggcaaagatagcagtagtgatgcctattggtctgcatttgagtattgccagaagcagtcatattccttcattgttttgacgtaataggaacgaatatattgatgcttcttcttaaaaccattggtaccaaccaattttcccaactgttgaaaatttcccatcctattccaagccaggatcatcagataatgttgtctagtagtagtagcacaactgttatgcccaaatacaaaatacatttttgttttgttggcttgaccaatagtttttcgaactgcggttgctgtctcatccttaatcagctgattagctacattttttttttgactgaaaaaggtagagagcttttttttttttagctacatttcttcaacgaattatggtagccgcaattctgaaattccttttggagatcaatagttgactgctatgggaaaaataaaatattcagaatatgctataaatccttgaaaattaagtaacctttggatcgccaattagacgagcaggacggaggagtggcatcgccgtccggcgccgccattgttgccgacgtctccagatccagccagggctattgcggccacttgccaccgccggccgagctcggcttcatggcggacggcatcaatcgctgccaaatcaggggagttggaggcagagcactagcctactagggcgcccaccaccggagcgccgccgccgtccgccgcccgccgacgagcagctcgccaacgccggcgaagtgggaaggagggcccgctggtagatgggctggtccgaacggagtttgcgcgtggtccttttcctatgagaaagtccattgctcatccctcatcgatgggccgagtcttattatctctctctttttttttttttttgccgggtcagccaaagaccggtgaccgaatttcattaagatttgaggggagaaaaagaaaagccgagtcggggggcatcggacggcacgggcttgtcgcggaggacgtgatgagtcttattctcatctctctcaactacaaaactaggtatataacctctctttaacatttaaaattggctcgtttttccttcctagacgatttcagtgacggttttattgtacgtgatgcctacatggcacgttggcatggtattgatacatatgttaactcagggtaatcttcaggatttgaggttccgaatgcaagcaccttgaagaagtaccaataagcctctcgtgacagaaacttcacatgaagagatcgagtttgttccaagctttgcgatcttgtctgatgggcttgtgattatgattttgcttccagctgaaatgcaa

SEQ ID NO: 1682 - DNA, 3513 bp, Oryza sativa
acatttatatttgccctttaggactagatcaatgttactgttgaaatccccaaatctatctcttagatcaattttctgcaactgctcttgtaaactatggccactgacccagaagaaccgaacacgcttggcaggattgaacttggattttgagaaagagttactcaccttgttatctttgctattgtcttgttcatgggcatggtatctgaatctgtcaagggtgtaataccctctgctcgacatacccaaagagttcgactcagtgcgatgggactacttgctagctatgcttcagcattatggcttcccacagaaatggagagactgggtctcatctattctttccacctccacctcacaagtgctcctcaatggaatcccggggggcaaaatatagcatggcagaggtctaaggcaaggcgacccgctatcaccgctcctctttatcctggcgattgatcccctacaatggctgctttcaaaagcaacggagcttaatgccatcacaaagctacggggaagagcagcccgcctaagaatctccatgtacgccgacaatgcagtggtcttcatcaatcctgtcaggaaggatgtccagaccttcactgacatacttacacgcttcaggcatgcggctgggctggtcacaaatatgcagaaatctcaggtggcagtaatcagatgtcaaaacatagacctcgacaccattcttgacggtgtaccagctgtgcgagcacacttcccgataaaatacctaggtctgccgctagtcctagggaggatgaggaaggcggatattcaaccactttttgacaagattgcaaagcgaacggctggatggagggggaaaaacatgggaccagcaggacggtcaaccttggttaaatcggtgctgacagcgcaacccatctaccttctcactgcactcaaggtaaccaaagaagctctaggccaactcgatgcgaagagaagaaggctcctttggcaagggacgggagacataagatcaattgggagaggacatgcctcccaaccgcgcaaggggggctcggagttctaaacttggaaaagttcagaagggcccttcatctgagatggctctggcatgaatgaaaagatcccactaagccatgggtaggcctcgaaacaccgtgtgatgaaactgataaaaggctttttgctacggccactaaaataacgatcggggatggcaacacaattcgattttgggactctgcctggttggagggacagagaccaaaagacgccatgccactagcctatgcgatatccaaaaaagaggaaaaacactgagggaaggcattgagaacggctcttggatcgatgacctggacctcagcggcaccattcctcccactgtggacctgattagccagctcgtctccctatgggaagcaacccagtacattattctcaatcaaagcgagcccgatcaaatcacctggaagctttcaaaccatggagaatactcagcctcgtcgacatacaaagcgcaatgcctgggaaccactggcaccaacttcaacgccttaatttggagagcctgggccccaccaaaatgtaaattctacgcgtggcttgtgatccaaaacagggtgtggacttcagaccggctagcagctagaggatggccaaacaacgggacgtgccccctctgtcgcgtgacaagtgagtcagcaagccaccttcttgtccattgtagatatactagaaggatctggagcctgactgccgcctgggtggcttaccagcaactggactcgtgccactgggctccatgccagagtgtccaaaattggtgggaaatgctagccaatacaaaggaggtgcccaaaaaaggccttcggaccctaattcttttaatagtttgggagatctagaaggaaagaaatcggcgggttttcgaacacaaggaaactgcggcccctagtcttatggcaaaaataaaagaggaggcaagaacttggaccatggcgggagcaaggaggctacgggattttctatcaaattgtgtataggccttctcagttttgtacagtttctcctttttttacccctaggggttgtactttgttccctctattttcaaaaaaaaaaagtaataccctctgtacatctccttcctcagtatgttcagttgcagcagcatgccttggtttgtgattagccggtcctttgcctcctccatgataatccggatcctcagcagcagccgttgcagtctctcctccatgtttgatgctgtcggctttgagcacttgttgatcaggaaagatatggatttactggcaaaatcactcagaaacacagttaaaaatgtctccatatgtaaagtgtgtaatctgaagttttgtacataactcaacggatcaacaagagctgggacctgacagaagctatgtagactgaaaatttagaggatctggtgaagcagagtagaaattaggcaaccacatactcaagtagctccaggaaaatgcattgtgctgtggtttacacaaacagtgttccatgcgtacttggaatatatttttcagagtgaactgttttgaattcaagtgtctgtttttctctacagttagcgttaacatgactgtacaagactgaccacatggcgcagacaatgaaagcaacaaaaagaattgtacagattcagttcatcagtcagtaccatctacttctaccactgttattgacagaaaaagaaaggatctgaacttcttgtcactaccgctgttattgctaataatcaatccaacgtatccattcctcaggatgatgccaaaaaggccccaatacacaaatccagtcttgtttctctttttcttttcctgccaggacaaatttcaagtttattgctatttcttttatttagatttaagtcttggcttctacttgtctgtctggaacagtagagaaaatggcatgaacggagaaaacgagatcagcaaatgttatccttaaacagtagaattatggttaatcacttctctgaaattcctctctctgggatcagtacacttttccctctggacagggttgaagaagctagtcagaaatatcttcttttctttctttttttttgttgagagttagtgctgatgctagtactgaacctctaactgaagctggtgtaattagtgtgatcataatgccatggagtgtttgtattaggatgctttccgtatgttgcaagctgcaacaagcaatgaatgttcagaaacagtaaacacaggatcaatatattagttgctgtcaattatcattgacttctggacaagtgtctttgtgcctcacgcatggtgacatgatcaaacttcaaatacagaatgttaatagattctgacgacttgagttcaacaacctcttaaaatagcacatacacatgagcttggactacaaatggcgcagccgctcagacagtaggtgaaagcatttcaacaaatgctcagattcagattacagttcgacataattacattatacatc

SEQ ID NO: 1683 - DNA, 2338 bp, Oryza sativa
tgtgctatagattcttacaattaagtacctcgatcacgagcgagaacaccttacaatctggaagccactggcccctccccgctgtcgctacttcctctggtttggtcgcagcgaatagatgctaggctactgatcgtcttcgccatcggggccggggctcccccaccctgtccactgtgttctttgcaatcaacatgaacagagtatagatcatatcttggttgattgcccataatcccgctagctctggcggtgggttctcagggtgattaatcagccagattgcctccccttgcatgaggcctccttccattagtggctttgccttagcaggaaaaaagtcgcgaaagatcgtcatcagggatttgataccattgtggcactagtagcttggatgatctggaaggagagaaacaactaggtcttcaacctccaacagtggccatgggtggaagtagtgaaaacaatggctgcggaggcggagttatggcgcctagcaaaggtggtagtaccggcacttggtctctatttttatgagtccctaggtcatcttaattggttgtgagattgtagtttaagtcctttgttccgctccggtatcccgtccccttcaaaatttatgtttgatttgtaaatagcttttattcctcttaatacaaagatatgctcctagcgtattcctgaaaaaaagagagaacaccttagaaaggttagagattgtaacaccctgacttttgtttagcagctaaaagttattttaattaaaaagcataattttaaaactttgattctttgtgtgtatcaacgaattagtggcaagatatcaattaaatcattcctagtaaacccaaaattttgatccaaaacattctatcttaacaaaaatctcagaactcgaattttggaatttacatctcccttgtaaaaccattacaaaattaattaaaatatccccattcactgaaataggacatatactaatccaaataactccttattcttaacactgtgtggacatcaaattataaatttgaattcaaatattcattgatatctccctaaaatttcatcttgttttatgttctcctcaaaatttatttaaattcatccaacatacaaactcccttgcattcctagaaactttttgaattcaaatttcaagcttgaattcaatatgtcaagtcaaatcatccaaacaaccatcaaatcaattttatggaaaatacataacttctagtgtataactgttcattcaggccgcgtcctataggatcaatcagtagctatcaattctcagcatgttgaaatcttcaaacttcaaacagtacaaaattaatagatgctgatgaattgagtttgacaacctcttacaaatagtaatcttacataggagcttggactacgccctcgctcatatagtttttttagataatggaaactttatttagactcagttaattacatcaagatgatacaatcaaaccgagtcacccccggcctctgcataaaatgcacacagccaaaaaagaagaaagaaacaactagaacatctcccaagcacaaaagtttaacagaaacatatatcttagtggctattatagtaggtgaaaatatttcacaaactcagttttagatgacatcttcagataattgcattatacagcaggttctgacatggtcagttacaaagcttcagaaaacaatcaaactgtcaggtgcaaagttcctgcgatctcttctttttggcgaccatacgatatttcctctgtacctcacagctgagcatgtagttgtagtgaggtggaaggtgagatgtccatgcaagaaccttgaattttccttgaggtataacactcgcaaagagaaaatcttgaatattcacctcaggaacttcagcttcactctgagcagggtttgtgatttggatgggacatgtctgatagtcgtcaagaatcacaaggtattcagaggaaattctgtttaccgtcctaacatatgtcggttcagacgtctgccaaggattgtcaatatatgcgccgtatactaggaggttcgtttgcttgaattctttgatgcttgccagagccatgttccaaaaccgagcgttgaaatttgctttcagaagtacactgtagatgcttgcacccatgaaacacccatccaactccctggccatatccatggctattgatgccagctttgggtgctcctgttcatccatgcttccgactgtgcacaccttgaaaaagtaccagtatgcttcttcagtaaacaattctactctaagagcttgtgttgttccaaagctcgcaatcttatcagattggcttgcgacaat

SEQ ID NO: 1684 - DNA, 7071 bp, Oryza sativa
aaccactgtcaacacagcttcagcgacttaccatcacaaagtgcccattgctagcagactggttggaagtccaaatttcgcaccagcaatgccaggtatagatctctatcaccatctacgtacaaatactttatgctttaagttttattagtgcatttgcagtactaggaccactgtttattttcttagttcctttttctgaattttttatttataataattaatgtcccttctctcagttacatgagtctaaagatgcttggtatgaagagcaacaagctctgaatgaattgaatgatgcaagtgaggacgagcacagagaggagtttgggcttttgtacgaagatgacaatggagaggacaacgatgagcaagaccatgagcagtcagaagatgaggaaattcagtacggcagtgatgacagtagcgaagaggatgaatagatagcttaatttggtataaaaattagaaagaacactgcaacctataagtaataatcacctaatcaacgtcatgctttacaggtgaggagctcataccatattagctacatatatattttaccgtctctcatgggtcatgtggtgtgattgtgtgaattaaacaaccaactattatttaccttttgcggagaaaacagctgcattatgtgtagtggttcctgagtggtgtaattggtactatttggacactcatagcagcctggttccttttctcttatcgctataagaaatggcatgcaaaccttctacgtattctttaaaaaaaaagatagttaaagtcaaggctttggattgaatcaggctagtcacaaacctgaaatgcatataacgtatagaagtataatagctgcagtaacaaattatagccttataggcccagttctaggttcaaactcgaccaagagatctgaatggcaacaatactgcatccaatctccagctcagcaaagaaactatggagcaactagttagctcaaatgtagattaattgtggatttgcgcataaccaaaaaaaattaactcattctaaataattttacctacacatatcgccggcggcgagaactgggaggctcagcggggcgcggcatttgtgcggagtttgcagcagaggccactggggcaagagaaaagggccgcccggagaagattctgccgctggtccccgagtcccgagaggcaggtgccttagccgttcgccgttcgtgcttccggcgcccgccgccgccgccgccgccggcagcaccggtagcttggcctggggaactactagacgtgtgaatcggacggtgggccgtggggcggtgtgcttggacgaacaagcacgctggcccatatggcccaacgacgcagatctggaaggcccaacataagctggaatcctggaattttgatgggccacgaaccacgtttggaaaaagttcactgccggtctctcatctaaggttgagtttcgatcgagtctctcaaccgcgaaacaatgtactaacgcaatccttatctttaccgaacagaggaaatgtagtcccaacgaagacggtttcaacgtgccatattgatttgttctttatctaatgtggcgtctatgtgaaacttatacgataaaacaacaacaacaaaaaaaagtgggtcaacgtacatgtaatccatagagaagaaatatagtgtgcatatggcgggactatatatttaaagtggttttagaagatgaggggcactatccaaactcaaccgttatatgcggaagagtaaattgcactagcggtccttaaacttgtaacgaggtttcacttaggtcaacgaacttgcaaagcgcatatcgaaatccctaaacttagtttattgtatcatcccggtctaaagccgcgtttgaccgtggtcttgcctacgtggcacgccacatgaacgatgacatggcacaaattttaattttccttttttttctctccttcctccacctctagatgcatctgtggcaggcaaagggagagagggagccagcgagaccggtgcgaggaggccgtgggcggggtcggcgacctggcggcggcgcaggagagaggcggggagaggcggttgacgaccggtgcgaggaggttgtggccggggtcggcgacctggcggcggtgcaggagagaggagctggcggctatcgagaggagaggaaaactcggcggcggcgtcgtcttggctcgagcggaaacgggcggcggcgatggaagggagaggccggcacgggggagctcggggcagcggcgtcggcgcgggctgtcgcgtgcgaggcagccggcacgcgacgacgcggctgaggcgacagcggcgtgtcggcgcggcgcagcttggcacagcgccgggagaggggcagcggtgggataagggaggggagctcggtgtgggagaggaggctgcccacggcgggcgtggcatgaggcagcggggcggtggctgagcgcggcagcacggccgggcgcgcgcacgggagggaggcggcacagctcaggaggaaggtggtgcggcgcagtggcttggccacgcgcagctaggaggcgacgccgaggggaggaaaggaggaagggacacgcggctgggaggcgccgcgcggcgtgtcctcccccaatcaccgtcgtcctccctccctcccgtcaacgaggctttggctgccccggcgacacctcccccctcgcgcacctcagccgcttccgcatgaatgacgtgccgccctcctcttcgtcccaccactccggcggtggcccccacatggccattgtcgccgtcgagctcgcgttgcccagctcgagctcgccccaccgccccgctgccgtcgtcgagctcgggcccgccgacgcctccccccgcacgcgcggccgcggtcggcgacccctcccccgggagcggctggcgacaccaccccccgtgcgcgcctcggcctcttcgccccaccactccggcagtagccctcacatggccgttgtcgccgtcgagcttacaccgttgagcacgagctcgccctgccgccccgctgcagcggcttctctcctcccgccagccgacacccgcgcgccgctcctttctcgccggccgctggccgcgcacgcgcgccgctcctctcctcccgtcggccggcgcccgagcacgcccgcgccgctcctgccccgcgtcccctccgaccatacgaggtgaggaaggagagaaaagatggggagaaaaaaaggaaaattaaaatttgtgccatgtcatcgtctacgtggcgtgccaagtaggcaagaccacggtcaaacgcggctttggaccgggatgatacaataaatcaaatttagggatctcgatgtgcgctttgcaagttcgtggacctaagtgaaacatcgttacaagtttaagtaccgctagtgcaatttactctatgcggaatctaaagtgaatttttcctgccacgttttgagcgctagtatccctgaaagaaaaattgctgcaccacaaatcttctcgtcttggtaagtactatagctgtctgacaatcttcaataatcacttgttatgattccgaccccaattccaggtgaatttctgatgaacttcaacaatcacttattatgaatttgctatattatatgattctaccgctatatgtaccaatcgtaagtaaatacactagtatactttacatggtatatagtagtatatttctatggctgtacttgaagcttgaaaaaagtggaatctcacaagcagctcgatcgatcagtacaccgtgaagatgagatgaagcctacatagcagcgagctgcctaatgttcacggggaagacgagcggcggcgagccgtcgaacgcgacggcggtgagcatccgcgcggtggcctcggtcgggtggtagaagtcccagaacacgtagcccgtccggttggcgcagtagaagctgaccggggtgcagccgatcttggcgttcatgtccccgaggccgcagcacgccgcccgcgcctccgcgaacccgtacgccgccggccgctcgatgtaccggagcagcgccgcgctggagtcgaacaccgcgtagcggaggcccgcgcgccgctcggccatcccgcgcagcagcgacgccgccgccgcgttgtaccgcgccgacgcgtcgttggcctcgccgctgcagcccctgtcggcgctcagctcccgcagcgacgggcagcagcccaccggccccgtccccaggaacagcaccctgcgcgccccgaggtcgtacagcctctgaacacaatcgatcgaacaccattagaacgtaacaccatgaaattgatcatttgatgatcgatttaattatctgtcgatcggtgacctcgatcctcacctgtagctggccggtgagcgactggatgagggcgtcgacgaactgctccatagggttggtggccttggcggcggcgctggacctgacgtagccgatgatgtcgttgctgccgatggtgatggcgaagagggatttcgccaggtggctcgccgcctgggcctcgccgaggctctgcaccagcgacgcctgcaccttggagtagtactcgatctgcttgtcgaagctgatgcactgatcctgcattaatgtttaacacaagtaattaaaaccaattttcaactctaaaacaagttgaaaacaaattgactatatcactgtcgacagaaatatgtaaaccatttgtattatttttttaaaaaaaatgaactttatatatagtgcgttgacgactaacatgcatacatataatcctacgtcctggtaatctatgagaaaagtttgttattgcaattacgtgtacgagttgaaactaattagaactaccttgtttgtagagttgaaaactccggcgccacctgaagcaaagttgacgccattcacgtagttagcactgctgcttgacgatatggcgaggtacggtggagatgtcgccaacccaaggttctcagctgcaatgcaccattcatatcaaaaatgaccaagtgataaattaatttatgatcggatacacaaggatcgggaagcttgtaataacatgattaaattaacgtactatatatgtaataagcaggttcaaaattacggactgaaattttcaaaattttgggtctatcgcccccctcccccccccccccccccaaaaccaaaactattccacccttttttccattttttgtgaatttggcaaattttgtttaaatgtgaccaaattttattaaaattcaaattatttcagtacctgatagaaaatagccaaaataaaaatttgaaccctggtggttagtatgtaagggctaagctgtgtagaacgtacgtatgtacaagttgaaaattgtaattgctaatgcacatatatatatttcttgtttttctgacttttttaaaaaagctgtttgctagttgtcctctcacacccttcttttttttctcgtcaataatgtagaggtccccttccaaaatcgaaacttacatatcttttatggactaattcatgagaaacttatgcctctagcctattggagctccaccatatggcacataacctatacatagaaggtcaatccagcaagcttgcaagagataaattaaagaaaacagtgttgtagccaaactaaagaatgataaaataaaattccaaattaattaaccacaacattttttagaacaataataaccagcttgtcaacatcaaataggtaaatcgcctaaatccgatcctcaaatgtagaataattaaggacgtacacgtatggtaatctgacccacgaaagtgaagtagagaatgacaccaaatttgttctcaattgattggcttcgccaacggacaatttccatttcactttcttgggggaaaaagttatggccaggctgaaaaggacatatcggaaaaaccctttggctagatatctgatatctcatatgatgtgcttgacctatcattcattaggtaatatgtctccagttatctttaaaaaatataatttgtctccacctaaatttatagctaccaaaaaccaaaattaacaaaatagagaaggcaatactatggtgtggcttcacctagtaggttgaaatctaagtgcacacgaatatatggagaaactacaaactatagttcattatagtgtacatccaactattgcgtgaaccttaaaatttatatgtgtctatatatttttataggtataacaaccaaggaaataaacatatcttgagcgtacaagcaacgtcggatgaacacgtacagaaattgattacaagctgtatggaatcatcaacaagtagccaacgtgcatcaatcaacattttgtcattggttctcaacgaatttagaaaagaaaataaaattactccctttattttataactaggaaggaagcccgcacggtgcgcgggctttttatttattgttttatgaaatagtgctaaaagaagtcatatctcaccatttctacgtcgtgagatagatcgtagacttcaatatagttaaattataagaatgtctcccagaattaaaaacactttgtcccgattacatataaattttcctattatcgtaacaactcattatcactattttaaaagctcgctaactaccaatacatgaaattgcgcataataaaataagcctaatatattattaatacactacttagctaagtgtttatgtctcacttatttccaaatccacatataaatattctaaaaatatcactaacgggtgaagccggtcatagccgtagagactttctttctctattaccttgaaaattgggtagttgtgtcccctcaagatcagcccgaagcacaattttaatgtctaatttactataaccctttcatagagtcctatgacacactgggcccactcaactcggccatttgtatgccacgttagagggtaaataacgggtccaccaatttaaatgaaaatcgatggtgagattatacagtaccatgtgatggcctaggagcacttatagcagcgtcatatggcgacttaggaatattaatagaaagtttaatgaacgtttagtatataatagtttttcttgctgcgaatagtagtaccg

SEQ ID NO: 1685 - DNA, 682 bp, Oryza sativa
catggtagagcaaacgcccaccccactcgccatgtgtgagccacataagaaagtgagctagtcaaataatacgcctaagccggacggcaccatcaagatagttccgctctctagtgctaacccagcaaagactatcaaaattgggcatactctagatgagaaatagtaactcgtgttcatcacattcttccgcaataaatcatatgtgttcgcttggcatccgtgcgacatgctgggggtccccagcgaggtgattgagcactaacttatggtgcatccccatggcaagctagtaaagcaaagattgcgtagatgtgcaccaggccgaagacaagccatacaagtagagctcgacgttctttttaaacctggcttcattagagaagtacttcacccagagtggctagccaacccagttatggtgaggtaggccaacggaaaatggagaatgtgtgttgaattcacagacctcaacaaggcatgccccaaggatcactttcctctccctcgaatagctcagttggtggatgcaacagccggttgcgagcttgtaagcttcctcgacgcttactctgggtccaccaaatcagcaaggcacaagagtatgaagagaagacagtgttcatcacgccgttcggggtactttgcgacgtgaatatgcctatcgatagggctgcaggaa

SEQ ID NO: 1686 - DNA, 33415 bp, Oryza sativa
  unsure (1)..(33415): unsure at all n locations
actatcaccctgaaacggcaaattaacatgctaaatcgcaagaatacaaaatggtcgtcgtttctgttatctggatgcacataactctgttatcaccctgcaaccgtaaattaatttgttagtgaacaagacatactagtatcatatatataggagtatcacctatcacccctgcaactgtaaattaatttgttgctgaacaagggagatattcacacgcatacaaaaattagcaagaaagcagggttgtttatgggagataattaattgcaattggtgggcaataagtttattattaccaggggtgaccatgtgagcgaaagagcggatccaggttgggctgagcccaaagtccttggcacacctcatgtgcgattaggggggccaatcattgcgtggatcattgtctagtctttcttggtttctagatccaattttattagtaccccaacttgctcctccgtataattatgctatattttgaccaaaagccaagggcgtatatgcatcttataattaattaattggacaagaacacacttcgatcgtagaaagcactaaagcgagatggtacattttggtacgtatatgtgctgatggtttactttgtccatcgtccgtgtgcaaataaatattagattggaaaatgtgcaactaaattggaacaaataaataagctaaaaacccttttgattggagatactatcaaattaattctattaaaaatcttgtcacgaaagaaattatatgaaaaatcatccgagatgattctaagttagccagaggtgatggcacgcgtgctgctgttttttgtttatgattatgtagaagatgcacattatattacatttatttgatatctgttacagtgcacaagaggaatacacaaataggccataacatttcacatccagatactaaattcaaattacatttataattttgtcaacttaattattatagtctcatgagccttaccgagaaattttttattattttacctttttaattttaaaaatagattctcacaaaatttattttcagttttgaatcctttggcacacagtctcggtgatgtggccaaacaaaattgccacgtcattgtttcgcagccaccgacacttgtatgaccaaaaagttcagaattagaaaacaaatttcaggagagtctacttgtaaaattaaaaaggttcaactttttgaaaaatccatttactgatgcatgctacatgtgtggatgcatgttgttcgagctaagagagatggctttggatcaaaagaatcccatcaaataattctggatgttcacataaatttcaactatgtatggaatacctgaatagaaaatcaaatcattttactttcataaacattaattataactctctgcagttttttaaatacacgtagaacaaaaaaatattggtctaattaaggattttgaagatattgttaaaatagcatattctcatgatccagataccaatgactacttattaatttataacgtaatatgtttttatgcaaatagtactacatccgttttaaaatatagtgacctaataaactagatatttctagtactagaatatgtaatatatcttatcccgtattagatggttatattttgatatagatgaagtagaacactaaacgctcgtcagattaaaaaaaaaaactctggcagccaaattagaaacttaattatttctcaacctggactggagatcgatatacgtgatgccagtacgcacaaaaggaactgttggagttattttgcatttaaaacggtcgcgactgtacttcttgattgcaatgaaatactcctgccagcccaaaaaagaccattgaaaaaggaacctaaaagaggaagagaaatcaaaggggcgatgccctgtagcagccacgtgaacggtcacatgcattgctgctgctgcacggcgatcgctgaagaagctagctaggcccccaaaatgcactgaagctgcatacagatacagatacatatacagagggttgtgggcacaatctgatcgaactctgtagtctgtaccatgccgatatcaagtacctcctggcctaaaatctctagaaaattaacgtcatcgagcttcgtgtatatgttcttggaaaactgtacaacggataacgtattcgggaccatttagtactactgattaatttttagaaaatataataacggagtatagtatatattgttgaataataaaatttaagtgatctcgatgatggtgtagtctaccagtagtagttggtgatggctcatgtgacacgctttgtgattttcaatttgtgccgacgatttgtttgtgattttctaaagttggtagttatgttaaaattaatagaaactatatgcggataacttaaggtagtatttggttggttggtgggatgggatgggatgggatgggacgaacccacttttagaggtgtttggttgaggggcgagtgggatgggttggtccctagagaggaatattcctcccagatccgggacaaacccatccggcaaaatcggccggacgagctcgtcccacttggacggagcacacggcgtctccttggcgaccgccggcgctcgtccgcgcccgcgcacgctgcctcctccgtgaccgccggcgctccgccacgaccgcctgccaccacctctgcgaccgccggcgctcctccacgaccccctgcctcaacatcggtcgccgccgcgagcgagatgctcggcgccatcccgccgctcatcgtgatgctcgacgagagcggttgcagcagctgcggtgatgtcgacgcggcgggctcgagtggcggcgaagcttggaggtagggagggcggcggcggcggatccagagacgggggactcggcggcggcgaaacttggaggtagggagagcggcggcggcggatccggagcaagggatctcccgatccagccgcggcgacgacggtgggccagcgggttgggtgctccggcggtggtggccgtcctgctgctgccgctgtgcttgatccggttgttccacgcgtggatgcaggtggcgcagtcaatggtcgttgacggtgatggcaaacggcgtccatctcatctctccctcatccctttaaccaaacaaaaaattgggattgtcccatcctacaaaccaaacatgtgagtggaatcattccaacctcaaaatcagggatggtttcatcccatcccacctagtcccgaaaccaaacacatgctaagagataagcactatcgataaaaagagataccacctctatctttaaagagttggtacttattcaagaatttgtcacagattactgtttattttcaagctttgatcgttccttttccagcaatgaactttataaatccaatactcttttagaggctttaatttttggtgatagcagtgaatctgctactccatctactcatattttagtttgagcatattacctcttgaattgcttaatattatatagcaattaaatgtaaatagatagtggtatataaaattaaattaaggtgagtatcttacataaaagatggggcaacatatttcatgaagaaaatacttttacttatgatagtcaacaatattgtgatcatttttcttttatctgtggcaatagcagagcacaggcacctagtacttttaaaaatatgctaccttactggtgtgttgtagggatgaaaatggtgcggatacagacggatactgcccataccatatttgtttctatttttttggatataaaaacgaatacgaatagctcagatttagaaacaaatacgaattatctcaaatacgaataaggatcgaatataattagacacgaatacataaatatttttttctcggaacacggaaaccacctcaacttctaatagaaacaaataccaccatatataattagcacattataaaatatagtataaattataaaaatattcaaaattttaaataatattaataatgtggactagtgttaagagatgagctattattaatctaaaaaggtagattgaaggttgtagagttataaaaaaatgatgtatttctcatgactttagcggatatccgaataacacggttcaccaaaaatttatattattatccatatccgtcggaaacaatgataacatatccgtattcatatccaggagaaaataggccatgcccaacgctcctacatgccgtgtggtttcatcctagtggctccataaggccatgccaaacgttcctacatggcgtgtggtttcagcctgccctagccaaatattcgtgccggcaaggacggagttgtgcccctacggggacatgcgtacccctgtgggaggtacgcgtgcctctagatgggagatgccttcggtggtccaggcctagagaggaggaagagagagggagaatggggaaaagtaaggacacctagagacatggagtatgtcgaacagacaaaggactccggtgaatagatcaggggatcaggaagctaatcaggccaccgctgacaaaatcgacacgatctcattggagaaatcgatgcaacctcgctggatcgagctcccaccacctcgatgcacccaatgttgttgtcgggccgtctcttgggaaggaggggaggaaggatgccccaccgtcttgatttggtcaatgaggtaggagggctcgtgagcatggcggtgggcggagaacgagagagaccgatggcgcacgtggggagaggagaggctgaggacgcaaatagggggagagatgtgaataagggagaacgcagcagcaatgcttgttcgatgggggagatgcgaatcaatgagaaagagagggttgggtggaaaaaaatatagaggaagtggacgacaaatgggaccataaaagattaagggtacatatttgccatattacctaaaacataaaaggttcaggtgatcttataataataaatctcaaagacctgacatacaaataattaagtactgaaaaaaaacatgtaagtgtgacctccattgtaggatatgtgacctactgacctatgtgtggtgtcagctcacatggcccacgtgaaaccactgctatatgtgacctccattggccatgccctaccgcggcgtgcacctattgattcatgcctggtttgtgcatttggtttccatcactttttttcatctccttcatgatctttaatttctttttagtagttgtggtggaggaagcatctaatcacttatccaagtctgaactgaatccataccataaaggatgttaaagtacattcaccaaaaagaatctagttcctattgtctggtgatctgcaaagttttttttttttgagaacttggtgatcaactgaaaagtgaactggtgagagcctatgcagactaaaaataactagtccctcgttggacttcgacatgacctcttctggtagtaatagtactcttaccttggacaatcatgaagtagtgcccagaaactggtggcttcattcaacaaacgctacaaaactaatacctgaaagttcagggttgtatccttgtaggcatcagttactacaaattaattgcctgttagtattgcaaatgtttctggacgactttttggcagttaaaagtgtgtggtgccctctctagtctctccttccttgcatatatgtactctacagtactatatggcctatcgattctgttgcctaagcactacaaatttctgaatgggacctaaccatttgtactatacggaaacatgcatagaaccagaacatcaacatcaactgcacggtaagtactctgtgtctaaacaagatttcggcaatactaaaagggaatggctatcaagctggaaaagtggatgggtttagagacaagaaattttatacaggttcaggccttcttaatcaaaaagtaataccctactcttgtccggggattgatccgccgagtatattattaatcgtatgatctgggtgaaaatcgtgcccctagaggcacccggaccgctccttatataggggaaggggtccgtattacaaagtacagtccatatccctaacggaataggtagttacagataaaatataatcgtaaccgactaggatcccgggtattttcttgacatacaagtttagaacttaacccgagtccctttaaagatattctatctatatatggcaccccatactcagtcagatatacatgccgtgtaggtatgaggtatccataatctccacagtagcccctgagacctttacagtcgacgaaatagccttctctcgtaatccaaaacgataacctgagtacctcgactccttctgccttgatctcccgaacaccaaaatcaaagacggtaaagggctgaaaacaaaaaatcgggtgcatcgactagatgcacctaattaggtgtagcccccgactatgtgattagttaaaaactaaacatatagtcaaggtgcaaataacatccaaccgagtggttttacaaccgaattatccaaaatatcatacagccaagcacatgcgacgtttaataaaacaaaacatccagccgactgctttagctttaatataccaaaaatggagatataaagaggcctgagtaaaaaatactctaaaggtccataaatcaacacatatgacaagaatccgagtaaaaactctcaaaagatccatcaaatgtggtataaatatgatatcatgataattgatgagtctaaatagcctaggctatgactcacgccataatcaaaataagcatataacatgccgagaaaatgattgttcaaaaaccagtcatctcaacaaaacccaaacagcctttgcagcctaaaaaggctcacaaaagtagtataacacctttctatcgggcacctttttatttgcatcataataattccgaggaattatctaactgcgtcaaaaaggattttaacagcattgggccatactgttgtaagcaaaaattgccgaagcaaaaatgcctaagtccctaaggatcacaacttaaccacgccgataacaaaattgggctgaagtactgttttaggcccaggcccattagtattcccgatacccaaataacaccaaaagccaaacgtcgcttcgtcttccccgccgaaactctcgccactttccccattctctgctacagtgcaaaagccgcgccggcgaaactagggttcaccgattcgctccaacccatcctccaaaattccacaaaaacctcccatgcaaccaccgcatcaatctcccatccattcccagccacatctcggatcaaatcacaccatctagttcgtatccatggcggaagagagagaaagctttgaaggtcagtgggcgccctccgatgtaacggaggagaacttgaaggagatggtggcgcacggcgtccttccggcaaaagagatcatcgggtggcgtccagcatatggtgaaatgttcccgacccccgacacacacgaggtggtggtattctcccatttcttttatggcggattttctcttccaacctcaagattcttccgggggattttggagttttacgggatcaatttgcatcatctaaaccccaactccatagtccacattgccaattttatccatgcttgcgaagcttttctggggattaggccgcatttcgctctattccgccgtatcttcttcctcaaaccccagccaaacaaaagcaaaccatgcgtagttggggcagccatatttcaactgaggggaaccttgagccaaaaatatttctccatgccttttaaaacttcaaataagggttggcatgcaaattggttttatgtgcaaaatcccgaaccaactcttcccgagtactcctgccttcctccagtgtatcaagatacttggaactcacttccaatgggagatgaagctgctcaagcgcttgccctgatggatcgtatactgaagctgaaggagtagggtctgcaagaggaacagatcacccgacattttatcaagagctggctggccccaatcaaggaaagatctcacacggcttttgaattcgacggcaagcatgaccctaaccgcgaagatctagaatctcttgaattcaaaattatgaaggagagaatgtataaaatcttctcaaatgcaatcgtagtcagctattcgcacttgctgccagtggtgccatacaatgctttcaacccccctccaccggtatatatttaacatctcagcctttctcaaaagcatgcttttatcatctacaaagttgattgaaaacttggatcatcatgcccaggaattcgccctgatgaagtcagatcctccaatcgctcaacgccgctcaccccgtcggcaaactggtcaagctggcggaggaccaaaaatccggtctgatactcaacctaacacctctcaatcggctaaccagtcagacttccgcaagaggaaattggttctgagtgacgatgaaaatgacgatgctgaaaaggctggcagcaaaggggtgactggaaaacagccaaggcaagctaacccgaagaagaaaacatccagtcgtcccatgccgaaaatcaggaagtcctccaggtacaaatcatttggccatttcccttgtattgttgctcactcactattgaaatagcactgatagcataactcaaatttataggaagccatctgacatagatccttctggaaaaggcctgagccgactgacacggagacgggtccttcaaaagaaaccggagcaactgccgaagatcgcctgagtgataatcaaccagcaaccgacaatgtagagaccagtaacgagcccccgactggaaatcagtcggccgaagctggagtcggtgctaatcaggagcccccgactagaaaccagtcaggtacagaacaaaataatgacatcccggaagtagaagcccaggctgatagccctcccaagacgagtgctggcgtcgactctggaactaactctcctgttagggtgcaaggacctgctcgtccccgaccggaaatcataacagataagcaaatcctccaaatctgttttgatccgacaaactttctccaattgtttcaccattattcatgaatgcataaggccccgatgatcggtgacgaagaagaggtcctccggatacaatcggctgaagattctcgcccacccatattagtcaagtggtgggatgacgaaatgcaaccacaggggatcgtaataaataaacaaaaagaggacgaggaagtatgtctgctgaaaaagacactcggccaagctactcgccttgtaaatgtaagtctccctatacacggcttcaatcatcctgtcagctactttgcttagatacagataaatttgtggtgcagagaatccatctcaggaatgaggcgaagaccgcaactcttgaaaaattagttccctagcttggaacccttgaagcaaccaaagaccagctgcgtgaagccaaagagcttgctaggaaaactgaacatgaccttagagatcggattgccgagcttcaagactctaactttgagctgagcggttcatcaaaagataaacatcgtctctgtttgatttgtttcatgttgctatccatgtgcaactgaccaatgaaaagcaacacagtgcaagcttctaggatatccgcgctggagaagcgaatccaagctctggagaaagacaaggccgagttggcaaaacagagggactcggctctgaaagatgtcgaaggtactggtagctgaaacttcaaaaaccactctcatcttcatgcctagtcattgatgtaaacctatttgtgtagaccgcaagatcaaatcctaggcccaattcgacgtcttagttaataaaattaagaagcttgaaggagccagagatgaagtcgccaatgccgctacgccacttgtccaggccatgtttttcaataacaacggtccaagttcacttgatgttgtcgaaatcttcgacaagctgagagctactccggatacatactttaagaacatcaaagaagctgggagtatgggagcaggcctagcgctggcgatgaccaagtccttgtacccgaaaattgatattgatgctgttgacggctttgaagatgggacaagtgaagaagccgcccttgacctcatcagtgatgcgtaaaaatctgccgacaagatagccgctgatgtagtggagagattccaggacaacaatcttaagccgactgggtctgatgattctgatgatgagaaaactgaatctaattaattgtgtattctgatgataatgatgatgacaatggagacacaatttgtactatactgatgaacttatgctgtgctcgatgatttaaactcagctctagatttcttaaaagtttttgtcaaaccttattgagcctagaacccgcaaaagttgttaaaaactttcagtcctttttgattgagccaaaaaatcgaacaaggcaatgataaatcaagtaagcaaattgaattgataaaaatcacactccattattattatagtagcccccaactgacaactcaaggaaaaacttgatgttagcagtcaaagaggaagatacaaaagtaatgcctaagcataaaacgacgaagatgttcaatatttcaagagttgtcgatatgagtaccgtcttcacgcttgagttggtaagaacctggccgagtgacttcagaaattatgaacgatccttcccacaagggagataacttgtgccgatcccgtgtagtttgaatttttcttagaatcaggtcgccgactagaaaagttcgtgatcgaacattgcgattgtgataacggcgcatcccttgtaagtaccgagccgactgaattagggctgcttcacgggcttcttccagtcggttgagatcatctactcggtcttctccgtagcgctcctctctgtagttacgaaattgtagagattcaaattccacctcacttggcaacatcgcttccactccgtagactaggaaaaacggcgactggcccatagcccgactaggagtggtgcgcagggaccaaagtacagatggcagctgttctacccacttgccggcatagggatgcagtcggtcaaaaactcgtgcttttattccttggagtaccataccattggcgcgttcgacttgtccattgctcatagggtgccttacagaggcataacaaatcttgatgccgaagtcctcacagaaatctttaaatactcctccagtgaattgagtgccgttatcagtgatgatctgattgggtatcccaaaccggtgcacaatgttgacgaagaaatctctagccttgtttgccgtgattgtaatgaccggtttagcttcaatccacttggaaaatttgtcaacggctacaaagagatgagtataactaccgacagcctttttaaatggaccaaccatgtcgagcccccaaaccgcgaacgaccaagacaacgggatggtttgcaactcttgagccggtagatgagtttgtcgggcgaaaaattgacaaccctcacatgttcgcacaattttgtcggcgtcggacacagctgtgggccagaaaaaaccctgtcgataagccttgccaacgatggttcgtgcggccgcgtgattgccacagatgcctgaatgtatatcctttagcaattgtcttccctcctccaaagacacagcgttgcaggattcctgacagacttttcttgtacagctcggtctcatgtaagacataaagtctgctgtgcttggagatctgctcggcttcatctttatcttgagggagttcttgtttggtcaaaaatcttatgaggggctctctccagtcggcttcaatcatgcttacgccttgagtgtttgtggcctcgattatttctttccttggtacggttggctcataaagatgctcaataaacacgtcagaaggagctgcttctcgctttgaaccaaaattagccagtctgtcggctgcctcattattatgtcgaagaacgtgggttagctcaagtccatcgaatctatcttctaacttgcgtacctcctgccgataggcggtcatgttatcatcaaggcaggaccactctttcatgacttgattaacaaccaactgagaatctccacggactattagacgccgaattcccaaggagatcgcaatccttagtccgtgaagaagcgcctcatattccgccacgttatgtgacgcagaaaaatgtatccacaatacgtagctcaacctctctctagtcggggagattagaacaacccccgctccggtgcctgaaagcctctttgacctttcaaaatgcatagtccaatactccatcttctctgcaggcgtgtcttcttggcactcggtccactcggcgatgaagtcggctaaagcttgggacttgatcgaagttcgcggcttgaaggatatatccaaagacataaactctaaggcccactttgcgatccgcccatttgctttgcgattatgacgtatatccccgagtggaaacgatgtgaccaccgtgaccgagtgaccttaaaaatagtgggataatttcctaatggtgattagaacaccgtataacagcttctgaacttgaggatatcttgtcttggagtcagccaaaacctcgctaacgaagtagattggtcgttggactttttgaacatgaccttcttcttcgcgctcaacaaccaggactgtgcttacaacctgggaagttgctgacacgtataacaacaacggctcttgtggatgtggtgaagctaagactggtggagtagtgagaagttttttgaagtcttcaaaggctttttgtgcttcgggtccccactggaaattatcggttttctttagcagcttgaaaaaaggcatcccccgctcgccgagtcgtgagacgaaccggctaagcgccaccatgcagccagttaacttttgaacatctttctaggagctcgatggtttcatgttgaggatggcattgattttctccgggttggcttgtatgcctctatgggacatcataaatccaagcagcttccctgacggtactctgaagatgcacttttcagggtttaatttcatcctgaaagcgtggatgcttgcaaatgtctcttctagatccataatcaaatcatccttctgcttggtcttgacgactacatcatccacataagcttcaacgttgcggccgatctgagttgaaaaacatctctggatcatgcgttgataagttgctcctgcgttctttaatccaaaaggcatggtgatgtagcagtaggccccgaagggcgtgatgaatgaagtctttaagcagtcggattcctttagtcagatctgatgatatcctgagtagcaatccaaaatactgagtagctcgtagccagccgttgagtcaactacctggtcaatgcgaggtaacccaatggggtctttgggacaagacttgttgaggtcggtgtaatcaacacacatgcgccattgccccgtcttcttctgaaccaggactgggttggccagccagtcgggatgaaggacttccttgatgaagcctgctgctaacagcttagtcaattcatccttgatcacatcttcctatcctgtgcaaaacggcgcagtcgttgcttgattggtttagcgtcttccttaacatgtaaagagtgctcaatcacctctcaaggaataccaggcatatcagatggtttccacgcaaagatatctttattattttgaagaaaggtgatgagcgtgctttcctatttacaacctaactcagcgcttattacagcagtcttagtaggatcagagggatatagaggaatcttcttggtcttggcgtcgctttctccgctctttggcatcttggtcgcaggcacttctccttcgcttgctgtggacgcagccagtcggatttcttctcgggcgagcgtgatctcgcgggtctaggccatctcgcagctttccttgtcacacgtgacggcttgcttgatgtcactccgcagggatatgactcctcgaggaccaggcatcttcatcatcatataggtatagtgcgggacagccatgaacttggctatcgccgggcgtccgagtatggcatgatacgctgtatcgaaatcagcgacctcaaaacaaatgttctctgtacggaagttctcctgagtgccgaaagtaactggaagagtgatctggccgagtggcgtagcagatagccccgggatgactccgtgaaagggcgcattactcggctttaattccatgcgagggatctgtatgtcgtccagagtcttggtgaaaaggatgttgagtgcactgccaccatcgatgagggaccctgcgaagcttgacgttgtgaaccactgggtctagtaccagggggtaccgccccgggtggaccactcggttaggatgatccgagcggtcaaacttaattgttgtctctgaccatcgaagatattggggcgtgttgggctgaacaacattgatctctcgttcggtcagcttttgctttctcttggattcataagctaggggtccgccaaagatgtggttgagttccttgtgatggtcttgaaaactagtcggggcatcatcttcatcatccttcttctttgacgtgctttgatctccgtcagaggtcttgcgtgcgttcttggcgtattgttctgcaaactgtttgtagacgaagcaatctttggctgcgtgattggaattgttggatgatgcgaacattgggagttcatgatcttgtcaaaagtgttgacgcgtgaacgttgtcgggaggatggtgtagtagttgccacaagttcctcgggcttacgcttgcgatccttgtgattggtacttccactccccctatagtcggcgtatctttcttcggctttcaagtggtgcccgactgcttggacgcggtaatggcatcttcggctttggcgtactcattggctttttcgaacatttgcttgaccgtcctgggaggcttgcgcccgaacttgccgactagttcatcgtggcgaatgcccttagtgaaggcggcgatgatgacgtcgtcggtgatgtcggagatcttgttgcgttgctcggaaaagcatcggatgtaatctcgaagggattctccagacttctgaatacattgtagagatcaaactgtgtaccagggcgttcaaaggtaccctggaagttggcgatgaagtggtcgcgaagttccgcccaagatccgattgtgccacggggtaacccgtgaagccaggaccgggcagaatccgctagggccacatgcaaatagtttgccatggctttgctgtctcctcctgctgcgcgaattgtgagaccgtagacggtgagccgagactccgggttagtggtgccgtcatacttctcgattccagtcggcttgaagccagctggccaatccactcgacgcaggtcgcttgtgaaggcagcaactccatccacgtcgtcgtcgtagcgatctggtgaatggtggggaacgtagcctcttgccgcgcgccgctggttgatagtgtcgcgaagatcgacggggcgcctgtgatgtggggagcgatgtcgttaaactcgatgctccctgtgtcgttcgggaggtgagtggacagatcgctcgtcgtgacccctgctcctgcgactggatcccgcgctgatgacactgaggcttggttggtgacagtcttgagatcgaagagggggaactcggctgctagtcgacgtgcggacgcttgcagagttaaccaggaccgaggcggcgatcatggtcttggtctggttcaagatgttgacgatgtgattggcttgattgagtgcgtcttccttaaggagggtgtcgaggagggtgatcgctgcaactgcgttctattgaggggtgcgaaaaaccgccgttccctcgacgtcttgctgcccgataagttctcgtgctcttcgcccggcatccaaggcgcgctatcgccggtcctcagcctcttttgcagcccgttcgcgctcctgttgctcacgctgcagccgttctcgctcttgtgcttggcgctcctcttccagtcggcgtcgttcggcttcctgttgcacgcgttgttcttctgcttcttgggctttacgctgttcttccgtctcgttgtcagccatgaagatgccaaagtagagaggcgtgtagttatcttcaaagtcttcatcgaagtcgtcgaggttgcggcagtcgtagcggtagccgaagtcgtcatactcaatgatctccgttggccgtgagtcgatgtcgggggagctgaggtagccatccagttgttccgtcgaaaccgtgccgagaggctggagtatgacgccgacttccctggagctaggctggatcggggctgaggccggatcccgcctagacctacggggagaagacgcccttgtggtgaagacagcagccaaatcatcggggagtttcatcaggattggcggataggccccatcgtcttgatcggatcgtgttggagtagattggatctcgcccgagtggtttgaagccaactcggtggagatgatcttggggtagatctcggccgagttcgggataccgaacggggtggagatttggcctcttcccgactggttcgaatccgagtcgaggagagaaatcttgccgaagtcgttggtgatgaagtcgaagctgccgaaccggaacgccttctcgggagggaagacgaagttgtcaatgccagaaatgaaacccatcgcactagtcgacgaagaacttgacgcttcccttacctggtgcgccaactgtcgaaacaagatttcggcaatactaaaaggggatgactatcaagctggaaaagtggatgggtttagagacaaggaattttatacaggttcaggccttcttaatcaagaagtaataccctactcctgtccggggattgatccgccgagtatattattgatcgtatgatctgggtgaaaatcgtgcccctagaagcacccggaccgctccttatataggggaaggggtccgtattacaaagtacagtccatatccctaacggaataggtagttacagataaaatataatcgtaaccgactaggatcccaggtatttacttgacatacatgtttagaacttaacccgaatccctttaaagatattctatctatacatggcaccccgtactcagtcagatatacatgtcgtgtaggtacgaggtatccataacctacacactatgacgaattgtcatgcaaccccctgaaaaataaaatactaagcctacaaaaaaagattcttgtggcgcatatgcaaactaaaatacaaagtaatatgcaaactaaaatacaaagtaatcgccacatgcgtgttggctttgcaccagacccaccaaacgggagatggtaagctaatggagacagatacaagtacgtgtggttttaatttaattctaatgcgattattatacacctgttttatgtatcattactaaattatgggctattatgcacttagacccctaggtgccaactataaattttactattattttggtgttgcatctagaaattaattttgaggctagatttaaattccaccatcgaaaaaaaaaatccagaaattagttttggtgagctcatcagtatatgtccttttttgtgcggacaatctgttcgcatgatattatacgacacgattggactgcaacgaaagaggggccccactcgtatacagacgtcacctttcaactaactaattcccgcttgttccgagacaaaagcctctcttgcacaagtcacgtggtgagaggccccaagaaagcttacctaacagttcatcatccactagctagccactttgatcatcgatgaagctggacctttcgttaattgttcctcaattttctttcaggaattaatcatacatatatatatgcagccgttggatttgaagttgttgccacattcggaaggacgcaaaacgggatcagaatcctctgcagttgaagtcatgggactttatcattgacatgtggacccgatgattcctggacccaaatatcagtgacaaaagcaatgtgtatttgactgcagaggatctcaatccagcaaaatggaaggcgatggcatgagcaacacgccaacaagttcgaaaccttcttacaaaaagttaggagtagcctgtttcagcttaactacgggcctgtttagttcacaaacaaaagtttttacactgtcacatcgaatgtttagatatatgcatggagtattaaatgtagaaaaaaacaattacatagttcgccggaaaattacgagataaatcttttaaacctaattgcgccataatttaacaatgtgatgctacaataaacatttgctgatgacggattaattaggcttaataaattcgtctcgcaattttctggcagaatttatagtttattttgttattagactatgtttaatactttaaatgtatataaatgtatataagtatatctgatgtgatataaatggtcaaaatttttttttgcaactaaacaggtcctacgacaacaagcttgacaccaaagcatctgcacttctgcaggcaggcgtgtgtcacatgcatttctggctcacaggcacatgtatgtgtagttttaatttagccggtcagacaactgccatcgtcctctcttgatttcgcctaaaatgcacgctgcaagatagatctaactttgaggggaaaaattggagataataattttgctaagaaatagaattaatgctctttttttttgtttgacttgcaagcatgcatgtgccattttaaagaaagatcaatttagcgggataattggaactcacatgtctatatgcaggtcacgaatgactggattttgcggacgtacgtggcacaagggaatggctggtgggatctgcatttcccacgttcatattgatgttaatgaattttcccacatttatattgatgttatttatttagattcattaacatcaatataaatgtgggaaatgctagaatgacttacattgtgaaatcctccgtttcacaatgtaagtcattctagcatttccaatcctccgtttcacaatgtaagtcattctagcatttctcacatttatattgatgttaatgtctatctagattcattaacatcaatatgtatgtgagaaatgttagaatgacttatattgtgaaacggaggaagtaacacccttgatctgatattttcttttggaaaaagtacgaaaattacccctccaannactatcgcggtcgaccgaattatcctcctgaaccacaaaaccagatattctttacccccaactatgcaaaccggacgaattaccccctcggtccaatccgcggtggttttggtctacgtggcgtacgcatgacagtccaatcagcattctatttaaaaaaaattgtgggacccacatgtcatactctttcactcttcctctctcctctctctcactctctgtctcactctctcacgggtcggcggtggcgggtggtgggcggcggcactggggccgtacgaattacctcatcatctcctacggcgtcttcagcagagtaacgccgactccgaggtggccgccatggctgctaccaagaccgtcgacgacgagtcggtggagtcctacgtcacccagatgatgcacggccctctggtctttgagtagaatgatggtggcggtgaagctgatgccgtcaacaaggagggtgtccaggcgatcccctcgtcgtcgtcgccgatgtcgtcccccacgcctccccgcgtccgccgccagccacctgcgcaacctccgcgtccgccgccgccgtctgctgccatcctcagtggtgccgtggcatgtgctgatgaggggagggaggagagagagatagaggtggggaactgacaggtggggcccactgatttttttattaaaagaatttctgactgtattgccacgtaggaccaaaaccagcacagattgaggcggggggttagttgtccggtttgtatagttgggggtgaaaaatatctggttttatggttgggggtaattcggtcgaccgtgatagttcggggggagggtaattcgtacttttctcttttcttttccatttatacgtttgaatattactgatagatcttcatttgttggactttatcgacgatatatgtaattcaattccccttgattgttcatggattctaattaatatctttaactttttctcttttttttacggatgaccatgtctatttcatcaaacagagtaaaaaaaaaacagtgttcagaacaaaacagaagatgccccccagggtaacagtctaccattacaacatatttaatacgatcaggaggttcaagatgcatagccaacaggcatgaaaccatagtagtacatgagttcatatcccctacaactggaagttttaatagaagagatacagttataccaactcattgaattaatcattgttatcaaactattagaaaagaagtaattaatgatatgcactatcagtttctcttagtactgttacacaaattgatactgatgaatgttacgaaatgttgatatatgaaagtacttacactataattggtgtgttaatttcaattccatataataaatccaaattttgtgtcaatattgcaaagatcccaatagggtttaccaattcagcttatttatttcatttaccatgtttcatttatatagagaatagtttcatttgcatttaggtgtggatggaacttttttatttgttggatcattttatttaaattttaaaaacataacgtgaatagctagtgggtgtgaaagtatttgtagttcgtagcaccattattcatggccacgccacgtcttcttaacgacaaaatttgctacagggcatcaaaaaaacatgtaattagccggtgggcaccgtaagatcgtgaatttgctgcagggcaccatcaaaaaatggtaattagctggtaaatactcggcgtattattttattatttcggaggaaaagaggtgtgagaatttttgaattggcgagaatgcccccggtggcgcacccagttatcccgattgggtccggtcgaaccagacccattcggtctcgtcgccgcaccacatatcccaacctaaccctagcctgcgagtgaggaggtggcggcgacctagatcggcgaccatatttggtgagggtggcagcgacccagaccggcaagcagcttcgttcacctgcaccagtggcaattgactggaattccttgcacacatgccattttcacctgcaccagcgagctgctgccagcaccaggttgatgttcgccacggcgaagccgagccgcgtcgtgccgagcgcagacacctaatagcacatcttgaacggtttcacgggcggcacgcgggatgggataggcaccgccttgaggttaacggcgatgctggtgacgcggaggtaataggcgccattcctggggttcttgaggaggggcacggggttgcagcggagaccttcggcgatctccacgggcagcgctgcaaggagctggaatggtccgcagatggccacgccatcgccgccgccgctagccggtggggtctagtcgggataacgtggtgcgctatcgggagcattctcggcaattcgaaaattctctcacctcttttcctctggaaataataaaataataccctgagtatttaccagctaattaccactttttggtggtgccctacagcaaatttgcgatcttacggtgcgcaccaactaattgcacgttttttatgctctgtagcaaattttgcccttcttaacatgcatgatagagttcaagatagagatcttttcaatgagaatggcttgcctaaaaggttgagatttagaaagtatgttcaagatagagttcttttatagggctccatatttacctcttaagatatgacaaactccctagccattcaattcttgatagtttattttgcaaaagaaaatgttgtctctagccaaaaataaattatccaacaacaaatggaaataccaacacacataattacactcgtttaagttaattgtgaatattgtctactaaatttgtgcatacaatcaattaaataaccggaatcagaattttaaacaaaagattgaaatgtactcatattctcctgtccacaaattaatatgaacatctgaagcatttgaaatttgtccacaattataagcattccaaaataccacttgtcacattaatcacttctcattcaaacttcttcccatcttacccctaaccacacaactactcccatccatcactcatttaatgaagataccaacagtggcggatccagaaagaaatagcagtagggtctgagcaaactagatagagttacagtccccctcccatctacatatggtaaaaaattttagtggggtctttgtggggtctctcatagtcttcacgtcagtagtgggggctcgagaccccgccgccccatgctggatccgcccctggataccaaagtcttttgtttttaaccttaatctatgataaataatctcgaaatgtttatatatttatagaatgggggaatatcatagtaaataatgtgtgtaaaagtatgttgaggtacttgaaacagagaataagtatttttgaagtcacatgttgctatgtaaaaagaattaaatgcaattaaggagtatttttcttctaaatgagttaatttctactgaaaatagtttaatttgtattcttttagtatatgagataagtccatttgacccccttctcgaattcttcgctttatctagaatacaccctcgaactccaaaaccgaatatttgacacccctaaactttcaatctcgcttactttacacccttgagtggtatttttcccacttttgttacactacacgacacgtcagatgccacatcagtagggtgagagaagggtcccacttgtcaatgtcactgtcttcttcttccactccctctctccacttcccagctctgcaagctcgatgcggccacaacaagatgatcgaagcggcccatgaacttcctgccacaccacctagcctccgccagtgctcttcccctcctgccttcttattcttcgtcccttcctccctccgctctccggcaatgatggggatatggagctcacctcctcaccaagcgaggcggtcggtggctagtttggcagggagcccactgcccaccctttgtcctagctcgagagaagatggggtcggcgaggttgacagggagctctcttggccaaggtcaagagaaaacgagtaggggtgagtgttcggttttatggttaaatcagttcagttttttcggttctctagaattttggtttcatatgaatggcaaccgaagtgtttgataaaaaaaataaaaccgcacaaaataaactgaagcacatcggttcggttcctcggtttaccgagaaaaccgacctacttaccttgcacgcattccagagagtgtcaggatggctagatgcgatcttccttgcggccttcacggagcgaacatatccagcatgctagttagggcacccacaatggttatctataagctctctacaagagatccatgtcagcatattttcctatttgaaagatattaaataaagagagagagcaaagctatctactaacttagagatagtctatagagaaaaacgaggcaatgcatgagatagctatagatacccatgtagacatactattgaggtggtttactattaatctagtctattgctgagatgtacatgttttatagtgagcaccttactttaccattgtgggtgctcttagcagcctagttgtgttaacgggctttggcttattgagttaagtggacttttcagagtttcacgtcgccaacacaccagggaatgactttgggctagcagtgcacgtatctagatcggttgttcggcttcatcggttgttgcgaacagaaaacagcacaaaaaaccagagaccgaacaaaagaagaaataaaaagaagagaaaaccaaagaccaaacaaaccgctacttcggctcggttcagtccgatctttggttgtcggtatttttatgcccacccctaaagacgagggcagcggcgagcttggagaagtagatgaggaactcgggatggagcggagttttagcgacgaccacctactcaagctccaccctctttggcatctggatctagcggtgtctagttgagttttcggagtgtcacctccctaatgtccatgatacctctgccgtcacctcctacccaaactctataaacactactactctcctcggcaagcttcccgattttctcggggaactcgacgacagcctcctacccaaactgcccgcaaaagggtgggagcgacggcagtaggaagacgtcgaccggagggaggggtcttggtaatgggttcttcatttgtcgcgacagcgtactataaagtggttgaggagacagaactcaagctcaagctcgcagtcacatgcgctaatttactagaggaggaggcactgcaggatgtgacgctcaaggtcactcgagcaatagggaggaagctcaacgatgacatccatcgagaaggagccgagcgacggcccacagggaagaacccaccggcaacagctggtgggtgcgtccatagaaagagaggaaagatcaggaaaacgaggagagagaggggaaagagtggaagaagtgggtcactaataggtgggtctcgctatttttttccttgattgaactgtaacatggacaaaaagcactccgatttggtttaggactgtaaattacccaattttaaagtttaggatgtattttagataaacataatattttggggtgtaaaatgattgtaatataaagagataggtgtactttgttcgctcttcggctcttgtatgggtacgcgtgttgactcgtgagatgaaacgaggatttcaatgttaacacacatactcgcggtacaaattaattgaaccggtttgggaatttggtaacacctttgtattgtttgctcagtacatcgtctcccaggggaatttctcattgaacttctccagtgcagctagcgctgacaagattgtactagtatatacatatatatttaaaatcctgtactagcaccagtatgatacattctctattatctacgtcatccatcttttaaaataagatgaaagcataacatatcccattggcaggaacgataacactgtcggcaaaactcctagagatccaccacgtacccaccaaagataacaagttaattagccaaaaaccagtcatccctgatcagtttggcagcttcaataaccgtttgcctcaccgtccaacacccaaaaacaaaaaaaataagaatccagaaaaaaaacatacaaaaactgtgatgagatctcgtccgcgacagattcctatctgatggagcacgtaaaaagttttatgccccccgatgacctgtaagttttaaacatggccgggctcggctcggctcacgcacgcacggtagctgcatcttgcagtgcagtgctgcctgcctgcctgcctgcctgccgatgccgatgcgtggggaggcgagtcgtacgtcgctgtcggcacatgcatactatgcccgatgtagggtatgtttggaaaggttaagcttctggtgatgtttggattagagactttaactttagtctttatatttatttttagatactaatttagagtattaaatataaactacttacaaaactaataacataaataaaagctaattcgcgagataaattttttaaacctaattaatccataattagagaatatttactataggatcacataggctaatcatggattaattagactcagtagattcgtctcgtgaattagtctaagattatggatgagttttattaataatctacgtttaatatttataattagtgtctaaacatctgatgtggtagggactaaaaagtttttagtcgcatctaaatagagtcttaagaagcagctgtttagttttcagcttgtgacttctagtttatttctagattttataattatagctttcttaaaatctagataaaaactaaagtgttaggagaagtttttgattcttttaaaaaaactgcagcagttataaactccgtccgtaggcagtttgatcgagttgagtgggctgatcgatatcacttcacttggcgtctgcttacgcctctggcagcagtggcacccagtactactctttttttttctttttggctcagatcaatgcgcccttgtgatttttcgcttgcgtacgtcctcccggagattggcgcgctctcgtgccgtcgtgcaggccaaaacgctggctctccaccccaacctgtcattaggttagttttttttttcttatagagtatttaatttggggtgcattgttttgtttttgtccttgtttctctctgtttataaaaaaaatgtttcttttttctaagactttctatgtggaatctcaatgacgtagtacgcttaatttttttgttaattaatttatacataaataatgattgtagatctgtcgctgtggtaagatccgtggcacaaatgtacagtggttcaaacaatattatagttcacaagttcaatttgatgcttaaatcaatcatattaaactttcataatgctaaattttggtattgctaatatttaagtaaggttaagatatgtatgtcgtatttagtttgttacatttgcgacttttttgtgagataaaagattctattattatcaaactttggtagtaaaggtaatttttgtttggattgttttcttgcaaattttatcgatgttgtcttttttccttcgttgggacctttattttgatgaaaatataagctatgttgattttataacattgaactgctatcataaccatatcgtgcgatctaaacatgtacactaaacagtaaaacatgaacagatccgttgacgagaaatccacgctcagccgatggtgctggaactgtgttggcgtgaactaagtcgacgaacacaacgacctgggagatctgcttagctctagtacaggtccaaaacttgataagatgcgagcgtaccagtcagtttgatcctgcaactgataagatagataaatatgttgatcaccaaagagccgatcggctgacaagccaatagagagattccagccaatgtcgatagggatttgagcaatcggttatatgttcaatgtagataatgatataaagataatcggctgatgacaatgtaataaaacaacaatataatccagtagaaaccaatcgactaataatgatatgatagaataaacattgatccgaaggttaaagcatacatcgactggaggtccgatgtcaataaatccaaacaattagataaacagtaaaacctttgttgcaatcggctaaatccaacttgtatgtaatccttataagccgatgcaacgttcatataactcatcggctgaaaccccgatgaaacccttattataatcaaagacatgttagtttttatgattctaagcacgactagggatgatgcatctcaaagtatgcaaagaagcataaagtctatacaatcaagcctttgactaatttttagggtggtggataccttagctaatctaatctagtaaagtgatttagccgataccgacataaaccctaaagcgagaatcagccgatatgactaaatcgatatattgaaactagataggcaaatatatcaaccgaactagagcgatcgaagaggtcgaagcgatgcagccttcaacaacaccaatgtaaccgatacaattgccagggccggcggaacgtaggacttaccccttcgccaaagatcgaaagccgatatagccccacgtcaagtgtcaagttccgccagtgataagtaaaaacctcggtaaagagggtggcgatgagccgatagtagttgtattgatcgagatatagtttacaatgaccccgagtgtacatatttgtacccataggtagatactagtccttcttggataagaaagaaacttttctaaacataaaaggaaaatataaagtccttattttatataaacactaaacacactttcctaaagataaaaggaaactaacaaactcttcctaattgatagataaaccgccatactgcattctccttgaactcagtctcttctggataaacttcctttaattaattaatttcctcaaccgaatctaccaagaatctgactgttggcgacttgacaactcccatcggctgattccagaactctgaaactggtactaacttattgatgaaaaatctgcgcttggtggtgctggtctgtgttggcgcgaactaagtcgacgaacagaacagcctggaagatctgcttagctccaatgcaggtccaaaggttgatgagatgccggcgtgccagtcagtttgatcctgcaactgacaagatatacaaatagcatatcaatgagtcgatcggttgacaagccgatgtcgataccagagtctgacaatgatagggttttgagctatcggctatatgtttgatgcagagtctgacacttgatgcaaataatgatgtaaagacaatcggctgatgacgatgtaataaaataacaatataatctagtgaaccaatcggctaataatgatttgatagaacaagtgtcgatccgaaggttaaagcatacatcggctgaaagtccaatgttataaaatccacaagattagataaacaatgaaacctttgttgcaatcgactaaatccaacttgtatgcaatccttgtaagccgatgcaacgtccagataactcatcggctgaaaccctgatgaaacccttattggcaatcaagaagaaggctagagattatggtactaagcacgacttagtagatcaaacttaactgatgcaacattaagtatgaaaagaaacataatatctagacaatcaatcccttgactgattttcagggtggtggataatgttgacggtcgttatcaatcagtttcgaccatcaatattaccaaaataggagagaactagtgatgcttgcatgcataaatatgttagaacaataatattccactagtattaggtttactaaccttttgcagagaatgaccataaagtggaggagaatcgacatcaacacaaatgataaatcaatcggacgatgttgagaaatagacttatgtatgaatgggccaagaactcagaattgacacgacacaataggccaaaattcacaagtctacggaggagaataacagaggaggccacctgccgattttgggctaggttgggccggcccctggttcggccgaactaggaggttcggccgaacctccctctccaccgttggatgtggggtttggcagggacgctccagatcctctcctgatggcggttgcggtgtacttcagacatttcgcagtagttacaaccatcatacctgcctataaaaggacttcaccttctcacttcactcacacacctcaagcaagagctctttcatctctctcaagtttagtttagtagtatctagctggtggaatagaattagaataggaatcaggagttcggaagtcttcggaagagttcgggtatggttctagcagctttccattcctcttttgtaagctttgtacttttattagaatactcttctatatacatttatggtattgaaatactttccgagtatatgagtacctactttatattatgttcttattatactgaatatacggctagcttatctgggaaatgctttggtgcgggtatagtgtttgcttatgcaattactctatgtcatgacgatgatattactctcgaagttcttcccgatgggcaaaaccgacgccctttgtggacgaatttccagtttccagcagacaagggacgagtccattccggaagcatgggaactactgcaggagtacgtggccgcctgtcctcatcatggaatggacgactggctgatcttgcagaacttttacaataggctcaccccaatgtcccgcgatcacctagacgccggagctggaggagcctttttcttttaaacggttcaaggaaccgttgaactcatagagaagatggtctccaatatgggttggagcaaggaacgactccagacccgtcagcgaggcatgcacaccgtcaaggagacggagttacttgctgccaagctagacctcctcatgaaacgcttggacaaccatgagaaacggccacaaggcaccgtcaaggccttggactcacacgtcacgtgtgaagtctgcggaggcacggatcattctgggaacgactgcccggaaacccgtgaggaggcgatgtacatgggcaacaacaacaacggttatcgtccacaaggagttcaggggtggaaccaaccacgctcatattatcaaggaggaaataataacggtaacttctctaaccaaccctccttgaaagatcttgtttttgcgcaagctaaagccactgatgcgctaagcaaaaagcttgctgccaatgataagatcttagagaacataaatgtctagctagatggctttgcttccgcatttcaaaaccagctgagctttaataagatgtagaaacccagttagctcagttggcatatttagtccctgcaaatgaaactgggaggattccggggcaaccctactcctccattgaaaatgttaaggcgatcacgacaaggggaggtaagtccactcgtgatccaccgtatcctaaccctgccggaactaatgggatgtcaaaagaaacgccatctaatgactcggctgacaaggagattcagccagaaaagacagtgccacaggagtactgcgacacacggttgctgccatttcctcaatggagtaggaaaacgtcagtggacgagctgttcgctcgttttgttgaagtgatccagaggattcacatcaacgtgctgttgttggatgcaatgcaagtgccaatatacgcccgttatctcaaggacatactcaacaacaagagaccgctcccaacaacggaggtggtcaagctgacggaacactgcagcaacgtcatactccacaagctcccggagaagaagaaatattcggagtgtcccacgatcacctgctcgatcggggcacaacaattcgaccaggccttgtgcgaccttggagccagcgtcagcgtcatgccaaaggacgtctttgacagactcaacttcacggtgttggcaccaacgccgatgcgcctccaaatggctgactcatcagtccgttaccaagcagggatagcggaggatgtgccaattaagatatgggatttcttcatcccggttgactttgtggtgctagacatggacacgaggaaggagacgccgctcatcctagggcgtccgttccttagcaccgcaggagccaacattgacgtggaaactagtagtatctgtttccatatcaacgaaaaggaggaaaagtttgagtttcaaccgaggacggaacaatgctccatggtcagaatcaagtacgggccaaacccgcagaacattcaagaggtcgaagtggagccacccaagacggatagcctggtaaggtttatacagaacttcctagagaaggaaacaacaatgcccaggaaccgttattggaggaagccggtaaaatcacctgtaccggccaagaagtttgagcagtcggctcagaagaagccgtcttctgcaccgaaatcaaagaaggtgtggaaagagaagctgaagacgcccgctccatcacatccggagacgggttgaaaatccatgaactgaatcgaaaggaggtgcggtcttgcacatcggactttaaatgatgcgaccttcgccaaaaggtaaagtggtatgtatctgcatatttgttttcaacatttgaatttttgcatcaccacatgtttgaatttcaaaattgcatttagggtttttgaattttgaggaagttcttcaaatgaaaatttttagagcaaactaaaataaatttttcaacgaaaattcactgtgccacgaccgcactaaccgttggattccaacggccgaaagaggggccggttgggcccaccaggtgttcggccgaaccaaccggccaggcaacggttacctgctatttttggtagggtaacggctagtgggtccgacatgtcatttctgaccgttgtgggtaccctataaaagccagccggccgagagagggaattccaccccatttcaacacattttcattccctctccaaagtttgctctcaagttcattcaagctttgatatttttcctcaagttcaaatcatttagttacatatatacaagttgctttggtgaaactaaccggcgggtgaaactcttatcatttctaacccccgccgagttagcccgttcttgctccattgtgcattatgaggaggcgactgtgtcgtctgttcaaggggtcgggctctccatcaagtcgtcatgacgagtctagcactcgctcatcagctgatgtctcgatggaagactctaacgctccgcgacaactcctgagcgacgctgacctcgaccttgccagtgatcgggagagacaggcctactacatgctgagcaaccgggagtatgctcatacgcgaaaacactcaccggagttgctaaaatagataggtatggatgttgaatttcgttctatttggaaagctgttggttggcagagatttgctgtggtagatgagcccggttctcgtttgcttactttgcaatttctgtgcaccttgaaagaaatggaagatggtatttcttttcgctttttccgtaaggagttcatgctcacgattactgtaaaatcgatctccagaaggaatttatgggttcgagaaaaataggttttgggaagatatttctggtgctccaatttgcaagaaacctagaacaaatgatatccataatcctacacttaggctcatgcacaaatggattgctatgactttgtttcctataagtgatctgagacccattaggagagatgaattaattatcatgtttaccatggttagaaagatcaaaatttctcctgtcaaatgtatgataagacaatggttagaaagtataaagttctctgctcctgttgaatgcacttctctgattactcggatagcaaaagggctaggggtcgttagtgaccaaattgcttttatctcagccgctcgtccgcgtattgatgaggcttatctagtgcaagggcatattttgaaacatggagtagatggatctttgatatactttttccccggttgtacaaatgaaatcccgttgccaaatgcggggtatcatttgtacaactgccatgaactaaccattcccctgcagaccatagaagaatctcgtgcaggtggaacatacaaggagacgtacaacatgacaaggaacgaacaaggaagttcatcatcctc

SEQ ID NO: 1687 - DNA, 9010 bp, Oryza sativa
ttcttggccggcgtcggcacgggggtcgtcgagcttggtggggatggtggcgggcgcttcggcaacgggggaaagaggcgaggcaacgggaacctcgaccgggggagaggaggccggcggcggggtggccttgggccttgggcgccgggacggatgccttagtggacttgatgggtgacgcggtggccgaagccggggtaatgggcgcctgcggagggggccggggtggcgggggtggtcggcacagcggcgggtgtgggcgcgtcttcttggaggagaccagtggcatggtagtcagttctgccccgggggcgggcggagatggcggcatcgatgtcgagagcaacctcgtcctctgctccaacctcgccatctccgcccctccatcgtcgccaacaatagagctcctcacttgggacgacagcggagagacggtggcctggatctgcggggactagaacggcgcgcgacggacgggcgggtgggtgaagaatggcggagcatgcaagcgaggcaggaggcgggtgttaacaccaaaattcctgcactggagctaagtagatctcccaggccagtgtgtgtttttcgcgtcaacagcgggtagcgacctcggcttggcggggagaccgtggccgccgtgaggggcggcgatgcggtggttggccacctcgggtgccgctgtcccgagctcccccgcccggtggcccaagcggtgaacaagttccatgagcttgcccgccaccgctttgctccacctgccgccccctttgctctgcttgttgcttgccgcgactccgcctgccgtcggtccacgcaccgcccctctgctccgcccgccgcccctttgctccgccttgccgccgctccgctcatcacccctatgcgccgcccacccccgctcgccctcctccttcagtgcagaactgcaggggagagagagagggggataaagagaagagggaggatgacatgtgagatcacatgggcctacccttttttattattttgtgtgtaattgacatatgggttctagggtttttttttaattatttttccgggatccaattgccacataagtgccacgtcaatgccacataggacgaggacctagttaaaggagccacgtagatgccacgttattcaaaaccgggcacaatactgtcgagggatctcatctgcatggttttataagttaggggatgcttatgtccggttttcaggagcgaggacgaaaattagaccggcgacaaattgaaggacctaaagtgaacttattccactataaacccctttctacgacgaagttaaaagggaggccgtgcatgatttacggtagtgtaatcattaaagccttgtttggttaatctcatctacatgtaaattagaagatttggggaagaataattcgacacctattgagaattaatctctctgaatactctttaatccctccctcacgggaattgacataataaggtccaaaagaaagcggttcacaattttctaattgtaggatgaactaatgtggtcatattatatagtcattataaattacatagttcagaatttccatcatgattaccgaattccaacggcacccaaaaaatagttcctttttattttttccaatatttttgatatcattttcgtttcagcggcacctctttataaaaaaaaaagttattgaaatggtagaggctattttcctatcgttttcaacactttatgtaccctcatcctaggcgggccatggttcaatgtttttggagacgtacgtattttgtcctttgttttatttcatgcggtaatttggacaaagtgtgttacaaatgcaatatacatctgtaaatacttggggacgagttcctgctgaaaagaaagggagatagcaacctaagagaagatgagcttcttattatgttattccagagaaaattaatcagaaacggtgatgaacatctttccaagaatggtggggggagacccctctcgatctccctctcctttcactctttccctcctcaccttctccatctttatgggtaatttccagggatcttttcgaccacaaaacagaaaagatcccctaaaacaatacaatacctactgaaaaccaccaaaagaaaaaaaaaagaaacaagaaaaaaaaagcagcagaagaacccatcctgtcggccatgcttgtacacttgagtgtacactcatcccatgatctctgaaactgccatcaatcgactgttctttccgttcatcatcttcagggattcctctgctcagatgattggttactcacactgttgaatcacgagttgtatcttgtatctatatatatatgtgctgcttgtgttcaagagtgcaaagttgttgttgggcattatgttccttcagttcagaactttgcactccagatggcgctgtcgttctccccacatcgttgatggacctccttcatccgatccgccgatttgcagatgccgctgcagctccagtcgaacgacgcggcgcacacgttgcctgcctgcgccttccattcgcaatctgcagtagtgcgaaccatttgaaaaatttgtaaccaacagttggctaaaatatgatcagaagttgacaaaagaaaaaaaaatgatttgaaatttcatcatgcatgtcaatcagcagggtgattgatcacgtcagtccagaactctaagctcatctgacaacgacaacatttcccctgtaacagtttgctaattgtcctgtaacacctaccagtctctgaaactaatcaattgtgtacgtgagcatacatgactaaatgacgagcgcaatggccaatttagtccattacagtatttaaggtgaaatgaaatatctatctaagagcagctgtgacaccttcagagagaagagaagtggccttgttagaaaaaggtccgatgtctagtgtcctgacaggatgcttcatgattacaaaaaacaattgacaagcacatgtttgtgacagcagatagcatacctacttagtgaagttgactgacaaccaccccaaactacaaacgcaactgcactgtttcaccaaatgattcgatacatttcgtaatataaaatatgataaatacagatcaagtaagctgtattcagtccgactaccccatactatgaagagttgactgacatgtcaagaccaaacaaggatctggaagagcaaggaaatcagttcaaaagatggtaaggattttaactatacctggttgtgtaccgcagcaaagcctgcgatcatcgacgtgttcgacgtctagacctatgaaccatgctcctaatgatacatcctcattagcatatttgtggagaacatgcctgaaacatcaccatcatccatggtcaatgatgggtagaggttagataaaacatattatggtgtaatcaacaaagaaaaaccaaatctgaagaaatttcttactggttgattgatatataagaagctagatccttggagattgcatataactggccggttgcatgacggaagtacttgttcccccattcgccgaatttccagtactcgggctcatggtatcttacacccctgagaataaaaaacaaattggtatttggtcagctgtttaaaacatcaaggaagacatgacaacaacatgggacttacttctgagccaggactggaccagatttcatgcaaccaatgtaagctcgaggcttcgaccgatgcttagccaatatgttaccaagagttgctgcaacatttttatatctgattattatagtatcactataacaatatctaaaaaaattatagtatcacaataattgagatggaattttccagtaaaagggttttaagcttgtgctttgggagtaacatctctgaagattacagcatatacgatattttatcaactttgagtgtacaatttgtaagccaaatacatagcagaaatttaatgtaagtaaaatatatgaactaatcaaaattttagcagaaaaaacacttaatgaagggatatgatgttagatcagagggtagtaatgcacacctatatttacatgtacatcatcatccactttaatgtagtactctgcatcccacatggacaaggctgtcacaaagaacgatttcgtctttgcagccaattccagatacccttcaacatgatcctgagtgatcaaaaaatattccaagatatttcagctttacagacaaataaacaagccagtaatactgtactatatgccagctagagtaagtcctatggtaattaccaatctcatgaagtcaccatgtttcctatgcttctgcgtctatagctctatcgagtatgccaccagatgttgcgctgtcaatttagaaaggttaaaatttcagattctgtgagctcaagatatcgtcttctgacattgctgaatcataactggtactaactcttttgtctaatataatagaaactctcccttaactattgtccatacagatcgcccaaagtacatgttttcttgcactaacctatgaccaatgacgaatcggatgataattcccttttcttcctcaagcttccttcttttttcacctgtcgcaaacacagaaacaatatcaggtaacatgttttactgtgggaaaaaaaattctccatgcaaaagaatgtacaaccttgaggcatccacgtagcacgaagtgaatctcttcgtttccggctgctgaatgcggtgttgatgccaatgaccatgaagtatctccgtttccccgtagattctgatagcggcgctccattgagctcagactcctcctgtgacgcctttgctgatgctaactccatttctaagtttgatattgttttgtccaatgccctgataacaaaacagattcttatgaaccttggacttataaatttgaggttaaaatcagcagcataaaagtaggctatcattctctcaacccttttggtacttactgtatagcatcctgagttcttgggacctctccaattatatctttttgctccataacctgcataatatgcaggaaaaataacgatgctcgtgaaaatgcattgacgacatttgttaattttctcattcttcttactaacagtagaggtcactgtaaatgatgtttgcaaagtaatctgaaaatatttgtgtgacagttaatgcttacacttttcggagcacagtcaccagacaacaggttcatcttgttcacttctagagccgatctcctgatgatctcttttggttctggcattgtccacatcctgcaacaaatatttttttcttatttcctctgctccaaaatataatcatttttagaatagtgttaagtcaaacatttttaactttaactattaatagcaaaagaataaaaaagattaatcacgtaaaattgatgtactagatttatcattaaacaaactatcataatatataactctttttatttaaaacatcttaatgttataaatattattggttataatagcattttgaagactacgtcaaaatctaaaaatgtttatattttaggacggagagaatagcattttttaggacggttgcggtacttgtttatagtgacacatagagtaacaaccgcaacagagtaagcatttagtaaaagactgcaaattaatgattattctcatctcatttctttcgaaaaaatattattcgcatttcacagaaagatactaagtgcataaacttcagtgtaaaaaaaacagaggttgttgtttgctccatgcttggctgctggctgcgacctctgctgacgtttctgtagccatgacgtttccaactgtatttttcactgtacaaactacccaaggaaggccaaaaaagaaacaaagggcaatgatgccatttttaaccttaccaaattttaataaagttgtcaaaaaaatggctacatttagtttgttgtcaaattttgataactacataagaaatcctactaaaattttggccactatgctaaaattttggtattgtcaaaatttggtaagattttttttggcatcaaagtgaacaggtccaaaatttactgacctccactaatggggccatggcaactgtaactttcgtccaggtaaaaaagcagaagtgtactggtagcaggagtatacgttgctactgtgttgtcggcgacaggtatacgttgtatatcaggtagttagcgataaatgtactcagtatccagttttacccacccgtgccgtcggatcttctcgaaataaagaagcgtcacatcgaccaggcaagtacgctacgagcttccaagaactcacccacatttagcacgagcaaagcaggatcgagcctttaattcgagagagattttgcccttttaaatttcttccagagagctgcttcttctgtaggagtacgctacagcaacagcttagagcagaggagaggagatgagagtacagtacgccagctacagttgtttgttgttctttgggggtgtactctccattgaccaggagaggatgagaaaaaagagcagcagaggaacgcaagaaagaaaccaatagaattcagagaatttttggctgaacgaaccgaacggagaggaggaggcaaagagagaaaagcgaattgctggtaggatccgatcaccgcgggacaggatcaattttgcttttcttttcctttttggaatggaatggaagatgaaaaaaaggcgtctaaattcacccgtacacgaatggacgaagcaaaaaagcatgcagaaaacgaaggcgatcaaactgattgcatcacgcaagattattcaacaccaaaccaggacaaacctgcaggagcaagaagaagacgatggaggaagcaggggggcgtacctgttggtgaagatgaggccgatgcagaagctggcgaggcagaggaggagggtccatttcttggagatggtgccacggagcaccagctcgtcccctccgccgagcaccgctgctccccccctgctcttgttgaagctcatcttcacctgatctcttcttcctcctcgctcgcctagctctctaatcagtctccaattcacacgccctcacctatggatcctgtctccccgatctcggagacctcatgatcacactccaagaaccagaaatatggtccctccaccctcctgctcctcctgctgctcctctaacttttgtcaagatcaagtcactactcactactactaatattacctttaatttcctctctctctatctctgtgtgtcaagattctttggttcttgaagccgcctgctgccagtggcaggtgcctttggggtgaaggggaaggctgatatggagatggagacgagggaaaggatgcaccaactgcgtgcgtgctcgcgcgcgtgaagggtgtagagtggagtccgggggagggaagggatctcggcgattcttggtggcgctgctccagatttattcggccttcgccacttggtccggtctggacatctccggccagcttagcttagcttagctagtttagcttcttttaagctttagctgaagtagtaggtggttaagttaggtttaaactttggtctcctcttgtggggattattgtagtggaagcgccattaatgagctgatgtggtaattaagccaggctaaggtgagtttggagggtgaaatggctgttttgcccccttattttgtgtggtcaagtcaatggcatgttcaccttgcgagggtcagtagtactcagtagatcaccacccccatgtgttgagggaattagatacagttgtggtgctacaccccatgaggattctcttgtcatgttcagttcaaaaatggatacctcttctatagagcatgcgaccaaacttctgcagttcttgaaaaaaaaaagagcaatcatgcaatgctgttatgtgaaaatagtgtcatcaaaatttatcacaaaaaatattttagtattaatttgaaagcagtactacctctatcccaaaataagcgcagccataagtttccgtgtccaattgtaattgtccgtcttgtttgaaatatttttatgattagtatttttattattactagaatataaaacatgaatagtattttatctgtgatttatatttttttagttttttaaaacaatttaaaataagatgaacgattaaagttaaacacgaaaaatcatgtatgcatttattttgagacggatggagtatcaatttgtgccatcatcttttactacgcctctccattatcttttactccatgacttgactgataagccatgaaaatgaacgaaggaaccaaaatagtttgataatttatatgagaaaacttttgtatctgtgttgattttaaaagtaaatacttaaaaaaaataaactaatatggaaaacccttaaaattaactctaacttaattagattttcaaattcaaattttcgctatgactaataagccaaaagtaaacagatgcgaccgtattcatgagcaagctaagacttgcggactcaacgtgttgccagcgtgcctaaaaggatggtcaataattcgattaaattcactaaaaaaatatatgacgataattttctaacaaaaccgtgccaattattcactacaattaacgtaaatgtaaatggtaggatgcaggatagtgcatctatataaaagttaatcaatttatatattatatattcaccctttaaaaacatgtacaaagttggtgtctaacgggtcatgtatatgtccttggacaggtagactaatcataaattcgtagtcaagtcacctgtagaaattgtacaaacagtgttttcttgtggcgtactttttgcccatgttagcaagttcaggccacacatatatgctagctagtgaggagtatataacaatgtacagtaataaagagccatcgaccattaattgtttatctctacttttctttgtaatggagcaaggtatcttctttgttgcaattgtttttggtaaattatggacaaagggatctagttcctttcttcaccgcttgcaaagtatttattcttggggctgcaggaat

SEQ ID NO: 1688 - DNA, 519 bp, Oryza sativa
ccccgacggcgtcagcctctccttcttcatggagtccggcacgtcgatgtccaccccgcacctgagcggcatcgccgccatcatcaagagccttcacccgacatggtccccggcggcgatcaagtcggcgatcatgacgtcgtccgacgtcgccgaccacgacggcgtgccgatcaaggacgagcagtaccgcagcgcgagcttctacaccatgggcgccggctacgtcaacccgtcccgcgccgtcgacccgggcctcgtctacgacctccacaccaacgactacatcgcctacctctgcggcctcggcatcggcgacgacggcgtgaaggagataacccaccgccgcgtctcctgcgccaagctcaaggccatcaccgaggcggagctcaactacccgtcgctggtggtgaagctgctgtcccagccgatcaccgtccaccgcatcgtgaccaacgtcgggaaggccaactccgtgtacaccgccgtggtggacatgcccaagaacgtcgcggtcac

SEQ ID NO: 1689 - DNA, 1758 bp, Oryza sativa
tctaattcctgcagcccctatactctacttctaatattccttatttttaattccgaatttcagttattttctaattgtatttatatattgactctagtctcctcttctaatattccttattttttaattccgaatttctactatttctaaattgtatttctatatggactctagtctcctcttctaatattccttattttttaattccgaatttcagctatttttacattgtatttctatatggactctgtcttttctttttctccgattaatgtgagaatttctaggccatgagagcgaacgtggagggtccttttttattcctttaataatataatagatatttattgaaaagtgatatatgtatacttttatgacagtatttttcaagacaaatctattcatataatttttacattttcaaactcaacttgagagttatttatgatttatattctcaaggtttgtcttaaacattaacctaaacgactttctttacgagtacagagggagtaatcaccttgatataaatgtaaattaaggtgtttactgaccaaatgaattgaatccataagttgcttctgttcattttcttccttttgtccttcttcccttcttcctatttttcttccctgtgttctgtacgtcgggtagaggatgcaacgctaatgcacatagcactacgaatcccttctagtgcaatacatcaatcggactctattagggttttgggatttagcgtaggaattagtcgtcacttcttctcaacactttctttcctttcatttgcactagtggggttcaggggtaatccggatagaactctaggtcctgttcgtttccactaaaaaaaagtgaatgaaaatttggatactcatggcacgcttttcaaactgctaaacgatacgtttcgtgcaaaaactttcaatatgaaagttgctctaaaatataatattaatctattaatcatacgttattttttttagataatggaatagataacatccggcctttgctcaacagagttacagccaattattacattctatcactcgaacaaagagtgtagttcaaatagaattaaacacacccaaacattataaaagtgaccagaccaagataaggaacacacaattattcaagtatatttgtgaacctccatccatggttggcaaaaagttgcataaccgtcgtctcaagcttacggcatgcaaccttcaagagctctccatcttcatcacacttttgcaactgtgaccaaaatcggagccaatatgttgccctgaaaattgcctgcatatatgaagcagatagtgatttgttaaaaaccatatcattcctactcaaccacaaagcctaacatatagcagaagctcctacaagaattagttttgcgtaaaaacttaatttttatcttcatcttcgtttacaggagaatagaacatcacctaagtttgttaccacttatcatagtaacgtttatctcttatcttttattttcttatttgtttcttttttgttagggaagagaacgatgtaacttatctctccctaattatcttggcaataactgataaaatcaaccaccacaacgtagtagtacagagacttacagattgctgcgcattaaaatgttgtttatgcagaatatgtaaattatggaatatatattcagttttctcttaagtacatacatgcatgtgtggactcggatcatttcgtttttacttgcgaaagtacgacaccaatagtaaccgg

SEQ ID NO: 1690 - DNA, 8230 bp, Oryza sativa
gacgccttggagttgagcacgcacttgtacccctccgacttggccgcggcgggcttcgccgcgaagtagtcctcgacgcagccctcgacggcgccggcgagcttctccatgttgcgcaccgtgaggaggtgcagctcctggccggcccacccggccagatgacgacgcagacggcgaggcagatgacgatgccgatgccgatggtggacatccgctgctgcgccaggtccagcagctggtcgacgcggtaccccgacacggcgacgaggctgaacgtcaggatgaagatggtcacgccgtagtcgaaccgcgccttcaccgttggtatgaaccgcgagaaggtggccgccgcagctgttcaccatgcacgtacgcacgcacgcattattttacttgggtgtcagcgttgcacgtagtatgtgactgtgcaagtctttgtcacggcttacgaaacgagcctaacaaaacaggggcactacgtacggtggaggtaggcttatcaaatacgtacccagtaaaaacagggagccgctgaggatgaacggctcgagcttgtcgccggatttgtccgccacccagttcacgccgagcgcgagcagcccggcgctcgccgtcgcgacggctctgttgaatcccttgtacatgcatccacctgcacacacgcacgagtgtacaaaaacacggtgaggaacacagcaaactgacatgcaagagcatgcagaattcaccacacgacgttgtactactactcaccgacggtgtactcgaagaccacgacaaccgtcatgacggcccacatggcattgccgccgacgccgtcgtacacgggcctggtgtagtagacgatggagacgagggtgagagccaggccgactttgaggctgtgcaccgctctccggggatcgtcggcgccgatcttccacaccttcctggcgaagccggccaccgccgccctgaccgcgaccagcatcctcaccacccacgcccacgccctctcggcgacgccggcctcgtgctccaccgtcaccgacgagccctccggcaccgtcacccgccattccagactgccctgcacctgcgcttccctcgcggcggcgtccatgctgatggcgaccggtacacgagcgccgctgcacacaccagatgggtccctattgtaagcctcgattctctatgtacgcaacgaaaatgcggcctaaatttgcttcaattcgctcgcctttggtaagtacgactgggttgacctctgctctcgttgctttcgtttctgtggcaattattttctggacacacagatatattcctaggaagagtaaagcaagctaccaaagctagtttccaaagagaggaacgtgacaaaggcttctggccaaatgtgatctacctccctatgttggaatgaagtgagaagccatgatatggcttcgtatatatagccatgagagctccggcgtattggactttgacaagggagcacgatcaagggcgatgcaaaagaacgcttgttgcgctgcttgtgtcagccaggcaacgacgaccttgagcacacgaaaggctgggtacctgttagctgcggctaacgggctaaagtgcaacaaccatacagtgcattttggaaagaagattgccgctggaaatatgccgggaagtgggatatcgccaataggacggcgaggtgcggtgacgactatggtgcgatttcttttcaccttgttttgcctgccacgtacgtctgtgcactgttgtgtccctgatctgacttaactctcacttctacgtttgtggcttgtgttcgggcgcgactataaactctctaagctcaacgtgttaccagaattgatatcacgcctgcagcctggtgaagtggtgagggtacatgcaggtacaagcttaagctcgaaaccgtttagctcgttgacgaaaagcaaaagcaaaagcaaaacggatttactattttacttgcgatagatttttgacttctatcatttactttttcgttcgtaaaatctttcatcaaaattcgtattctcgtgtactcaatttacggtcacactcagttacagagcacttatactcagttacaatgtacttatacttagttacatagcacttacattcaattacagtgaaccaaaattatattttacaacagttttttttctagatttacgatttttttttatatatttgtctctttttcttgttatttcatttaaaacgggctatatccattggcatagttattaagaccagaccgaggatcgaaccgctaaggcacacgattcactggtttattggtcggaccaatcaaaccgctggtttaaagcggttcaaatagatgtgtgttataatacatgaacaacatgtgacatagctcgatggttgagacactccttgaaaagaagttcttgggtttgatccctcttagctcttttcctgttttctctaattcgaaactataaatctattgaaagattaataggtagtcccaatgagactttattgcatagtctacgtaggtgataccccgcgctttactgcgggtctacgtaggtgataccccgcgctttactgcgggattcatggataagtatatattaaatattgtcgaaatgatgaaagctgaaatgttgagaaaataatgtgaggaagataatttggcacatacttgttgatctttataatataatattgtagatgatgtgtcatgcttacatgggttttaaataggttataatagtaattgctagtgagtgaatatgtggcatgcttgcatggaattgcttacatgggttttaaataggctataatagtaattgctagtgagtgaagatgtggcatgcttgcatgggattttaaatgggttagaacagtaattgctagtgagtgatgatgtggcatgcttgtatgttgagctttagcttctaataattattagtgggtaccaactatatagaaagtatagattgtttcacctgcttcctatttgaatgacctccaataattagcagtgaactagaaaatggacaatatgccactctattcgtgtgatttcaatgaaatgccacatgctagaggaacgaaaactggagtcctcatccctcttgggttttcgaggcatcaacggtatatgaactaaagtccctaaccctcctaggacttcagggcatcaacagtacatattcaagagacagacaatatctatatactcaagagatttatattatctacatcttcgaggtgtcgagaagagagtcgagatctatatgatctagctatgtcttcaaagagttgaagatacaacttgcaatttttggcatctccttcaagctatgttcataactccttcatcaacgacatcttcgagaaactcgtccaaatcaacaagaaaacctatgacttggccattggagcggccaaggattccccgggcatgtagtgtgccccggatcacggagcccgccccgaaacaagttgcaagcgactcagggccccaggctagggcccaagcacaccctctacctgggctctccgtggagaactccgcccatttataggtaatggtgggtccggaggataaactttgaccaacaccatgatttaactgcagagtgcagcaacctggaaagcagctcaaccgcatgcttcaaggacgtggcatcgcacgcgggctcccgcatgcccacgtcaactgaaggaataggagggacgtgacatgttgcccctcgttctctcccacttagtctcacctcggcacctcgtggaggctgactgatggcccatgacagccgggcatagactttcttgcatgcagctccacttgtcagccgctaggtaaagttggcatattttctaatcaattatcttaagtttggctaagtttataaaaaaatataataatattttcaacacaaaatatatatattatgaaaatatacacaatattatatttaatgaaactaatttggtattgtagatgttgttaatgttttctataaatttaatcaaatttaatcaaatctaaagaagtttgattcagaaaaaagttaaaacaactttgcctgtttcctgagagatatggaaaaaaaaagaaccaaagatctttcagcacaaggagctctcggcgtctagcccattctccaaagtcagcgaggaggccaaaatgtaggcactcatggatgctagaaagctcaccgcttggttaactttgtcgctagaccggatctccggtcctaacttgtagatattttgtctctctatagttttctcatgctcttttaatgaaattggtggctcatcaatttgtttaaaaaaaactttgcttaaatcaactagctaccactacatccacaatcatagcacctgggacaatacacaacaacatatatacaaaatatatttggaattgctgaagatgccgccgcaaccatcacatcttgtttatatgaactatggttgacctaaaaagagttaggagcatatgattactgtacatgttagctatacttaaacgctatggatttaattaatactacctccatattttaatatatgacgctgttgactttttgtccaacatttgaccactcgtcttattcaaaaaatttatgtaattatcatttattttattgtgatttgattcgtcatcaaatattctttaaacatgacataagtattttcatatttgtacaaaaattttgaataaaacgaatggtaaaacgttggttgaaaagtcaacggtgtcatacattaaaatacggagggagtagctatcagttagctttatcattaacatcaatagagagcacaaatgctatgttgctctctttttcaacaatatcaatcatttatcactcgaagcatctccaagagctttgctagatggctctccaagaaaaaatttgacaaacttgagaaagtaaccctccaacacccttatcaacttgaccaaagtcctttccctgttggccaaatctgatcagccaaaatcgttggccatctatgggccctaccgtccgaatctcccctttcccctccctcgccctccctactctctcgcattgtctctccctctcctgcattgctcacttgcattgtcgcctccctgttcgagtgcaatgccaccacctccccttccgtgcgcagcgccgccgcctccccttccgcgcgcaatgccaccgcctttcctttcgtgcgttgcgtcgacgcctccccatccgtcgtagtgttaggccaacaacaacactaacttggccttcatccgctaaaagtagcaggtggcccatcgcatccctgatctcccacgtcgttgtcttccgccttgccgacttgtcgccccctccttctccggcctccgagcgccatcatcacccatcctgatttgcagctattgtagaagagggtttagacactggcatgtggacccataaaatttagagagtgagagatactgttggagcacacggaaaatatagagaagaactttttaactagctagcttaccaaatgagcaaatagaaatcaagtttcgacaaggctctggaagatactcttagctaggtcgcctcttgacacccctatgtatccatacatcattggtacttttcccttgctagatgagttgcaacggatggcgcagcggcggccgtgcaaggcgcatgccgtcgcactccgcacgattttcccgtcaattattataccggatggaaaagagaaggaaacattcgaagacgacctagctagagtcatagagcaaattacctagttccaagttccaacgggattggccatgaaccggaaaagaaccagagctccactcatctaggctctagcgtacttcgtgcgcgcgtacgaggccggccgggtagtggcagcagctgtatccaacagatctagtactagcccgctagcgcggccgaaatatcacgcgcgcgcgacgcgcgatagccaacttgcgcgcgaccaaccggccccgccccgcttgcaactacaactagtacttaagctagaacgcgatagatagcggcttctccggaccccatggccatctccatcgtccttgcttgtcaccaacatcatcgcgcctccgtactacgtactcctcccgcactttggcgtacggcgacgccgccatgattgctagctctttctctcctccggtgaatgcatgctcactggtcagtgttgctgggtggactcgatcacgatggtgtcagtggcgagcacactcgggcagcgcatcaccgtcgccgataaggacgctgcgtcatccgtgcatgcgcgctctctaggtacgtagtgaagagatcgatcgacacagaatctttgctttgctgcgcactactaattcacgaaacttccttcttcggtagctgtaaaatatcagtgcaccggtgtatcctgttgcgcattcgacttcacccaaggagctgagcgagtgagagtggccgtaactattacctgcacacaggtggttgcattctcaactgaacagtcgcaaagctatggcactcaccggactgcccgttctggtagagtcccagatgaaccggcaaaatacggcgagcacgcaaggtgcaggaaaacgcaccttaggatattctctgctttagacagagatccccgttcctctttatgttctgaatcgtacgttctaaagcgagatacacataaaaacggcaccttccccggtttctacatacgtacgttatcgattttttagagcggaatggataacgctgctagcgcctagctgtggccactgcccacagcggcacacggttcaaagtgaagcactgtcatgcacattttcgagccaccaaattgactcactccacactagtatatgcaactgtaccagtacaagttgtgttttacacccctagtatagtctagttccttttcttttctacatcaaacaactttgcgctgcacgattgtaataagaagtggtgaccgatcgaatacctgcatctttgatgtagaggttggtttgatttctactagtatcatcaaagaaaattgcttgtgcaaagatataatggatcataaatacgtcgaactttccaggcatcacaatcagattgttcgaactgaattgacgccacgttctcagcacaatcagcagcgcgtcgtatcgtatgcgtgcttgcttcgtgcgcgcgtaggctgttcggcatttggttctacactgctacggctaccgtgtcggagacgcgtttttccggcttcatcgatgggtgggtgccaagcaccgaggcacacagcatactaagctgctctgctcttctatgattgttcaattaattgtgccctggcgctgctggaacacagccgaactgcttgtgcgacttgacaaagcgcagcaactaccgaataatgttcgcctcatccctttctcgttcagataagagggccatatgcctgtaataatgtagcgagctctttttgaaaatatacgatggcattcaagaattgatcggaaaaaaatggaggcacacatgagtacatgacgtgttagaattatttactcatgatccaatttacttagcttaacacatactttctccgtactcgtaaaggaagtcgttttgaacagcgatacggtctccaaaacataattttgacttcttgtttctataaaaactagcatgatggcccgcgcagattacgcggctagcatcattatattttctctcatataatagcatatatattttctcattatatttttcaaatatattaaaatggcaacataattttaaattttgcaataactttacaaaactactaatgtgtaatattcatattatattgtattacgtgttagttattaattatttttaatatcaaaatttagtaatttgtaaattatatatattcctatatggactctagactcgtcttttaatatttatttttttaattccgaattttctgtaaattgtatttctatatacactctatgctcttcttgtaatattatttatttttatttctgaatttttattatttctaattgtatttctatttggactctaaaactcatctttcaatattctttaatttttaatttcgaatttcagttacttctaaattatattcctatattgactttaaactcttcttcccgtgtttttcttaatttcgaattttagatatttgtaaattatatttttatacggactctaaactctacttttaattttattatatttattccaaattttag

SEQ ID NO: 1691 - DNA, 2478 bp, Oryza sativa
tggcatgggatgagacggagtggagtgcccgccggggcgttgctggcggagcaagtgtgcggctttccccacatggggttgaggacgacagcgaagggaaggtaaaggtggtggcgggagggacggtggtgtgacaatggcctcccttctcaccgctgccttcatcctcactcgtgcttcctcctcccttacagcggcgagcggaagggggaagagggggcggcggcgcgacgacgacctcccctcatcaccgccgtgttttgccggggaaagggaaggaagagaagaaagagtatgcgacactaacgtgcgggccccatagggtgacttagcggattggaccaagccaaagcgccaagtcagcgaaactgtcctctaaaatcgtcgagagagttaaattacatcggttttcacagttggggggggggggtgtttcaatctccagcgccaaatttgctatgagatttcatcgttcaagataaatagatggatctgttcctttggacgacattggttttatgcctttatccacagtatatcagcaaagaagatcctttgattataaaaatccaaaaaaataaaggttttatgtatacctaagcatgatttcagccatgggaagcttgatcaaatctgcaaggaaatcatttctggtttacccatgggagctgaactaccgttggcccgttgcaatcatctgaaggataagctagatcatatgtcattcggaagcttccactgatcgaagaacgagatacatcactatgacggccaagggacaattatctcctacgaataagacctgcaaaccttttgcagacgattggtagtaccgatcatatgaccgatgcggaaatccttttataaagactgtcaagttgatcatagaaaaataatgcaaggatagctgaaagtataagatcgatccccgcgtgaatgcacgatatatctcctcgaaataatgttcagagatcgtcagaactttataaacacgcaaaccactttggctaatgcttatgcattacccagcggatatgccgcggaacattatctcattgtcatcacttatcactcatcacttcattagtcgggtcgggctaaagatcatcaaactgatcaatgatcggtcgagctagtgctccctgctgccatttcacacttgtatgtgcatgcatgtgtgtgaccgaattatcatcatctacctatttcttccatccaaactcagtgcacaaattttgtactccactagccacgaaccggctgggccaactcctatcctggttttctctggatctcgtcaggtgcagtgcagggagggaggtagtgcattgtatgggtttgcagcacgccgccgttgatcaggcagacatgggcaacttttccgttccatacgggctgtccaatgtccattgcccaaattaaatccaagataaaatcaatatccgcagcgatgcgatcagaaacatgaggcaatatatgcgcacaaaatccccctagtgcgtggcgctgctgtactgcaacagagcaaaaaccgtgcatactgccagagaaagaaaagcaatggcagcaacgcgcggacgaaagtgtatttggaaatgtttaatcgtggcctgtccctcggtccctgtaaagcgaccttatcggcttgtgcgtatgttgggtcctttctggtagagtacaagcggtacctgcttctggtacgtactgctgctactaccgacagttttcaaaaaaaaaaaaagaagaagaaaaagaaaaccaaagtataaaactcgttttataaaccgagaaagaataaaaatcagttgagtagattgagtttttatgagataatgatgttctcaaaatttctctgaatttcgagtgcatggcgtttaaggagaggggaacatctgagctcatatgccttgcagtgttcctgtaaaaatatcaaataatgttctgttaatatatgtacaaggtagtagtacatcatgaatgcgacgatacatgccgacttttatgacagtggtaagccggttttattcgtcgtgtaagccgtggtatgaagttgccaagattctctccactgtaaatcgatagagttattctgttaatcaccagaagaagctagcaaagagcggtggctcagccagtttagattcaatcatgtattcgtgtgttcttccggtctgactcgtcccgctggttgattttgtgcggtttgatttgatggacgtttttaaagtttagacctgttcagggtgcttcgttgtagtctggctttcatgtgtcgacgcgtcgtgatcatccggcacgttcagcgggtgcactttcatctcggtttgtcccttcttgtcgtcatcatcctccacctgcttgaagctggcgaggctggccagcgtctcgacggcgtcgacgacgccctcgatcctcgccgatatctctatcagcagcgacgccacggtgaagagcggcatcgcgtccatcagcgacatc

SEQ ID NO: 1692 - DNA, 8176 bp, Oryza sativa
ctagttataaatcttgatctcatataattatagttcaattgtaaattaggattattcattgtaaaattatgtgatgggataatctgtaaccataatatgattatcctaaacaactctaacatacaaagcatggataattattaaccttttctaatttattgtgacaagtaaaatattttcataattaaagcaaagcctccatcaataaaataataatacaaatggttccctgcgattaattgcttgatcccaaatccatccgacgacaacagaacctctagtatatgaccattttatttagatcaatgcatgtgtagccataatccttccatagccattagctagactaaaccacatattagccagatatgtatctcgtttatactacgttggctagctcctaaatagaccaccatgacaacagaaagattaagaaactttagcccttagcatgttggaatccatcagcaagcgcgaataatatgagcaaccctaggttcgacctcatcaaatatattttgtttgtgcatatttgattgttgcttgaatattggtttttcttgcgtattatagaaattgtgtatcgatcagtcgtaaggcaacgtctacaacttccaggaggtgaaggttgaacaataattatatcaagaataaggactatcatgcgcaagtcatcactatgacatgataagatactatcatgcgcaggaaagtcatcactattccttgaacatgttgatcccaattgcgaaattattttgtttacaaataaaattgcatgcaatgaggaacatcctacttgtgattatgccatgccttgattattgtttacccccttattccttcgtaaccatgtttacgtatgagtccctagtcaattatgacaattgcttagaaatgctattctagaatcatgcatactcatatttatcaaatgctatatgcttgggcaattacctttgggaaggtaattgagatgcggcatgtggagacatgagcgccatattgccatgatgttgatgacatgatttgtggaaggagaaataaaactaaacaactgttttcgactggggcggacggaggatttgggtggtatctggaaaaggctagtaccgtccccggtcaattaaggaccgagccatgaagttaagcatgaaacgacccccgtacaaccgtacttctcgaatgggtatagacctagcggattagatagccgagcggaggcagtatccctgcatagatggttcacccctgagtgaggcaggtgcgctaccgtgggacaaccgttgaggtagggccgagaggcgtgccctacatcggtgtcgccattggtaggactgccatgagtgtgtgagagagataacttaacttgaatcttaatttaatatgtgtatgagacttccctttcccgggagcgccagaactcctctcactgctagaaacatggacacttagagtgcatgaggatttaagttcatggagcgggtactgccaatgcgaggttatcgaaaagctttgtcgtgacgcgtctcatgtgttgggacgaggctcatgtgttggacaattgcggagtgcgagtaaagtgtacatccactgcagtgtgagtaaaccaaatctattcgaatagccgtgctcgcggttattgagcaccgggacatgtattatacttggctagactctagattcttaacttgtgtgggatgggatattgcatgatgatttttatgctgatggagccacttcctgagaggagggaaggtggacgtcctcagaaaaccatgacgactcaatggcgggaagctatccttgggatcacaatggatggtggacagaaccatcgttgtttaatgtgaacattggtactaaaatttgatcagtctatgctagattttaggcttctgaaaagaattgcaaaacttgctttgcgcaaaagaaccgtggctattccttaaaataccccctctatcatatgcattattgttgtggtggcttgctgagtacggtcggtactcactcttgctatttatacatcttttaagagagtgttgaagagaagcccttgtcggtacgcttgcgtatccaacaagatgatcggagtgcggtctggttctaggtctcgttccccagtcgactgcctgtggcatattaaccgggcccttatattatttggtcttccactgctgttctctgatagttgatgggctacctggccctaatgtaagtatttaactcttttagcctgaattcattcgtgatatgttgtgattcaactatgtatgtgtgtaccaactactgattcagggattggtacagataaacacagaagatttccgatttacaaaatcggaggtctacatagacagagcaggagcttacgcaatcagcaccattggttagtgtagcctacgataggaggtgcgggctgtggttgatgacgggttcttctcaagtaatcatgattgctggtaatatagccgccgtggtggctatgcgggagaggaagacaaccaatcttgattggcgtgcttttttatttgacgtatcaacatttgaaattcaatgttttatgcacgaggagagaaatattccaattagaattggactatatttcacatttttatttttattatgaaaatattgtagcggttggaacttatgtgtcatactcatacatagaaatgagatgtttcaaattagtttggacaatggttcgaattttagtttgtttttttatgtttcgctccatttctcaagatgttttatctgtgtctctcttatgttactttattgcgtactagtttgtcatccatttattttaaaatgtcataattacttttttttcacaatgtataattaatgctacagttatggtcaactgaaataattacagtttagcctgatttttcataaaggcccccacattataggtgaaacacactgtatcattcttagattgactacgttctttttagcttatttatcgaattattaaaacaacttgtctattccacgtttcaaattaaaaatatgtttgcaagaaagtttcttctaccgtattttttagattaattgttttaaatatatgttaagtttattccttagaaatctaattaatcaacgaatgtgttgctagcaattacttcatccgtcccaaaaaaaaatcaacctagtactggatgtgacatatcctagtattacgaatctggacatacctctgtccagattcattataccagaatatgtcacatctaattctacattcgtttatttcaggatgaagggagtatgtaaattgtttccaaacaaatcggtgaccgaaatgacaacgacacaaactcgatctagaaagagcaaagactaaagagcgacagggacagatgatccattgataattattgtacatccgacgtgacgcgaggcggtaaccggaaaatgatatgtgatgcaactttggaataagttcaccttaggtccctcaatttgtcaccgagttctaaattcgtccctacatcacaaaaccgaatacaatgcatcccacagcttagaaaaccatgcaaatgaggtccctcgacagtattgtctccgattttggctaacgtacgcctacatggcactctattgactaggtcttaatcccacgtggcgcttacgtggcaattcgatccgaaaaaataataaaacccgtgagacccacgtcagctacacacataaaaaatgatggtacccatgtggcctcacatgtcatcctcactaccctcttctttgtatctatctttttcttttctttttcattcttttttcttcttttgcttcgcgtccggcgcttggtgggagcgccgtgccggcggagagggcggccgacgggagcgccgcgagggaggcggcgagctcgtcgggccggcagacaggagaggagcggcggcgctcgcaggccggcgggagggcgggagaggagcggcggtgcgcggggaccggtgggagggagcggcgtgcggaggccagcgggagaggatcagcggtgcacgctggctggagggtgggagggaggggagcggcggcccatgccacgccggcggagagggcggccgatgggagtgccgcgagggaggaggcgagatcgtcagggcggccgacaggaaaggagcggcggcgcgtgggagccggcgggagaggaggcaacgcgcagcggccgacgggagggagggagaggagcgacggcgctcgccggttagcaggagggaggtaggctcgccggcctctccgccctggttggcatgtctcccccctccccgcctgtccctcatttactttttagttttgctcatttattttttttcaggatttaactgtcacgtatgcgccacgtcaatgacacgtgggacgaagatctagttaaagaagccacataggtatcacgtcagttaaaccggggtcaatactactgagggatctcatttgcactggttttgtaagttggaggtaaccggttttccgtaccgagtatgaaaatcagactgcgcgacaaattgagggaccaatagtgaacttatcctgcaactttcagccaatttacggccttattgtctcaggcctaaccatcttcgtttcggaagaagaatctcggcctggaaaaggcccggtccaagaacgggaggcgagacggaccagcgacgcgtctgtgcgacggcatgtcctaaccgcgacgtgagcgcctttttgttgaccgtgcgtgcgaactgtcgcaagatcgcccgtgcatagacgccaatctccggatttgctgtcgtgaccgtgccatctgcggtgaggcggtgagcgacacaagcatttctctatcgtacacaccacgcctctccaggatgcctgcaagaccagtacaacatccaagcacaataagaacagcactcgcccagagaacacagcaaattaaaccaccgatatccgcttgatcgcaccacccatttttacacttttccgcgcgtgtacttacactgcctgcgaccgccgcgatcagacacatggactgcaccaaggcggagacacggaatgctccgaagtggcagatgacgatgccgccggcgggaggcgagtcgtcgtcgtcgtcgtcataaggtccggccgagcgtgcgcgggcacggctggtctactgcgcggccgcgctccaagccaaggtgtccggctccgctaagaaggtttggaagattggcacggacgatccccggaaggcgacgtacggcgtcaaggtgggcgtcgcgctcaccctggtctccctcttctactacgtcaggcccctctacgacggcgtccgcgggaacgccgtgtgggccatcatgacagtcgtgctcgtcttcgagtacaccgttggtaaaaaaaaactacaatttgcgtgcacaaagccacaaagtcgcaactcacgaccgtgcgacgcaccatttgattactgccttattgagtttggctttgcttgcttgcttgctatctttggtttgcacgtacgcgtgtaggtggtagcatgcacaaggggctcaaaagattcgcggggacgatgagcgcggccgcgctcgcgctggggatgcattgggtggcgagcaaatccggcgaaacgttggagccgttcgtcgccagtggctcggtcatcttgatgggtacgtgtccaacatcgtcatggccattggcgtagctagggggtagtcctggtgggctcgggactacccccgaatttggcccagggagccccacccccccaaaaattttagcccagacttaagcccaagaagccagcccaataagaaatgaaaaattagaaaggctagggtttggagttcgctgcaacccgacgctacttcgtttcgcacgcgtgtgacgaccgcccatgccgccgccgttcctcctttcccggcctcgccagctcgccttgccctcgcattggttccgcagctcccacctctcccctgtcgttctttgtccgccgaggcactgagccgctgccgtcgttgacctcccggctgctcaatccatggagaggcggactgacggaggttagtggcgccgtcacgccgctgaaccgccaagcgccgctggtcgccggcgccgggagcccaaggcccctggccggttggccctagttgattgccgctcctcccccttgccctgcctgtgccagcggctgccttagtagcctatgacgaggtgagtttaagtgctaactggtgaattgaagctatgagcctatgaaatcaaatagatgtatatttctaactgtgatttgtgcatcagttagttagtgaatgactgaatgtgtgacgttgacttgctatggaatgtgaattagtgaattagagctatgaactgtgatttgtgatagtgctaattggtgaattagaactatgaactgtgatttgtgaatcactgaatgtgctgttgacttgctgccattttattttagtttgtaggatttctttggcaaattaagtagtagttttgataaggttggttcgagaaattggaacaaatccgacgcacttgacaaacatgtagggttgtaacaagtaaacacaataaaaaagcttcagagaaattatttatgaaagatgcaccaattgctatatttctaattttgtatggccttttctctaaattttgatctgtatatgggatttacggtgattgaaaaattttagtatgtgatgtgaacttgtgatccatgaagtaggactacccaacaaaaatttcctggctacgccactggtcatggcaacatactactacgtatgttgcagctactgcagccaccttctcgcggtttataccgacggtgaacgcgcggttcgactacggcgtgtccatcttcgtcatgacgtacagcttcgtcgccgtgtcggggtaccgcgtcgacgacctggcggcgctggtgctggacaggatagccaccatcgccatcggcgtcatcatctgcctcgccgtctgcacgctcatctgcccggtgtgggccggccaggagctgggcctcctcaccgctcgcaacatggagaagctcgcgtccgccgtggaggcctgcgtcgaggactacttcgccgaccccacggcggcggcggccaggtcggaggggtacaagagcgtgctcggctccaaggcgtccgaggactcagcaggccgcgcgatgggaggcccccgcacgggcggttcggcttccgacacccgtacgaccagtacgccaaggtcggcgccgcgatgcgccagtgcgcgtgctgcgtcgaggcgctcatcagctgcgccggcgcgtcgtcgcgccagcgagccccgcccccgcgtctcctcggcgatgcgtgtacgagggttggcgcgtggtgcgcgcgggtgctcaaggaggcgtccgcctgcgtcgccacgatgacgacgtcccggggccttggcttcgccgtggcggagatggacgccgccgtgcgcgagctgcagagcgacctgcgggctctcccgcccatcctagccgaggaagcgtcggagacgtcgctggcagaggtcatcagcacttcaccgttgctctgctgctaagcgaggatcgagggcgtcgtccacgccgtcggcacgctggcgacactcgcggggttcaagccggccgacgatgctgacggtaccgataagccagaagccgaggtggcacgttcggacgagtcaccgcctcaccggaaaatctggcaaacacgcaccttgaacagagtgaacattttagcaagtgacaaaaaggggtacaagctgctagtaggtgtcaaagcagaacattttagcaggattccaatttcaaaaccgtggtgcagaggtgcagtgctgcaccagtacgtatctacatgttcaaacgttggtctctgcttctctgggccttagtgaagaactttcggcccaagccaaaccaggctttggtgagaaaatgtacagcccaagatcagatctggacttggacagaaatattaggcgggcctgatgctgatagcttccaggcagcactggtctttctattagcccggtgtctactctctacaacaatttcagtttctaaaaaggaataagttcacttcatgaccctcaaaagagacccgaatctaatccatggccctaaaccgcaaaaccggatatcttcacccccaaactattgaaacgtcagcaaaaccaccctccaaaa

SEQ ID NO: 1693 - DNA, 640 bp, Oryza sativa
gactccctggatgtacactttctgttgtgctacattttggtgggcatggatgtcaaattaacctaccacttgccattcagagcatttttcagtgtggacatgttcacaaatttctaccgtattgagagcatattcatacatagaattacacaaagttttgctacctttcctttttgaagtacttttggaatgatctgatctttgcatgattttcagataatactttggatggcgttgtggtggaaaccagttcgagcaatggtcatcttgtctaagatgttctttgcaggtaaatcttgtgtaatttgccttgtcttgcagttagtatggattttttattttgaatgagagcttgtggaaatcatagctggagatagatgggaaaactatctgatcataagttaaaaaaattctcgcgtacgtttagttcctcacatcccctaaatattaatgaacatgaaggaaatacattgagtcatgataaaccaggcgtagtgcaattttgagttttcttgttatacatgataatttatcatttattctactaatacaaagttatttgccagcgacatctttatttgctgcccttggatttcttctctatggagggaggtaagctgtccttggttttcttattttt

SEQ ID NO: 1694 - DNA, 711 bp, Oryza sativa
cattaaaaaatggcttgccaagaataaactgcaaaagcaatttctttgtcgtgttattttgaatatgtctagaccaataattgtacttactgagtgcttgttgatagcgttcattttctctttggcagttggttgagattgtaccttcagctttggtgctgttcatattaaggaaactaccacctaaacgggggatcacacagtaccatccaatccattagatcagtccagggatccccaatgtgcccttgcaaattgttccttcaaactggtgagtacagaaatgtaaatcttaaccacggatttctttgtaggtaggttgcttggttttcatgtgaaaaaagctcaacaaaaattctgggatatatatagtttgtaaaaagtctaacatcccgtcatcccaaattcctgcaattgctgtactgcgacccaggagtattctgcaactacaggttttcttctgtaaactgaaggacaaatatgctttgattatttgtttgattatttgtaataatgtcagctttggtttattgttcctggtaaaagccccttgcacgcttcctcctgactccccagtggtacacattgttcattactacctttttttagcctggacaatactgggcaatgttgtgttccttggcagagtattttcccttttacaccttcctgttcactggattgcttatacaagctctgatcggcctgggg

SEQ ID NO: 1695 - DNA, 3323 bp, Oryza sativa
agaccttaaaaacaatgaaatctaagttcattccctcaaagatattacctaataacctgcaaaaacttgctctgctaggtaaccaaattattaaggcacattccactggtgaccactataagcctttaaggatcccagtacaatttagcatccctgctttatcaccttcctttcatatatatgcacaacagtgcttaccctttacagcccgggcgagagagagttatcagagtcttcccatggatggcatgttcgttcccttactcccactgttcatatgggcttctagtttttgccgcactcaacatgcagaccatatcagattgcttggtctgacattttatgcaaacagaaatggatattttttagataatgaacagaaatggatatagggcataaactttacaaaacattgcaggatgctaatttttcttcttcttcttttttttttttgcaggagactaatacttcctttttacctctatatcaacgggaagaagatgtattcagcatagaagagattccaaatgaaccggtagtactgtgaaatagcatcctgcaagacaagaaaaaatggtaattatctatgcgagaagcaaggtgacataagtataattgaaacacaaccatatttatcccctaaattatgtcctatcagatatttacggtagttttgcaagtgagcttacaagaagaaatgggttaaccaaatttaaaatcgaagcccaatgattgagattaggatcaattgtgccatctcatccaaaaacaaggacagtcaatttgcatatgtgacatggcaagtggcaacttgagatttattttaattgtgttgctcttttgattagtaaggaggcgcaaaatgacatatcttcccaagaaataaaaagaccttacaacagtgagatcatgttaaagagaatagaatggaaaatatttgtttgagtaaaacagccacaagcaagctcacatatagaatgtttctattagcattttatactaatgaagtatcttatttttctaacaaaagaagttctttttaaaaggtttcagaactgaagtcaaaagtttcaccttagtatattttgcttgctccagaacccatgtctgaaaaaatggaacagaaaacaaacaagttacagttaaaatgtgtgtaacagcttcacagaagcaaaacaagatactagctgtgaatgaaactgcttcttatcaagtcattattctgtagccattttagtttctgttaaaatttatgtgcagcctcacttagcagttgttttgacaatgacacgttaaacctgcaagccttccatgtgtgtaattctatataattcaataaaaaaactaatgggcagccgatcatcacaacccatgaagtaagctaacaatgtcaataaactaatcatgaaacattgtgccaaatagttagagcatagatacacgagggtttttcgtctctagaagcctaacacatatacctggaaaattataccaacggcaagggcagcatgcacaggcaccattacagtgcgcctgaaagcctgcatattggaacataatcagttattaaaaaggaaccacgtaatgcatcttagtattgcagtatgcaataaaaagcctaaacaccttgatctggaaagtccaatgaccagaaaaatatcctcaggagttaggataaaagaatttacatgctgacgcggttcagaaatcacaaatataaaaggttgagtttggcaattctttatattgaacaatatttgtagaatattgtagtggaaaatcattgaaaatactattgcttgaatcataaaaaaaatacaaacaaagaacatacaagtcaagctaggaaatattgaaacatatgacaagccctaacgtttgtatggaagtggactccctagcaagttggaaatccaacatgccaaacattggcaagtcagaaataaactagtgatctaagtaggatgtcaatcttacaaaaatttggtagcaaatccaatgcatgccaattgtgttcactgctaccaaaatttggcaacaatcggcatagaaccatacagccccaaatgttaccatcacctattctaggtggaactactaagaggataaacaccaacaatagcaccgtatagttatgtttctaccatataataccaatttgattgtcctccaattcatggttttaccatctaaacatcatccgcagttgaaacaggagaaatcaacaaaatacagtataccaatatccagttaaatgcacaacatgccatacaacatgtgctgcatgtttataggtgaacaggctggaatattaaaagtagtaaagcaacctgaggcatgagaaaagctacagcaatagcagcaacataatttgctatcaataaaccagagccaagaaatgcaatgtttctgacaccgagctttgtcgccaaagttgatatttgatacctgaatgaggaaaaaagatataattagagtgttagtagtccactcattgacatttattaaacaatggtatagtgtatcagaactgcttccaattgctcctattcaatcttaagcaaagctaaataaaaatctgttaagcttaaacatagaattctgcacctttttcacatttgtgttatgttttaatgtactacttcctccgtcccaaaatataacaacttctagagttcacactttgtcccaaatataacaacctagtacttgtaaaatgtgacattgaccactaaactacctataccacccctaatatcccttggctttattatagccctaactagttggcctataggcaacaaagtctttttacccctctccttaatacccatgctgaaggctaaaacctgctggagggagtatatttgattgcttgtttcggataagatctcctaaggactagaaattatgtaacacaggcataacttatttggctaacaatttggctagcataatttggagaagtacataacagtctcttgatgagggttctgtctaccattttggttatgtcgggccaatgcctctgatcttgccagaatcagcattctctgttcgcctagtaagctggtaaccccagaagtactctgataatttcttgctgtctacaaaagctggcgttctgtcctttagtttatagaaactaggtgctgcaaccaattactgccattttttttgggacctttaatctaaatattgcattatccaaacgacaaggaatggctgctcaaagagaattatttactcatttgtgctttcatcaccataaggcagtgaaatagtagtttatttgtgctgctcaaatacctgtatgcaatatt

SEQ ID NO: 1696 - DNA, 29316 bp, Oryza sativa
gcctcgccggtgccgttgacaccattcggccagccggcgaggccgggcggtggcgcgctggggcggcggcggcggcggtggcggaggcgctgaggagcggtggcgcgtgaggaattgggaaagagaggagagaggatttttagggttggttgcctgcacgaatcttaaagcaatcggatggtccaaaatttgcaatatttgtgagggggttttctgtcaaatgatctatagacagtccctttttatttgacggggcctttagtaaagaagaggaaaaagtacaccgaaagggtccctcaatttgtcatcgagttaggccctgtttagttcccaaatttttttcccaaaaacatcacatcgaatctttggagacatacatggagcattaaatataaataaaaacaaaaactaattgcacagttatgggagaaatcgcgagacaaatcttttgagcctaattagtccatgattagctataagtgctacagtaatccacatgtgctaatgacggcttaattaggctcaaaagattcgtctcgcggtttccaggcgagttatgaaattagtttttttattcgtgtccgaaaactccttccgacatccggtcaaacgtccgatgtgacacctaaaaattttcatttcgcgaactaaacgcggccttacaaaatcgttccccaaccgcaaaaccagatatattacatctctcaacttataaaattgttcacttcatgtacttcggtggttttcaccctagttttgtccgacgtagccgctgactcagcgtgggacccacgtggatcccacatgtcaggatgccacgtcagtacctctctcttcccctcctctctccctcggggacatgacggggaacagcggcaagagaaaaggcggcccggcgctccccggtgacgggtgcacgcgatggccacaaccttctcctccgggaggccgatgccggtgatcggttgaaggggttggccacgagcggcatgacggggctgagcgccaatgacgggaagtcgagcatgctcggtgacagcaccacctggtgctggtgctgcgctgccttcttcagggacgccgccccacggccgcggccaccgccatcactagcagagtgggcgggagtgggcgcgccaccggtttgagctcaccgagtgggcgcgcctcgtcaccgccaagggcgtggaggatatcgtcttcgtcaacaagctcagggaaggtgaaagggtagttgggacgacaacggcgacgggcggtgggagggcgacaacgacgacgtgagcggtacatggacgacgtcgaccattgcccgccagtgcctcggcgaggcggctcacgcccggccttgcgtccgcctccgcacccaccgtgtctcccgttcagctcgtcgccgtcggcttcctctgggccctcttgtcacgcccagaaattcacgaaccagaatttctaagctgaatgtgcattaaacccctgtccaggaccagccatggtacacaaacgacaattgttgacatacagatccacgtcttataaaaatataaaagattacaaatgcagcggaaaagataaaagagagctaagtctgaagacttgactcctgcagtgggtgactccattccacaggcatccttgacggcagcgacgaaaccaacttcttcgagacagctccaactgagaagaacatcaactctggtgtggggaagagagagcatgactgagtactacctactgtactcagcaagtcataccagaagggcaaaggaggctaaaggttcatttgcataaagcagacatttaaaagcagtagttgaaagcagtaaaacaattgttgtaattaatcaatattaaccaatcactgtccaacgctacaccacgttgcaacaggcccaaccaaccacctgaactacaccagttcattatctaactaggggtgagactaatcacggttaatctggttgaccacccataaccgcgggcacggctattcgaatagttttactctgatcagaggtgtacaactatacccacaagacacagccccatgacacgttttcgtgcgccgacatgccaccacgacataccggaaagaggccgtgataggacccttcgcataaccccctctaaccgatcgtaccacacctcagggttcgcccccgttcccagtaggcaacgggcagcccccctctcgtgccacggtgaatccgaaagccgatcaaccgaacaccccggccgacccaactccatcaagcccaccctaacctgggtacgtcggctagaggaaagctacactacaagcccagccgttgcccacgctggcttgtggtaagtacgatgaattcttccagggtttcccgcgaaccggtccttaatctccatgggcacgactagtaaaaccatgcacccacagcccaccatgtagtgtattttaattagctaacaccattgcggtgtcactattccaaagctatgccaataattaaagtctatgcattaatgtgattccccctttatgtaatagttgaactaaacatggctaagcattccctaaaccaacatctaatcattttaatacccaagttatcaatggcataaggtaaacaatatatggctgagtagtaggacccatcccacatgatattgtaaaacaatgcaacatttaatagaaatgcgggacatttgtaaattggttacaatatgatcaattgtaatgcatgacttgccttgctcttgtaccaatgagaccacagcaatgtcttcggggaaccgcggatcaacgaaacggccgaaatctatgcgacaaacaaagcacacaagcaaaacaggctataagactactgaaacagagaacaaaaccatttttaatggattctatcatttttatgaatttacttagacttgaatgtacttaatcggaactcggatgaattagttataattttagaagattaaatgtgtttttactataaaaagaaaagccttaatgagatttattgcgcaataaagcatcccggataacgttagcaaaggggggggtttgcttaaataggagcgggggcggagagtcgtggccgggaaaccccccgatttggccagcgacgtgggggagtggggaggaagagagagggagggattcgaaacgaatcccgcccattttagggcgtgtgcgagggcggggaagcggggaggaggcggcgacgtgggcgcgggtgcggagtggggcgcgagaggagcagcgtgggggcggcggtttcggtggcagtggtggcggttgccggaggttagggacgaccccgacaggtggggtccacctgtcggcgtcccagagagaggagggagggagtttagactgggccatggccacggggctggcccagggaggaggggaagatgtgcgcgagaggcgggtggactgggccgacggcccaacaagaagaaaaagggagaaaagaaaagaaaggaaaagggaaatcgatttccatggaattaaataatgcacatgctcatttttaattggttaaaattattttttgggctctgaaaattccactaaaaatcctgttagaatattttgacatgtagaatccaagaaaagttccacatgccgattctaattatgatttgcatttttttgatttagggtttctctcttgcttttaatcaaataatttcttgcaacaatttattaattgaattttggctagggtgaagaacttcagggcgtgacacctcttcccctcatgcctccctctcgccctccccgacggtagcgaggtgtggtggagctcgagggcagcgagggtggcgcggcgtcgtgggcgggcgctaggtagcagagctcgagaacagcgagggcggtgcggagatggggcagggctcgtggactgcgaccccggcgcggcggcctgctcccgcgtcgcaaccgccgccgttgcctcgtcgcccgccgccacgtcaccgaccaccggatcacctttcccacctcgccccggcgtcctcctccccagccgtcggccggcgttgcacagagaagagaagagaagagtgagaaagagaagaggaagggataggagggggaagaaagagggtgataacatggcatcctgacatgtgggtcccacgctgtctcagccgccacgtaggacaaaatcggggtcaaaaccaccgagggacctggtttacactggttttgtaagttgggggacaccggatatctggttttgtagttgggagatgattttgtaactcaacgacaagttgagggaccttcggtgtactttttcctaaagaagatagccaacagagtcacaatttccatggaaaccgattgaattccgtgaaaaaccgaggttttgacgtggctaggaagtagtagccgtctggaaattcgatggatttcatccaaattcaaaattgaactgatagaaaccaaaaaattcaaataaaatcctacaaaatagtatgatatttgcataacatgttgggttattttttcttcttcaaaaactcggtgagttccgtgcctttctcgaactgtacggtaggaaagaaaaaaataataatggtttagacaaaagaaaaccctttccttgaactgtacaggatgaatttcatgtattccatgtcatagaagctaccgtacaattacagtatagcatgtagtgtttattggactctaaactgtgtataccgtatacgtagagatggaaaaaacaatcaggcgatcggaatcgatcagagatgtaaaccattaaacacgcctctctagactctacatctaaaatttatatggtcacttaacctgaagactgttcataatcagaatgaacaattagatggacctcgaggcctcgactaattaatcagcctgactgttcattaattgtgtttggatgccccttttcccaacctctctctcgttttccgcgcgcacgttttttaaataaacggtgtgttttttaaaaaaaattgtataccaaaattattttaaaaaataaattaatccattttaaaaaaaatagcaaatatttaattaatcacgtgctaatgagctgctctattttacgtgcgtatgctcccatccggctgtagcgaacacacccaaaccatttgacaaggtaaggcaaggattatgccttcaggggacaaggattcttcagtattgttcaaaaaaaaaagttgtaaaaggaaaagcaaggattctgaccagcaactgtttacgaccatcttaacaaactggtgtgacacattacgattgaatcttgatttttcaaaaatactttaaatccaggatgagacgtttgcagactagcaaatctctctcctttatgggtcgcgtcaagcaagcacacgggttcttttcgcggaataagtttacttcatgaccctcaaagtcatcgaaatctaatccattaccctaaaccacaaaaccgaatatctcgacccccaaactcttaaaaccggtgcaatttgactccctgggtggttttggagggcggtttcgctgacgtgacgcctacgtggcagtattaactcggtcttttttccacgtggcgttgatgtggcgcttaggtggcattagaaataaaaaatatgtgtgggacccatctatcattcatacacaaaataaaaaattgtggggcccactgacatgtgggccctacatcatcctctatctcactacccttcttcttcctcctctctccgttgtttctctctctctcccttgacatgagccgtcggcaggaggggctcgagtgccggagtggtggtgggcgggtgccggagtggtggtggcggtgggcggtggatggtgtacctcggacgacgggcgcggaagcagctccttctaccgtaccgggcattgagcgacggacctcgggtgacggtgggcggtggacggtggggagcatgggcggcgggagctgaagcggcggcggcgacggcggtgggctggaccgtctggctgctgcccgccccctccatctcctcctcctcgtagtcgtcgccgctgacctccccgaccatgccaagtaccagatcgagaccagccgcccgccgccgccaccgctctcgtctccgacctttcagctgcggccacagccaccacccacgggacgcgtcgccgccgctccaggtcagcatgcggcagcaccgtcatgagcgcgagtgcgggaggaggcattggcagtggcgacaacacgagctcggcggctccgcctttcccctctcctttccagccctcacgcaccgccaccgcctcacatgtcacccatcacctccgttccccccttacctgctctcctctcctctcctctctccacttggctaggccgatggcgaggctgccgccaccaccgccgctctggcccccgcttgccgccgctccagctccagcctcccgtgcttcccttggccggccaaaggggagaggagaaagagaaagaaagagagaagagaggaagaagaaagggaagagagaatgacatgtgaggcccacatgtcagtgggcctcacaattttttgtgtgtgtgaatgacagatgggtcccacgcatattttttatttctaatgccacctaagcgctacatcaatgccacgcggaaataagaccgagtcaatactgtcacgtagacgccacgtcagcgaaaccgccctccaaaaccgcccagggagtcaaattgcaccggttttaagagtttggtggtcgagatatctggttttgtggtttagggtcatggattagatttcgatcacttttgagggtcatgaagtgaacttattcctctattcgctcgtgtgcaatgttcgttccgaacaacagcccaagcttacgtatatgggccgtactacggagcccaagcaaagattctcgtgggcttaattgggcttctcggccgaccacaagaaccaaatctttgcagaaaaagttggagcagctgccaactttctctggacgaacatgccattgccatccatgggaagactgataaatctctctacccccggctgtaaagggtaagcactatatatactatatgacaggaaggtgataaagcagggatgctaaattgctactaggatcctcaaagtcttatagtggtcgtcatatcattggtggaatgtgccttgaataatttggttacctagcagagcaagtttttgaggtcctatctttgagtagattcccttgttttgggatcaggtcacacaacaggtagtgctggaggagcgaaatatgaccttcttttacactacaagggaggttgactcagctcataaacttagatctaatattaaacattaaacaatgaaaagacatctaacattaaaagtacttcatctgcgttaatccaagctggcatgcttgtcgcagaaaggcccttcgacgaggagttttgacgtttccaacgtcaattgttgttatctttggggtaggtggcctctattctatattctcttctctgtacttactccccgtgcattcttttctactatcctctaggacttctgcacttacgaaggtgaagcttgccctgtgtaatatcatttgacgtaatatattcaagtggaaaactctcccaatacaaaacaaacagttctctaaaaaaatacaaaacaaacatattatccaaatatatttaattttatatttaataaaattaattgggagttataaatgttactattttttctataaatttaatcaaacctaaagaaatttgattaataaaaaagttgaacaacttatagtatcaaatagatatagtaccttggatggagattttgggatggagagggagtaacagaaatcgtcgcatgcaaggtggtttttctacggcatgcagcacctaggccgcatgccgttggatggatcccacgattggtgctgtatgtaaagtgctttgggcgtatatattttgtatattgtggtggacggtatataccagacattatacatgaggtaaagagaagactactttacaagccgtggtcccgcctcccccgctttttttttatttttcccctccaaattattgccgaccacacatctcgccgttgtgttccagaacacaccatccgcggattcccccttcctcccccgagcgccgccaccaccatccccccaccctcctccctcctccgcctcgtcgacgcggcggcgatggcgtccacgcggcagcagaacctgggcccggatgttctaccccatgccactgccgatggatgcgcggcggcggttgatgttagggtgtccagcgacattgccagtcaataagaaccgggcacaatcaagaagaacccggcggatgatgttagggtgtccagcgacggatctcatcctgagttgcgacgaacacgaatgccacaagcacgagagagagagagagagagagagagagaggtggaggcggcggaggggaggctgctgctgctgctgcggcggcggcgcatttgaattggggtgggaggaggcggaggggaggcggcggcggcggcggtggagggggatggtgaagctgagcacggtggcggtggtggcgtgggtgctggcgtcggcggcgctctgggcggggctgcactggcgcttccgccgcccggcgctgcacaaggccgaggaggccctcgtctgcatttgcgaggagcgcgcccgcatgctgcaggaccagttcgccgtctccgtcaaccacgtccacgccctcgccatcctcgtcgtgaccttccactacgacaagcaccctcccgcgctcgaccaggtcggtccgacgagcttccgccgcgatgatgatgatgttgcatctgttgtttttttttttgccccccgcagttaattgcgataatgcctcgatttttactcgacatcttggccgtgtactttgctctgctgctttcggcttcatttaattctacagtgaccttccatgtcagccatggccatggattactgctccggtcccttgttattaaatggagcgcactttttgttgggactgggaggaagtgaattgattgtgcttgcttgcttctgttggtagtactagtgatttcttcggctgtgtggctgaatcttcttcgttgtgttgtgcgtgtgtgcaggacacgttcgccgtgtacgtcgcgaggacgtccttcgagcggccgctgctgagcggcgtggcgtacgcgcagcgggtggtgcacgccgacagagagagcttcgagcggcagcaagggtggatcatcaagaccatgaagcacgagccgtccccagcgcaggacgagtacgccccggtgatctactcccagcctcccaggagaccatctcctacatcgaggaagaggagaggagagtcctaagtccatgtcaacatttcatatctcaggaagagtttgaagcaaatgaggaaacagggaggctgatctgtggccacagctatcatgtgcaatgcataaagcagtggctttctaggaagaacacctgccctgtctgcaaaactgttgtctcaaagacatgaaatccaatcagtccctaagcacacttgaactgaaaagtgtgaaaaggacttgctctttcacagtgttgtttgtgattgtacagctctgtttgtacatgatgctttgtgtaagcacaagcctgaagcaaaccatctcatttgcatatagcagtttacatgttttcagttttcccagtgtctactgagtgttaagcatttgcttgtagaaacttacatgttttcagttttcccagtgtctactgaatattaattcaggtgaaagaaaaaaaataagaagagaacagtttttttcactaatctcagtcggttttcatgtctgttggattcgttcgcatgcaaaggcaaccgtatccacccgatcttccggttggttttatatactgaattgctatatcttaatcgacagttttcttgcaacgaatatgtcacttttcatattttataaaaatttacacggtagttacacaccacttagatatgtaattagtatgtaattttaggacttacatatgtaattttgagacttacattgtaaatacactaaaattacatatgtaatttaaggacttacaatgtacttacaatgtaaaaacataccgactattttttggtgaaaaatatggcgccataaatatagctactcccattttttttgtttgaaattatattgcctttttctgaatctcaattctgacccctgcatttcccagcgagaagcttcagacagttcagtgtcaggactctcctcttcctcttgacgttggacgacggcgccctcggcttcgacgaggatgacatcctccgtgacttttccattctcgtcgtcgccgccgagccgctccctctcgcctccaccggcctcctcggcgtgttcgtcacctctgcatcggcggcgctcgcttctccgagctccctctcgatcgcctcggcccgcattgcgatctcctcgctggttcgccgcgcttccgtccacgcctccgccgccgccgccttcatctcggccaccgcgtggaccacctcggcgcgccccgtcaggtactcgtactcgaacctggggatcgtgaattcgtgacgttcctggacgacgagctccgcgacgtcgcggccgcggcggtggccagcgtcgcgctctcgacgatggccttcagcctcgccgtcgccgcggcctccgacgccctcgccgccccgagctccctcaccgactctctgatcctctgctccgccgcggcgatctcggcgtcgatgttctccgcgtcggacatggcgcgccggttctccgtctccgtcagcgtcttctccttctccgccgcctcggcgtcatcctccagctgccgaaggatcgccgccagcttggagatggtctcgtcggccctctcgtcggccgccgtgacggcttccaggcgagacctcgccttgagcagcttggcgttcagctacttcacctgcgcgctcgccgccttctcctgctccgtgaggcgggggatctcgtcggtgacccgcgccgtctccctgcgcgttcgctcgatggacgtcgtgaatcggaggccctcttccttgatggactccagcacgatcctcgccgagctcagctccgcctccgccgcctgcagcgatgactcttcgtgttcctgctcgtgtctcctcgacgccattgcagtggcagtgtggcacccgttgctcccaccactgccaggacgccgtgctcctcgcttgctccgtccgcatctcgctccacgccgccgccgccgtcgccgcgcgggccggagctcaccggaacattcttcggccggagactcgtcaagcctggacggagcgctggaccgctggttcggtcgacgggggatgcagtcggcgggcggcgggctgctttaaggaagatgcaggacgcgtgtgccggggaggggggcgcgcaggcgcggtggcggcgccggcgggcgactggcaatcggcggcggtggccggagattaggtcacggaggtcggaagctatcgagacgatggagagggatggaagatatggaatgtatcgaacatatatgtgtggtcgagaaaaaaagtgagtagtcgtactccgtagtccgtacaaaaagcatcttacggtggggtcaggtgtattttggatgcacgcgcaaaataaaaatacgacgctacctgtacatgatatgtaaaggtgtgcacgaatcttagagcaagttcaatagtatagccaactactagctctaatttatctatagccaatctaatagctcattcatacaatagttacatactacactattaatatatggtcccacctgtcatacacacactgtaggagtccgtgctacagctggctaccaatctgtagcctgctgcacttctctctgctcgtttatctttttaaaatatatttacagctagcttatagcccgctattatagctatcgtgcggatgctagccaggtgccgcagcacctaggtgctaaaaggacgttccgccatgatgtttagattccctgtgaccaatcgcgtaggtaagcatgaccaaactagttggccctccaacaagccaacaactactcctgcgcacgtttttttgtctgatgctgcagttttatagtactatgaatacagtctgatgagtgatgacattgacacccacctgctgcagttttatattgaattcggacagcagtcaccactccctcagtccctcgtcgcgtttcgtcggagacaatggcgacgccagcacctgatgtctcggccatcggcgcggccctccgatccccggcggcgacggtaagcgaggccgacgtcgagaagctccggctcatcgaagaactgacctccgacgtggacgccgtgcaggagcgcgtcctctcggagatcctcggccgcaacgccggcgcggagtacctcaccaggtgcggccacgacgccggcgacaccggccgcgccaccttccgggccaaggtgccggtggtgtcgtacgacgacctgaagccgtacatccagcgcgtcgccgacggggactgctcgcccgtcctatcgacgcaccccatcaccgagttcctcaccagctccggcacgtcggccggcgagtgcaagctgatactcgtcgccatggacgactccggccgccgccaggcactgcacggtctcattggacctgtcttgaaactgtaagtcaacctcttctacatggcacttcgccagtccgaagaaaagtgatatcgaacatttcgcaatgtatatatagatatgtccctgggcttgaaaagggtaaggggctctacttcatgttcgtcaagtcagagacgaagacacgaggcggcctcacggcgtggtttgccctgacgagcgtctacaaaagcgagcaattcaagagcatggcaattgcctacacgagccccacggcggccatcctctgcgaggacgcgttccagagcatgtacgcgcagatggtgtgcggcctgtgccagcgccacgacgtggtgcgcttcggagctgtgttcgcggccgcacttgttcgggcgatccgcttcctccagctcaactggggccagctcgccgcggacatcgaggccggcgagctcggcccacacgttgccgatccgtcggtgcgcgaggccgtctccgggatcctccggtcggacgccgagctcgcggagttcgtccgcatcgagtgctccaagggtgactgggccggcatcatcacgcgtatttggccgaacaccaagtacgtggatgccatcgtcaccggcgccatggcacaatacatccggaccctgcagtactacagtggcggcctgccgatcgtgagcacctcgtatgcgtcctccgagtgtttcttcggcatcaacctccgccccgtgtgcgacccgtccgaggtgtcctacaccatcatgcccaacacggcctacttcgagttcctcccggtcggcgaggtcgtcgacgcgaccaacctcgtcgacctcgcccgcgtggaggtcgggcgggagtacgaggtggtgatcaccacctacgccggtctgagccggtaccgcgtcggcgacgtcctccgcgtgacggggttccacaacgcggcaccgcagttccggttcgtgcgccgccaaagcgtgctgctatccgtcgagttagacaagaccgacgaggccgagctgcaccgcgcggtggagcgcgcctcctcggcgctcctccgcccgcgcggcgtgtccgtcgcggagtacaccagccgcgcgtgcaccgaacgcatcccgggacattatgtggtctactgggagctactgaccgagtcacccgtcggcgccggcgacggtgacacggtggacggggagacgctcggcaggtgctgcctcgagatggaggaggcactcagcgcggtgtacaggcagggcagggttgcggacggctcgatcgggccactcgagatccggatcgtccgtcccggcacgttcgaggaggtcatggacttggccgtctcccgcggcacgtccattgggcagtacaaggtgccccagtgcgtgactgtcccatccgtggtggagctgctggactcgcgcgtcgtgtctagccaattcagccctgccctgccgcattggatcccgactccacgatccgactagcaatgcatcctgtttggcatctttattttaggaaaggaaaacgtacaccgaaggtccctcaacttgtcatccaatcacaaaattatccttgaatcgcaaaccagatacaacacgtcccccaacttataaaaccaatgcaaactaagtccttggcggttttgactctggttttgtccgacgtggcagctgactcagcgtgggacccatatgggtcccacatgtcagcctcttcttcccctcctctctcttctcttcctctctcatccctttccacggcgacggtgatggagagcagcgatctgggagtagacgacgttcggtgggggaggagctgggcccgaccggcgaccggcggggaaagagcggggcacggccggtgagggcggagatgggcgcggccggcagccgacggggaggagctggaggcggcggtggggacgccgcggcgacggcagcggtggaggcgggggcggcggcggaggcaggggcgggggcgccgcggcggcggcgcgggagcgcaaggccgggagctaggttccgcagggcggggaggacgacaaggtggtttggcggcgaggcgggggagagcaaggagaggacgtcgatggtggtggccccggccgcgacggccgtggcatcgacgccgctctccctcatccacgcgaacgcccctgcagcgctctggaacgagccgcacgcggtcttgatcccgacgtcggtggcccggtccacggcgagcgcgatctgggcataggcaaggagcacgtcccacctctgctcgagggaggggtccgggagcgacggctgcttgacggagctcgacacggtggggcacgcgcggcatcccaacgtatgcgcgctcctcggctgttgcgtcgaccgcgacctctacctcgtcttcatcttctctggccgcggctccgtctccgccaacctccacgatcagtacaccaccaccaccacccaatgacacaaacgtaacaccaaacagtaacagcacgaacacgccgccattaatggcgtttgacgttttcttgatcgattttgccccgatgtgtatgttgcattgcagacgagaaggcgccggcgatgtggtgggcggtggggtggattgcttcggcgcgtcggggcgggggatgtcgtgttgagatccgccgtcgcctcgtcgcccgtcgccggccgccgaactctcgcctcccccaccggcttgctgtcctgcccactgccgaactgaggagagggagagaaaagaggagagagagaggaagagaggggatgggaagaaggggctgacatgtgggacccacaactgagtcagctgccacatccgataaaaccggagtcaaaaccgccgggggaccgccgggggatctagtttgcactggttttgtaagttgggggacgtgttgtatccggttttgcggtttaaggacgattttgtaattcgatgacaagttgagggaccttcggtttacttttcctttaggaaaaggcacggcccaagataagtcgagccggcacagtccgatcgccacggtgtgtcgtatctgtccacgggctgcacctacagcccagggatgacctaataggactcgggccgtgctgtaccagtccgaaggcacggcttacccaccgcgctcattctcgaaataaatctattttgcctcccctatctatttgggtcgtgtcttatatggttaaaataagtttattttgcctccctcagctcttcgggcttgctgtcgacgggctacttcctgagggagtgggggatgttgggtcacagttgtgctgatcgttgggttgtgccatgctaggttggcacgccgtgccaaggaagagacctaggcacggtccaactgttgggtcgggctggcagggctcgacaacagtcggggcgtgccgtgtctgagtcagaccaaaccttagtgttgtgggccagatcatcgggctacaggccttctggcctttactgctgcagttttatggagtctaaataaagtctgatgggtgtcaatgtcatcactcatcagattttattggataagtttacctttggtccctcaatttgtcgtcgagtctgaaattcatccttgaaccgaaataccatatataacttatccttcaactcgcaatactgtatcaactttagtcccttggcagtattgtggccggtattggctgatgtggcgagtgaaactcacgtggccccacatgtcagcggctcaactcttctacctctccctcttcccccctctctctccatctctcgcatcgaacgacggcgagtccgggccagggatggcgcgctaccgtgtggatggcgacggcggcacggtagtgagagcggtgtcggcacccgctcatgccgcaccacctcgaccagcttcgccaggacatcacctttctcatgacgagcagatttgagttattgatctttttttcttccttctggttctcctttgctgtttgccattgagagcaaagctgagttcttgatgtccctacttctagttctcttcacgatctgtgttcttatgccttaatgcctttatgtcgggggaatgtacggtggtgaaaaactgaaaaaaaaacacagcaccatctatagattttagggggcctgtgatgatatatgcctggaacaaaaatactcactttctggactgatttggctttgcttcaccaaaactaggagctttgcttcttctctgaaagcgtgtatgttgtggactcgtcctgccgtcgcaccgccactgccttttggaggatgagctcgtggtgacattcattttgttttgttggatttgctgtgcgttcatgcaggcgaccactcgacaagtcgacatcgactgcatacacggcaccaccaccagcaagagggccgcggggaaggacaaggccgccatgcaggagtgtcatgcgtcgccacctccagcaaattacttcaagaataaggccgactacaatgctgctgcagcatccgcatccgcgggcgccatcaactacaagtgacgatctacaagcccgggagcggcggcgctgagacgggctccgactccgacctcaccgaagatgacaacgcctgttgggaatctctcctctctgaatgtttaagtactaatcactagcactaacataaacacttgtatttactcggtggacacaaacacacaagaactgaacaacgcacagctttggtcaaggcaaccacacaccggctcacttcgttttctttttcttttatagactcacacagtacatgcagataacagccagccaattctcatgaccgggactcacgctatgcacacaaacgtgcagatgccatgcaactaactaactaactaatcctacttattctcctgcgaagaagtcacttcgcggctgcttatccgggatgctgatcctcatgcatagctagctcctaactaatctcatacgtgcatgtatgcatgcatatgctaggaccgattcactcggctaatactgaccttgcgttgcttgcaatccggctacttctctcagcactccacatgcagttgagcctggtcttcatgaatgttgtttgctccactctcgcgccaccgcatcgcacggcacgtcggcatctcgcccatgagatggaaacaaactaactatgcagcgtccatgtacctcacgtacatagcttctagcatgtgacctatacaaaccacttactacatgcatatgaccaaacaaaaaacatacttttacactaatgacaagattattgctaacaacgccatgctcaccccgggcccccggccatggtggacctccccgacgacgtcctctctccctgaggcgacggcaccgatggagtgagctggaaaggtggtggaggcgatgtgtgcgtcggcggagcgacgcgtgaagcgaggagcgcgtgcattgcggcggaggtttgctgttcatgagagatggggaagaaaggaaaaatggagagaagatttggtcgctgacatgtggatccacatgggttctactcgctacgtctaccgaaaccggccatcatatgatcgagggatgaaagttgacatagtattgtaatttggggatggaccatattggtggacctaaattgaacttattccgactttattcatactccataaaactgcagctgtagttggccagaaagcccgtagcccaatggtctagcccacagcacagagatttgatccgatcagacatggcacaactcgactgtgctagcccgacccgactgttggaccgtgcctgggcggctgggcctcttccttggcacagcgtgccgatccggcacggcatgacccaacaatcagcacaaccgtgacccgacatcccccgcttcctcaggcggtagtccgttgacagcgggcccgaagagatgagggaggcataatagacttatttcagccatacaaggcacggcccaaagagataagggaggcaaaatagatttatttcgaggatgaacacggtgggctggtcgtgccttcagatcggcacagcacaacccgagtcttattatgtcgtgcctaggcgtaggtgcagcccgtggacggacacggcatgacacaacacggtgtgtcggtcagactgtgccgggccgacggatgttgcactagtggagaacccatttttactactggttggtaactctctttagtcctggttttccaactgggagtagaaatccgggactaaagatgaacttttttagttctggttggtgttaccaaccgggagtaaagagagaatagcagcagtatcagatggtccctttttcttttcttttttcctttttattttctcccgaatcaagtgacatgcaaatccccaaatccccaaatcaaagtaacatcccaaattcacatcacaaaatccacatcacaaatcttaaagttacttatacacacaaatcaaatacatcacaaatcctaaataattatacacaaatcaaatatatcacaaatccataaaataaatcacaaatttatacatctcagtgtatcacaaattaaaaaaaaacaaagccgctaccgcccctcgtcacggccgccgcctgcggccccgccggccgccggcccaccggatgggaaggggaggaggaagaggagaggaggaaggggaggaggtggaggagaggggatgaggaagagaggatagatctgatctgtaggagaggagagggggagagatttgatctgtgtgagttgcgattgtggaggagaggataagtgatagggattatatactacgcgttcaattttagtgccggttagtaataggactaaagatccagatgatctttagcgggactaaagatcctcggccccctgacatacatctgacaggggatgaacctggactaaagatgatctttagtaccggttggtaataacaaccggaactaaagatgatagaatcccggtagggtttttaaccgggactaaagatcatttttagttccggttctttttggaaccgggactattgtggttttgggtcgactcagcaaagatcatttctccactagtgttgggccgtgctttttcccaaaggggataatattaaactactaggcggcgcctggtagtatttctgctaaaaaaaacaccagtagtgacaacccggacaagccaaattaaatcaacacatataccctattaaaaaacggttttgctatttcacttgcgatagatttttgggcttctacctttcgatttttgaccgtaggatcttgtgtcaagattcatgttcctttaaattcaacttgcagttacacttagttacataacatttacacttacttacatagcacattcaattacagtgcatcaaaatttaatttttacaacaactttttttcgttagatttatgatttctgacatgcttgttcttgttttgttaattcactaaaaagagttattacaaattccgcaagatttgaagttacagatctatcgaaagataaataggtagttcctttttttccaaaattaagatgctaaacaggatgcattgctagtcggatcgaggacatcttcgggtcatggagccagggtccagtgtggcagggcggggctgaagtgtcccgggacgcgttcggtgcacgcgcggctggtgtactccacgatggacgcgccgcgcgggcggaggagcgccgaggaggcgcgctccaccgcgcgctgcagctcggcctcgtcggtcttgtctgcctcgatggatagcagcacgctttggcggcgcacgaaccggaactgcggcgccgcgttgtggaaccccgtcacgcagaggacgtcaccgacgcggtatcggttcagcccagcgtaggtggtgaccaccacctcgtactccctcccgtcctccacgcgggcgagttccacgaggttgctcgcgtcgacggcctcgccgacggggaggaactcgaagtaggccgtgttgggcatgatggtgtaggacacctcggacgggccgcacaagggacggaggttgaggccgaagaagcactcggaggaagcatacatgccgctcacaatcggcaggccgccgctgtaatactgcagggtcgggatgtactgtgccatcacgccggtgacgacgacattcagacacttggtttttggccaaaggcgcgtgacaatgccggtccagtcgcccctggagcactctcggtcctgatgaactcggcaagctcagcgtccggccggaggataacggcgacagcctcgcgcacagacgggtcggtgacgcgggggttgagctctccggtctcgatgtccgccgcgagctgagcccagttgagctggaggaagcggatagcccggacgagcgcagcggcgaacacggcgcctacgcgcagcacgtcgtggcgctggcacaggccgcacaacatctgcgcgtacatgctctgtgacgcgtcctcgcagaggatggccgccattgggctcgtgtaggcgtaggccctcttgaagtgttcgcttttgtatacgctcgtcaaggcgggctgcgccgtgaggccgcctggtgttttcgtctccgatctggcgaacagaaagtagagccccttccccgtgtgaagcccaggcacgtacctatgaaatgagtgcaccattaactaccaaaagtacttctaggagggacatggaaacggtgaaagatctacaagaattgataatagagagtacaacaatatctaccactataccacaaattaaattcaaaaatcgatctacacattaataaatagaaaagaaaattttggatatgctcgggacgcaactcagcatcggacgcctgatgggagggggaaaaatcgggtgccgacgtcagcatgacgcatgcgtgcaaaaccactttaaactattttttctcttaaattatttattcaaatcatgatccgattgcactattaaattcgttgcatttaaatctttaaaacaagaccacacatggatatattctaacaattgttttttgcttattattgaactatttttaaatattgcacgctgttccaccaattatatcagaattgtttcctaagtagatcaaaaatgtttcaatcgtttaaatcgggcgttgtttcaccttatataaaaataatatttcagcaaatagcgaaagaatgtttcagtgcactgcaacatttgatccatacatagtgaaacattataagtacactaggtaaaatatttttggtagaacaaaaaatgaaacgaattcccttaatagagggtttccataatatgtgggtgatttgttgcaaaaaaaatttttaattcactgcaacattagatctatacatacatagtgaaacatttttggtggaacaaaaaatgaaacgaattcccttaatagagagtttctaaaatatgtggctaattttgttgcaatgacatgcgtgatgggacacgtggcgggagctgcggggggacacgtggagagaaggcgtgtgcggaggaggcgcccgtggggggggggggcgattttctccccccgatccggggcattgtccatatgcttgatatgtcttttttatttctcaaacgtaagggttgaaagttgattttttaggaagagtatatacatattgtatgaacattatcaaattattttacagggttttataattaactatatagatggtatcagaacatatgaggggataatgggacattatcccgaaagattaaaagagttttcccttctccgagtgtgtgctataatttttttaaactattgtttttggaactacctatatatttctcgataaattttctcttaaaaaattaacagatataactataatataattattgtgtaattatatcgtaacatgtatataacttgtacgcacctttcaaacattctatgataactagttgggcggcctgcacaattacgtggctagcatcaatttaatattatctattttttacacatgattttatttaaaattatcattcccgtgattctaataattttatagtttttaaaagccacgacagtcgctaccccttactcctttggcacctatttatttacttacttgatctaccactacttctattcgtcctctttagaactttaaaaattaggccctatagtttttaaagttcattgtcttgttgggtttcgttttcatagtttttagaagtatcatcaaacatagccaatttactactctgtggccagtccactgccacctctctttattgtcattgtgattttaaaaatcaaaaataattattgtctatttccttttttactttctataagtctcgccaaatcgttagtggcttcgccgctatactcctctacagcccacccgctgcctctcctccttattgttattgagattttaaaaatagaaaatgattatcattggggtttatttttactctccataagtcccgcaatcgtcgtggccatgcatgctgcttaacggcatgcccattttcactcctcttaattgtcattgggattctatttgagatcattttgtatagtttttagatatcccatcaaccactagcactctactcctttacatgcctattacttctcccctctttattgtcacttgtcatcgttgtgttctataaggaccttttttttaaagaaattggatatttttcatccttgaacacttataattatttttctatttttcaaatttattttatttgttatttcgaactttaattaattttgtcatgtgctctagattgtctcttatttcaatacttattattttttattacaaattttagttatttataaattgtattctagttgagctcttattttctttttctattttctgaatttattttatttttattttgaatgttaattaatctcgtattgtgttatatatagattattcttttaatatttttttattatttccaattttaattgtttcaaaattgtatattcctacttgaactcacttttttattttttttttatgattttggattttatttgattttttttattaatctcgtattaatatcttatacggactcttctttcaatattgcttatttttaatttcgaatttttgttatttttaaattgtatttctacgttaacttttcttttattttttttataatttcatattttattttatttttattctgaattttaattaatctcgtatttgattcttatatggactcttattttaatattctttatttttaattctgaatttcagttatttttaaattgtatttctacttggactcttttttttctagtttcagattttattttatttttattctgaattttgattaatcttgtattgggttcttatatgaactcttctttcaatattgcctatttttaattccagattttagctatttttaaattgtatttctacatggactcttcttttctttttctcctattaatgtgggaatttctaaccctcacagcgaacgtggtgcctactttcaaatatgttttaataatatagtagatagatagatatgatattttcgtgaaacggaggttgtgggatcgaatcccctcacgtatatatcagcacacgaattgtgaagcaaatctaacgattctaaattacatacatgttacatagtaattatatataaattacactacgactatattgtatttacctttaacaatttttttttaaaaataatttatcatcaaatatatagcaaccgataataaaaaaatgtttttatgtaataattcaaactttcaattgacggcggttaacttacacgttcaagacagatgtagcgagactgctcagcacctcgcggcgggccatctcatccgtgacgatgggcatcagcttgcgctcgccggccgaagtgccggagcttgtgaagaactcgatgatggggtgcgttgacaagatgggcgaacggtccccgttggcaatgcgcttgacgtacggcttcaggtcgtcgtacgacgccaccggcaccttggcccggaaggtggcgcggtcggtgtcgctggcgtcgaggccgcacttgtcgaggtactccgcatcggcgttgcggccgaggatctccgccaggacacgctcctgcacggcgtccacgttggaggtcagctcctcgatgagccggagattctcgacgtcgggctccttcgccgccgccatgagcgacgacgacaggctccgcgaggccgcgccgatggtcgagatgcctttcgctgccattggcagactggctccaccgaaacaattactacgagggagtggttgctagatcgagctcgtagcgtgcaagggacaggaaatgatgtgtgtttatgttgggtggcgtatttatgcttacgtactactagtaattcacaatgtaagttattctattatttttcacatttatattgattttaatgaatctaaataaatatatatgtctagatttattaacatcaatataaatgtggaaaatgttagaatgactcacattgtgaaacggagggagtacaaaattgcagctcacgcctcaagggcttccataagacggtacgatgtaacattttatatgacaacatgtgcaaagggtagtcatgatactcatagaagctacaaaacgttgacaaaatgacgttaattaatataagtagttgatatgctagtacttcttccgccctaaaatataagaatctagaaatagataagacatttcctactattatgaatttgaacagattcataatactattaaaaatatctcatctgttactaggtttttatattttactttatttcatgttatgagacgttttgacttctgttttaagtttgaccaagtttataggaaaaagtagttacatttttaactcaagacaaatttattatgaaaatatatttaattattaatttgatgaaactaatttagtattataaatattattgcatctgtctataaacttagttaaacttaaaacagtttgactttaatcagagtcttacaacctgaaacggagtaacggagttagtaggatggatggagtactaaacaagctcaagtgcccatagatcagatgtttttttttctaggggcagtgatctaagggtgtgttcagttcacactaaaattataagtttggttgcaattggaacgatgtgatggaagagttagaaatttgtgtgtaggaaagttttgatgtgataaaaaagttgaaagttttaagaaagtttgaaactaaacacggcgtaacatggctgatctgcgaataagagacgcgttgcgaagtggaataattacgtggaattgtgttttttttttaaacggcaagggcccagactagggccttgaaagatctggatggatgttgcaaaagtgatacagtaggagttttacagcagggtcctcagagaaatataaattacaaacaaaccctcaaaaagagaaaaaaccttagagcctattcagattgatgacattttcaatcatatcattatttagtaaaattgataattatgtggttacgtttagtttgttaccaaatattggcaatatgtatagaattttgacaacattattaagccaatcctaccaaaattttggcaatgttgctaatttgttaaaattttggcattgccaaattttgttaaggtttattttagcacccatcagaacagacccttttagggcccctttgatttgtaagaaaagtgtaggaaatttgaaggatttcaatcctataaaaaaatttcctatgaaaccttttgaaacaaatgattgaatcctatactatcctttaaaattcctatgaaatggataatcctatagagattttggaggaaagttagcaagaggtccaacctcatagaaaaattcctttgagtctatctctctcatccgattcctatgtttttcatgtggtccaatcaaacggtcattcatgtgtttttcctatattttctaatcctatgttttacacctgcattcctgtcagaatcctgcgtttttttctattcctccgtttttctattcctgcgattcaaaggggccttaaagatatgataaaaagcaattgggtccttgtaccaccatcggccgagctattttcggtgacgctggcgagccttcatggatgaagtggaaaagcaccttgagctcgtcagtcttgcacagctcaaattgcagggcctccaatcggtggaggtttgcttttgattttgccggaggtatgaagaacggccggctcaaccttacagatgatgtcgccggaagtagaagaaatggccgacgctgacctcctagaacttgcgttagaaatttgaggatggagtgatgaaactcaatttcgacataatctttttccagattctattcttgccatgggttcacgaacaagagctggcttacccaacacaaaggccaccacaggcagtttattccaagggcacaaagcataccatggccgctgacgtcggagtaaatcgaagccaccagcccaccaccaccaagggcaggatggacgccggagcttggaccaaagtagctttactaaaacacgccataacgacgactacgagactaacccaactatgctaatacttaatacgggcggagctagacacccccccccccctcccccacccccggccggagacggaagggagggggccagaacggtggaggagtttttactctcagtcgctggagctttcgcgagcgaggcgttgtttggttctaaactttttcttcaaacttctaatttttttatcacatcaaaacttttctatacacataaacttttaacttttccatcgcatcgttccaatttcaacgaaacttctaattttgacgtgaactaaagacaccccaagcccgcatggaagtagctgttcccggaacgatagctcgtgaggttttattcgtgcagattgatagtactattaaataattttataaatttacttgtatatttggatgagttaatattgctaattatctgctctaaaagatttcgcatgtcaagtgatattatacaatattaaaatcggctctttaccagtttaccagaagtacatagtgtttgtttggtgggattatattactctagtaattataattagcatgaatgatttggttggctagaaaggctgcacaagttgattggcaattaatggatactaaaattgaacagccatcgataagataccaaaaatctaggtactttagttgatggacccatattctattttatctcatagacattattttttctttagtttataaaaaaatagattttgtgatgtacaaaaatctgtagaatattagtcatgtatttttttaatttaatatatcttaagcgatatatattgtaatatcttttttatatcacttagcaaaataacatttttgaaatggcattttagaacatatcatatttgggtggtgagtcgatattcatcttgatatattttctatacatagactataacaaaaaaatattttagaatgtaacatatattttctatatagactatgaaaaagcgatatatcattttgtatcatttttggaatgtcattttcacaaatatcatattttggcggtgagtggacattgatcttgatatattttctatatagactataaaaaatatatattttagaatgtaacatatatatgtgtaaaatatcagacatgtgatttttttttaattttaatacaatgccaagtgatataacccatttatatagccgatagacacgatgactaactgataaaaactgaaagtactttagcgattaattgaagtattaattattacaaatttaaaaaataaatttattttatttataaaaaacttctatatagaaaatttttatagttcgggaacgtgcgcacattaaactagagatttttttcaaccaaaactcaagctgtgtttagatctaaagtttggatccaaacttcagtcctttttcatcacatcaacctctcatacacacacaacttttcagttacatcatcttcaatttcaaccaaaatccaaactttatgctgaactaaacacagcctcagtcttaccgacatattactaacatttggcttatccaaaagtcgatagatcacaagcatgcccatgtgtgacgttggcttggctaaaagaattgattacagagatgctcctgtagagagactttcgtgtcaggatgtgacacttggactctgggagggcatagcacaacacaactttctgggagggcagagcacaacacaacttgtagtaccaagcaaacaacttggtgataatgaaacggagtaggtgcatctcggttgcattaggaacaatagcttggtggttgcggattgagggatacaaatcaaatccgacatatatttgagagagttaacgtgaacttattccttacctaaatcaagtatacaattggtcacagggaatctaaacatcatgcatccatgcatcgattttttgttactccttcccgtctcaaaatatatatactttggtggtgttcttttatcctaaagatgaagattaagttttttacgcaaaacgagatggtattaatgtatgattgattgagttttaattattacaaacttaaaaaatatattaatattatattttagagcaactttcatatagaaagtttttacacgaaaagcaccgtttagtagtttaaaaaacatgccacgaaaatcttaatcttaa

SEQ ID NO: 1697 - DNA, 29798 bp, Oryza sativa
  unsure (1)..(29798): unsure at all n locations
tgggccccaccattttaaaattattattttgtgcagctgacatgtggggccattctttttattatttttccggggagaaaattgccacgtaagcgctacttcaatgccacgtgggacggaggcctagtcaaacaagccacgtatgcgccacgtcagccaaaaccgccgagggaccatgtttgcccggttttcgtaagttgggggatgggtcgtacccggttttacggtcaagggacgaaaatcggactaggtgacaaattgagggacccaaagtaaacttattcctttatataaagaaatactttgaccattaatttattttatgttgtattatgtgattaccaacttagtatcacatgaaagtattttagaatataaatatgaagtataataatatgatatgcataataattatcatagatattcatagatattggtaatataattattagtaaaaaatgttgagtttgatttttttttaaaaaaaagggtgccctcttatttggtacagagggagtattaatttaacagtttgaaataagaaaaatattattactaaggtttatctcacataaactcttcttttagtttaaatcattacaacttagatcccacctatataggtaggtatatttttattagctttttctcatactcttactataatatagcgggtgcatatatttttattagccttttctcatattaatatggatttcctaggagtccttattactttggggctaatataccaagggatctcgtctcctatcggtatcagatctgatactctatatgtgtctgtcggtattcgtcatggaacaagccgatacctgttggtatcagccaccgtgtatcacgtttcatatcggagctaagagggggaagaagaagattcaaaactgttgaggacgagcaacctggaagggcttccttccttggcacttggcaacaacaatgatcggtggtggtctccatcaacaacgatggcaccggcactcccccctgtcccttgttagcaggcacgccctgctatcaccggtgaaccctacacagttagcaacgatgttagaggagaagcaactgctcaaagggaacgcggaccatacgaagcgccatgcgaacaggtgagaagcaccatgggaagtggacaacacgacgtcatatggatgatgggatcccatccaaatgatagggacgagatcatggtagttcgtatttccacattactttactcggtttttcccttaggctttgtttggtttggacgggattacagaagattggagagaattaagaccatgttcagttaatcctcgagagagattgggagttattccttctcaatccacttcaattccttccaaaccgaacaaggttttaaaggggaataataccatgttataacacatgtgaaataaattccctccaatccctcccactttaggccttgttcggttaatccctgtgagggagggattggagagaatttattccacacctattgtggtttggaattatttcccatcaatcctcttcaattctctctaaaccaaacaatgccaaggatttacccaaaataaccttattagaaagaagttagaagcagagacataatcggagatgggtctatttggtagagctccaactcctaaatttagcttcagcagttgggtctggagtggagttgtggagcttcataaacccaccttcacctctctaattcattttgtgagagagcttcacccaactccgctcctgcttaaggtggagctgaaactgtttggctgaacttcagctccagaaaagatggagctgaaactgtagctgtgccaaacaggcctgtaatccagtagcgggcgtaacgtaacccggaccgactcgactaaagcaacggcctcttcgcagtacacgtatagcgtgggccggctcgaccgcacgtccgcacccaaccgcgagctcgatcgagttcaggagcaccagaacaaccaagaaatcacattttggcccactccacccaccgctgtagtacacgagctttcgctttggcctcgccgacgaccgcacggtggtgatccacaacacaagtttcctcgccgtcgccaagcccggcgacaagtgctggacggcggtcgacctcagcgatcatctccggccgatcatgtcgttcgcgggccccttctatgccgtcaccactcaccagcgatgccatcatggtggtggaggtcagccgggagaaccagacgccgcagctggtggaggccgccgcgacctgacattgcaacacaggttcagcaggatgctcggcagcgcgcacctggtggacaacaatggcgagctgttgctagtgcaccgtaccctaagtggtgacaagaggttgtaccaggcgtaccgagtggatttggatgggaggaagatggtgcctgtccgtggtctcggtggtcgggccgtgttcatcggccatgactgctcgctgtccgtgtccccagccacattccctccatcgttggtgacgccgtctacccgggcttcggctgtggggatagaactggccgggagcacatcgaaacctatgataacctggcagatggaaccattgaacactcattctatgaaaacagcgaaaaggattgggaacaccctttgagtatcgccgattatggctgtgtttagttcacactggaagtttggttgaaattggtacgatgtaataaaaaagtgtgtgtatgaaaggtttgatgtgatggaaagttggaagtttgaaaaaaaactttagaactaaatagagcctatatatccttgtgggtgtgaaagtctggttgcaaactcagatgcaagcagcacccgtgagtcacgcgcgcgcgcgccctgaactgcctagccgcgtaccgccgctctgagtggggaaatcgtgtggattaggtaggttagggtttgggccactggaatatatacctctctgatttatgggtcaaataggccaagagaatagaaaagacattatattactggtccaaatttagtagtgtgtatataatacagggtcgggcatgagttatctatggataaaaattaaaacccagctactacccattacttcttcgggtttcggacgggcatgcccatgggcaaaaaaacagacccacacccaaacccatcgggccaggtatccacggatacccggacccgtgggtaaaattgccaaccctacccgtgacaaaattgtctttcagggtaattgcccctaaatactactgggaacacctcagcataaaatgtcacaacccacttcagtgctgttgtacaagcattccaatttctgcgtcactttctgactttctaccattgcctacatttatttagatattaatgaatctagacatatgcatgtgtttaaattcattaacatctatatgtatataggcaatgctagaaagttttacattgtaaaatacattgtgaaatggagcgggtaggaagagtattagtcgtcaggtacagtggcaaattaagcaaaaccgttgaagggaaaacgtgttcacgaaaatacagccaagatagaagtcgtcataatgaaaaaaaaaactagaaacatcttaggtttctgcgccatttccaaacaaaatatcatgtcgataactcgagaatcctgtcttattgaaaagagacaagtgagcctcaggtaggccatcttcacaccgaagataagcaagaggaaaggctagggtaaaaggaagatttgagtagttccgcggccagcaatgcggctctacaaaggaattgctcgctgttgcccacgagcaccaaaaagttttccaatgtttctctactgtaccatttgctctccctattctaacattccgcgttgcttgaaaatttcgaacatagttgaaccaatcttcgctggtgactcaacaacagtaaccccagcctctctgagagccttgattttgtcttgtgccgtacccttgccccctgacacaattgctgccataagagaagagtgaaagtagattagtacatgcaatagctgaacttgatttaaaacgacaaaagagaatgtatatcaacaaacattttttatggaaaaattgggattcatatcctgtcatacataatgttaaccatgttttaggagtaggaatcaaactttgctgaccgctaccatagtacttgatcatggtgtcatacataatgttaaccacgttataggagatggaaggcaaaggcacgatagaatccgatgcaactaaaaatctggtccaaaaccaccggtttcgaactgtataaatgtccatactggttggaagaatgaagtatgcatttctcatatattactgatcgtgaaccaataccacattcgacccagtgaatctttcatagtaaaatctgtggaattttagtatttctttacttatcagtatttgctaataatcataaaatgtagtctagcgacagtaagagtcccaggagcatttgtttcaactcaagattgtacaattgattgaatggagaaaagaatatgcataatccagaaaagcatgaatcacaaaagaaaaatcaaataaaaaaaacttattaagtgaatacctccagcatgacccatgcgacgcccaggtggagcagtgagtccagctatgaatgcaacaacaggcttttgtgttttgctctcctgaaataattgcatgtcaacttcagtaagttgatatgttattgctcatctaatattaaaacacataaaaatgtaagtttcagcaatcatgcaactggacacacacaatagtattagcaatgattgacttcatctgtcactttagtacctggacatgtacagtcctcgagtcatttcatatcataacaaaaagttgaaaactgaatttgttgcatttatcataagacagcaagaccgcttgagtttattgaaagttgaaaccgaactattgtgaataactttaatagtgacaaaggttaataggacatgtacataagaggttatccaaattactattgatagccgaaatcctgattcccaacaaacaaacctgaatgaaggctgcagcatcctcctcagcagtacctccaatttctccgatgagaacaatacctaataggcacagggaaacagttaccaatgatattcattctgtcacccacctagtagtaatgatactgcctaactccgtgactctagtaaacaattgttagaaacctcagtcccttaactaattaatatgtgggatttcaagataaagaaaattgtaaaaagcaggagctctgttttccatatacaatccattttgcttatcctgataaattcaactaagtcagagcaaacaattgtgaaaaatcactaggttggcatatacagggtaactgatggtatacaatgaaaatcaagattaagcctgtccaataaattattgtcaaatacaaaagcaagtagaatattgaacttaaaactaaacatgcagatctaactgagaggctagaggtaaagcagaacatagcaaactaaggacaatttgaattaatattgtgcaacctcagtcagccagtcacagacagggtacctttgtctgaggatcatcaacaaacttttcaaggccatcaacaaaatttgggccaatgaaagggatcaccaccaatgccaacacacgttgactgccccaagcctacggctgttgtttgaaacacctgccagtgaagaaagaaatacaccttaggcaaatgttttcacagattgttagccacactaaaattgatgtgcatnnnnnnnnnnnnnnnnnnnnnnnnnnnnnnnnnnnnnnnnnnnnnnnnnnnnnnnnnnnnnnnnnnnnnnnnnnnnnnnnnnnnnnnnnnnnnnnnnncttaatgataccagggcaatttggtccaatcaaccgagtttttgattgcttgttcagagcagccttcactttcacctgaaagttacaaagaaacatttaaatgggtcacctcattaatttcctttgacaaaaggcaagtaaaaatagaactgagataatctaaaatataggaaagagtaaagaacgaccaactatgaaacagcatgattgataacactgttttaaggaaaaacagattaccagctcaaaagattattgacaccactgcaattgaactgatcggtggtcatgctgaaactaatggcagctaaaatctcttatttatatgtgtcgtgtgtacagccacttgaataaagtgaaaataatcacgtatgttatttccaatggtctcactatttttttttctagcttctgtgtacaattatgatgaagagaaaacatttgggaatcatcatgcacggaaagaaacatcatattaatggcatgctgaaattgttgtaaattaccatgtcatgctgaggtatcccttcggtaatgcagacaacaaggtcaagttcggcctccatcgcttccattattgcagcagcagcaaatggtggtggaacatatataacagatgcattcgcctttgtctcagccttagcttctgccacagagttgaacaccggaaggcctaggtgctcggttccacctttcttaggggtaaccccacctacctgttattgtgagaagtacttcaattaaatagggtaaaaaaagtacacgacaagctaatcagtcaaattacttttgtttccataaatcaaaattgtaacactaactaaagcattgcagaaacaagtaaacaatgataattaaatagggtaaaaaaaagtacacgacaagctaatcaatcaaattacttttgtttccagaaatcaaaattgtaacacctaactgaagcattgcagaaacaagtaaacaatgataagacatgccatttctttgttgaattgcattcaaaaccaaactagtgctataccatgtaaaaataatcatattttaacaatttcagtgtcaaccttgtgagctgttagaacataatgaaattataacatacaatctgacaagcaccacactgaggttgtcagaaccctctagctggtgcgagacctttatgtaatgagatcttactacattccgtaagcacagaacactatctaatgtacatagcaaacaaaccacaagcaaaacatgccttggtgtatccatccaactctttgaagaatgataagatcttaaattcttaatacaaaagatctactttggtcggattttccaagacagcttacaaggtttcaatgtgtgcagaaagtactactcagtgtacctagcaaccaaaccacaacaagcaacacatgcttcggtgcatccatatgacatttgttcctcatgcaattttccaagagcatcttaaaatgtctcaaagcattcatgatggtatttgtttctcatgctaatatgctgttttagatcaaccagttcctagatttacaaagcatcaagaaattcataaaaacttagtttacttaaggatttttttccctcatcagtaatttgttttccatgcgtaatcactagattgcagtgaaaaacatcactagagccataaaattactagataatatgaacagagtcgtcattactgaagcaccatcaccattcagatttattgagacgtggcaacgaatcatagctttttagccatttcacataacttcgggcaaccaaccccatacggagggaatttatggtagcacatttcaactccaagataaccccagttcggtgtatggcgcaaacaccgttcttctctttccgattgtgaatccagccataaacatagcacctggctggaaaccaaaccctaaaatccgagaaaatgggggatcggcgaccacgcatctacgagatcgcacgccatcggacaccggctctccctcaaaccctaaaatcacgccgccacatggaacgaaatgcggggatcgaagaggacaaacccgagccgaccggggccgcggggatgtgggggaccgggacgtaccatggtggtgccgtactcgatggcctgctcggtgtggaaggtgccgttcttcccggtgatgccctggcagatcacgcgggtgctcttgtccacgacaccgccggcgacggcgcggccgcggccgccgccgcgaagccccgcgcgtggaggaggcgggaggccgcggatcccagcagctgggacgcgcggcgggcggaggcggccatggtgggtggctggtggtggcagcggcgggcggcggcggcggcgcgtgccccttttctcctctcgattcgatttcgtttggggtttttgggcgagtgcgctcctcctccgtttttgtttacttttctggggtctcctcgcgatccattcttgcaggggaagttgggtggtcaaactttccacctagacccttgtatttgtcgctattatcgtgatgataaaaatatagaactccaaattatgctttttctgattgttattgtatttttttttctcattggaaaataataaggaatatactccctccgtttcaaaatgtttaacatcgttgactttttagcacatgtttaaccgttcgtcttattaaaaaaatttgtgaaatatgtaaaactatatgtgtacatgaaagtatatttaacaataaatcaaatgatatgaaaaaaataaataattacttaatttttttgaataagacgaatggtcaaacatgtactaaaaaatcaacggtgttaaacattttgaaacgggggagtatatgagagacatggaagtcaattgtaaagcccatacaaggatgtttcctccctcacaaagaccaaaaagaaaaggaatcttcctctctcccttagtccctctacttcattttccttcaaatttattattcctacccagatatgagttgtcatattccaaagtctcgatataatgcctttccatcattccatggggttgtcaatgtatgacctaccaagaagtttgaggtttttcaatcttcttgtaattcgttggatcaaattacacctaacctgacatgtaattcacgatatttctttttttttccttctaatgatttggtggtaaagtcataggtatctcctagcgatgaaaataatgtggaaatttttcgaccatgccaatactatttttgtaaaaaaaattggtatcatttcttacttttttttctataaaatttagcttttcatcttcatcatattaaagttgccattacttaaattcataaatatagaaaaaattccaacgataccatttccataaaaataataaaaaataatattgtttccgaccatttccattcctacctccaggggcggatccaacatggatgttgggaggactcaacagggggcggagctaaaacgaaatgaaatgagtgccacttgcttaatttactctactttagatcgaatttaagctaatacggatgtctaagtttcatgaccagattccttggcaccccgtaatatactctgcctttgtccatggacccaagttaccctaccctactagatcaccgttgatagaaggatagaggaaggggggaagaggaggaagagaaggggggagggagtgctgaagaaggaaaaaggggatgagtcccccccccccccctcccccctaatcttatcatggatccacccctgcctacctcctcttatgaaactaagaaataagggtacggtgtcactgattgtgcaaaggttaattaggtagattgaaatgaatcaatggaaacccatgcttggcttgcctgtatgtccctaccttctcaatctgaatcaagaggataaaaaacttctgaatatcatattgaactggttgaggcctgagggagaaatcagtgcgtttgttttaacgctctcataattttgaccacgacgagacgatgaaacctaccgattaatcaaatcagtcgtgtgtaaacagcttctaactatgttttgcactaaagctgcattcgctggtctcacttctacttcttctacggttttctttaccctgtcgctgcaaactgcctctgaacactgaacccgtgcatgaatcatgatctcatcaacattactgagcctactactacggtactactctgctacataaatcacaactctgattcagtgatgaagagaacttcacttctaaaagagtatcaacttgttttttacatcggttacatcatagtacaggtacacaatcaacaaggcatgcagtgctccatccacaattacatcccaatacaccaccaccattcacagcctactccgatcccaaaaaagagaggtaagtcgcgtcgacgaacagtcttttcatcttcctccattggcagccattgctaacactccaacacctgaagaactcctcatttgggggtgaaggcctgaaattcacacacaaacatcaccaaattagtgactgaatcaatgtggtatctctgatgagatattcaggttgcaggagaggtgcgtataggaaactgaaactcttttaatcactcgggtgaacgtccactcgtttattacacgtcaactaaatggttataaaaaattttaacaagataaactaatatgcaatagtgtttatggactacggacctggaagatggtggcgtggccggggtcggcgagatgggcgaagaggttgtcgatggggccggtgccggtgtactctgcctggaaccaagctcccatgacggcgagcatggcgagccgcccgttcttgatctccttggtgcgcagctccttgatcttctccggcgagccggtgccccagccgagcgggtcaaaccacagaccaccagggtacctgaacattacgtttccaacacacgaacacgtatttcagccacttgaattacgtcttcgaacaagctcgtgacacacttccatggtgtcagtgagtcggtgtgtgttacccgacgtcggtgccggtgagcttgttgttggggaagatggggtcggtgttgacgcagccgggcttgatgatgtcagcccaccggcggccctcggcccagccgatgaggatgagctcgatgatgaagagggtggtggtgtcggtgaagtattgctgctcgccggcggtgtaccacgacggcgtgttgaggatgccgatcttggtcaggaactccgggatgaagatgcccgccgcgcccagcatcgcccaccggcagtgcaccagctccgcctgcacgttccaccgcaagctctccgggtccgatcctgcgtgtgtgcatgtacacatatgtcagtacgcatgtccagaggcggcggcggcgtcgccggcgacgagctaggaagaagatgagggctcaccgagacccagggggtcgaagccgaagtcgccggggaggctgcgccaagatcaatggcaagtatacgatgtcagtagagagcgagagtgtgtgtgaacgcgtcgagcaagagaggtaagatggatataccgacctgccgtcgagccacggcggcggggtgctgccggggaaccagattggcctgtcgggcgccgcggcgcgcacggcgaacgacgcccgcgcggacgacgactcggcctgcctcagcagcagcctgccgctcctgccggcgccgccgaggaaggaggaggccctggcggcgccggggagcgccgcgacggcggtggtggaggaggaggcggagacgagcgccattggtgcgtcgtgtcgtgtgcgcgtgtggtgatcgaggagacggcgcgtgtggtgaggggcggtttaagggatctgcacgcgcgggaagcgtagctgggatgggcggcttatccgcgaggggatagcgagcgcggccgcgtcgcgccacgcggcgccgggaatccaatcctttggctccgggtcacgctgacgtggcgggatcccaccgggctggtggggcccgataaaaatcagggcgaggcatgccattggacgacacgcgagctccacatttttggcacatgactcgctcgctcgctactcgctacgtgagtggtgagttgcagcagttgcatgtaacgcagtgtcctaaccaaagaaagttctttctatcaagatataatctattcattttatattataatatgttttgattttttaagtgaaacatcaaactttaagcaagttttaaaaaagaatacgtagcaacatttttaacactaaacaaatataatatgattatactatgagaggtccagattagttatactggatgataaaccctgagttccactcgaaactaaagttgttgttggcccaatctttcagtgagttgagataattacgatttgaaaaaaaatattgacgatctgattacaaccgtacaagacgttgcgttgcaccttagcgatcgatacacctctccgtgggttgttgatcttgccgatgcaaatcaaccttattcatgtaagcaaatcgaagaaacaagtaagaataagataaaatcaatatgatattgcaaataggaattaaatacacactataagctaaggttctaaagacaagcagacggacagtctagccgacacgcgcgctgcaagcaagtagcaatggctaaactttgatctaacaaaacccgagaaaccctgaagggtacctagctatttaaggaggtggaagaacgaccatgagggtattagggttgtgctccaccagattggggcgcaccccacatgggctccacatgggccggggtcccagacgaagttccaagcccataggcccactacaggtgacacaacacattgtttcctcaattgcggatgattggaatggaatttggcaatgaagctagatccgttggaaagaggactccgagatctttcgatcaagtactcacgggccgaaaataaagttcgtatgtatatttggcggccctttgaagttagtaatttagtaggtgaccgaatcgaattctagcacttagaggacttgatctttgtcttcttgctgatccatatgatgttagcaatgtttgtagcagtggtacccatggtcacatcactggattatgtcgaatctagtattatatattttaggaccaaggacgtatagaattacgaccttgttagaaaatggattacgcgcctatgctaggtgcgattgagaaatgaaaataagtgtatggttatgattaaatgtggtgaaagaatgaatggttaggattaaactttaccctacggtggataggaaatcttttcctaaacctatttgccaagtgagaccacacgactaatggttaacactagttcaatatataaattcttggcgggaaaaatatcatatattgtatcgtataaatgtcgctacaacacaacgacgtcatgtaattcttctaggttaagggacgtaattttaagagtaagagatactatgtaaatactctcttagataaaaaaagtatcatgacatttgagttttttatagtctttaaggtgtgactttaatcataacattctgtataggtttgtaaactctaatccttttattagttttcctttttgtgaaatacaataaagatgtattccagaggactttgttattgatgggtacatcatatatcactgaaaaaattagccgtgaatatgaacatcctgaacaagtctaagacttcaaccaaaatgggcaggttatactaccatgaacctaatcggtttaattatgctcacttcactaagtttattaggttatgaaagtaacttttcatcaaaaatctacacttaccattttttattttgaaactaagtttttttttagtatttgttgataatcaaagtcttgcaagtttttttaagaaaaaaaaatcaaacatcacgtatatttttttatcgaatagaggaacaagatcctatgagtctggtctggtttactccctccgacccgaaaaaagtaaatctaaaactatatgtgacatatcctagtacaacgaatctggacagaggtatatctaaattcgtagtactaggatatgtcacatccagtactatgttggttttttatggaacgtggagtattttaagagtcgtatgtgtctactctcggaatataatgttcctgaggacttctaaaaagctactagtattaagtatgactattacatctaacaacctatccatatttttcacaattacacatatataatttttgctccaagttccctttcagaggcactttgtcctttctggcaggatgtcttctcaactcataaatcaataaatcgatgtcagtgggacatatatatattttctagtactactgccctggttagttccaaagttttttttccaaactttcaactttccatcacatcaaacctttcatacaaacacaatttttctatcacatcgtaccaatttcaaccaaacttccaaacttcagtgtgaattaaacacaacctatattttaagttctacagatactactgttctgtccaagttcttttttaaagccactgtttttgcggttttgccatatattatatattttaagtagagactactgtttctacagagacttagtatattttaagttctacagagactactgtttttgccctttcgacaggttttgctctatgtcagttgatatactcaatattaaaagagaaattaaaatctcacccatagaaattaaaagaaatgtgaagccatatgctttgaaaagaacacctgccttgcaaacccaacgcaactgcaaaaggcgacagcatcaaaaaccgtgacagatcatcaaaagagcagaaatatgtgatgaagtacatacttgttggcatgttgcatcctcaatcaagagcacctcacaaacatcacaaactcaatttttttttcactaacgtgcactctcaacattcatcatgcatacaccaaattgaaaaggggacgtgactctcaaaaagatggaaagggagcgtgcaccaacaccatctctgaccagagagtgtcggtagaactgggcaattccctcgtgttcatacttcgtgtagtaactttgcagaggatgcattcaaagcgcgtgaactagctagactctgatgtttatctggtacatcattgagtaattacattgctgagcaaatgccataaaacaactcagataatacagcaaatggatgataccctactagttgatcaagattattcgttcaggtagatggttatccttgctctagagtttcttggcagattctgcacatctgaaactatcctccaaaaccatgtttttgcattaggtgcattattatactgagatgtgctgattctactagggaactctgatgcatgcatgtactcacttgattagaaaggtttgttcttcttggagccatgcttggccttgaccatctggttcagtgccttcacgcaacggcgaatcactcccatcgacttcttccccccgtctgggcgctttatcaccatggccaacgtcgcgccaccagcagccggaggcacgggaagtttatgatcagcaataatggctttctccccatttccgagcttgctggtggctttggcttctccgacgatgaggagctgcttctcttgaatcagatcctgaagggagaaccggggcacgtcgtcggcgaacggcggcgtgatcggcttcttcacagttttgcgttgctcctgggccttctgcttcgtgtcttggcattgctgctgtgcctcgagtgacttgtgctcttcattgtgatacttctctgatgtcttctcttcttcgcattgttcagctgtcttctgctccccatcttggtattgccctgtagtgttgtcttcatcttcgtattgatttggcgccttctcctcatcttgacattgctgcaatgtcttctgatcctcatcaagatattgctttggtgttttctcctcttcgtcttgatcctggaacagtttctcctgctcttcatctagataatgatgaagtttcttctccggttcttcatccagatgatcctgaagtttcttctcctgctcttcatctagataatgatgaagtttcttctccggttcttcatccaaatgatcctgaagtttcttctcatgctcttcatctagataatggtgaagtttctcctcctgctcatcacggtgttgattcagtgtctcctgtgcatcaacttcgcattgcagtggtgcctgtagaatcctcaactcctgatcttcatatggacatggtggctgcagctctgtatcctggcactggaacaatgtcttcagcttggcatcttgacgtagctgctgcacaaggggctgcacctgttgatcttgataacaagtgatgagacttgttgatcttcgtgtccgcctcgacatgccaagatcgaagcggcgagatttgttcacatcacactcggtggccattgtcagtggtatgaggagaaagatcaccaaaggagcaacttgcttcttctcaggggtggagttgttataggttgcctgatgtgattagtagatgcatagttcgtactgagaataggtgagctggtaaaatgtccatttcagaggtaatgtctggtttggtcatttggaagatcagtgcctgtcctagtaccctttaacccctacatgaagtgaaattaaagttagtatcagcagacaaagtgatcaatattctgccacaagcccacaaccatctagaatatttgttctgcaataagattttaatacatcaaaatttattttgcaagatgacaatatatattaatcacgcggcataacgaattgtaggaagtagggacaaagttctgaaataaagaaatttctgtgcattttaagctattcccaactacctaagagctgagaaccagcaatatttggtttcaagcaaaagatttgactgacacgtcttcacatactttgactgcaatgttaatctaaagctttattttgaatatatcactgacacctcagataagaggtaatgcccacttgcccaggtccaataaatagcatttcagaaacttactcgtaggttggacgaactgattctaaacaaataccttgataagtacaataccattgaagccaattctgccacctaaaagctaacaacataataattgtctaatataaaatgcacaggtacatcttatgtcacagtcaacctaaacaaagtattgatcttttcccaacattgtacatctcagggtacaccaaatatattcatttacggagttagtgatcttgcttagctgcagatggaactccctatcttgcaaacctcatcgtccactccgcagctatttcatcatgcttagttctatcagtcaagtataaatgtccaatgctcggcacaagtgggcagtctgcacggaaaaaacaatcataatatgaagttatcaagatgaaatgaagcaaaaattatgtgtatattacatagtttaaacaggactgcatgttttatcatggaagatagtgcagaaacagaacaattgtgatcatactgtaacttggaacttacatggatctgggtttgttatgatggctttaatggcaagtagcacctttgaaatagttaaagcaggactccatccttcccttaaaatgtccatactcaagttaccagtggagtcaacattgcagtgataaatccttgtcttgaaagttacctagcacagtgacagaacagttataacttgtaaccacgaattgaggtcccctaataccgaaatatcggataaaattacagcagtggatctcaattgtttcatacttctatataaacattgaaattgctgttccttcaatattgaaattttagcatgttcaactggaagagtgtattaccttccatattattaattactgaaacatcaaatcaagccacaattgccagcccatgtgtatttcctctgtattatgagtgtgctatccactctacaaaaacttgagaaattcacttactattgccaaattatatggagtgtagcattagcagaattaatatgattgccatgttggactgtattgatgtttgcatggttccatgtgctggttaaggtaaaaggtagaccactgcagggctgtgtgttaggtcaaatcagtcctagcattgccctaggcttccagcactgctatctagagaatgggggagaattccagatgctccatcaaatactgaagagcagaaatggaggttggttgttcggatccttcatatcctacctcccatcaaggaattataagttgatggtaatagctgggcaaagacagtaacagtcttactgtcttagcaaccaacaaaccatgaagcaggtgatcatgtagggctgtgtaggctacagccagcaggtgtatactgattagtcaatgtcaacactaaatggaccaaaaatctgcatttagaaggctcatttttttaccagactactatgcaaatagtatattgacataggatgaaggtgatgcccaagcacattaggcttccaatggacaaaacctttctctgtaaaattttaacacagcactatcaaccaaaacaggggatgtctaggaaaacaacattttagaaactctgcgcagttattttcttgaacactaagcataaaacagacttcagataagttttcttcataaataatcaagatcatattgaaaagaggtaaatggtgcttaccttaaaaagaacgcaggtcgctttaattaataacaaaataaactagctttaacataatctcttttgttatctatgcccttctaatcatcacactgtttgctgagttagcccttgaacagaagcattccttgtccccaaaaagattcatgagatattccattttaggatgaatcttaatccttgcagacaactcgacacattttcaaaccccttccaggctaaaatgcatagatcatacacttattttgaagaaactaaaagaagtccggtgaaggtagacttttgaaacaaaataccctatgcatttactaaacataccaatgttcatcacttttgtaataccctgttcacatagtgaagtagaactagctatacaacaatattatcccaaccaattatccatcctatttgaatttctattccacttcttcaagattttagacatgcgcatgtctcttaaaaacatttctttggatgcaagcatttcccatgttaccttaaccacacttccacgcggtaaatcaatagtcgtctatcaatagttactgaagggaatgccatatttattctagatatttgttccaataacagcgatatgatcactcatgaatcacagcattaggtagaatgcacacagacaaggagagaaaatgtcaagttacaacttaagcttctatatgatctcgtagaaagccagacacctcataaccaacagcccatttaagcaaacagaaaaaaaaaaaagaagctaattcttagttcttaccatgggaggtttaaacggatagtcaattgggaatacaatatcgaggaaaaatatccctccttcatacggagatcctacaagatgagcactgcattagatcagcaaagtgaaggtggtcataagactagttcactctacactccacaccctaattccaaacttgaaaaaaaaaaaaccgcgatttcaactagtgaaattcgcagagccgcagtaaaattcgcacgagctttatcggctgctgctagcaggggggagtaagcggagagggggaagggcgatgataccctgaggtccgatgatggtggagagccagtggtagaggttgtcgcccttagggccggcggagcagtcggaggcgttgaggtccatcagctccttctgaatccgcttccccgacgacgacaccgacgtgccgccgctggagccccaggggcgcacgccgctccatcttccacccccacctccgccgccggagccccctcctcctcctcctcagcccccgatggtgccggcgccggcgccggcggggaaaggggagcgagaggtcgggaaggaggaggaagacgacgacatggcctcgacggctggcttacgacttggccttgggggtgagggggagcggcgccgccggcggtggtggggggatggagagcgacgccggagtggggggagagcggcggagaggggaaaggttagagggagtgacgggacgatgaggggaggtgcgaatttatttatttatttttcataattgttgtgatgttcagtgtaaaatactactccctccatttcacaacataagtcattctagcatttctcatattcatattgatgtctgtttcacaatataagtcattctagcatttctcacattcacattgtgaaacggaggtgaaacggaggaagtaattgcatttcaatataaattactctatccatcttaaaaaccaaactagaggagaatttgcaacatatgttcagaaattttatgtggagttaaatcgccacctacagtggtttttttagacgggagtacaaaatatgaaaactaaaatttgagagaaactgatttgagacgtgcttttattctgcgtgacagcctgatagctccacatatactcttataaatccatttttgctgttccagtattgccagtaataatgggccaaaagcgaccaagtactcaaattttaaactgaccacacataaatccaaccctgaaaaaccataaataaatttcggtgccatgtaactgtaacatatggactgctttagaacgtagaaatttttatgtaggacttaattcttcattgtacaaaccaggccagacatttttgcatctgctgcatgagaccaaaaaaaaaacttaacaaacatgtagtactcaacaagagtataaatttagaagaaaaaaaatattagtgagtctgagagaaaaacactgttactcaacaagagtgacagtttcagtactgaagcgatatgcagggagcacaaaacactttttgagtcatacaaacatttcagaaaagaaggtttcacaattcaatactcccagcctggcattcaaaattgatgtatttgactcctttctctaggtcaacgaattttgagaaacacatgccatctaacctcaatacatctaagacaaatatggcctcctacactcctactgacaagatccacaataaatttcgggcatctcatccaaaacgcatcatttttttacagggttttacatgaacaccatgatagacagcaatgtaattaggtgagtcaaccagcacgagtgaatttgtgtagcaaaattgtctgggcttacgggcccagacgccgcaccaccgttgctgccattggagccagtgctgcaagaagaaccaacactgcatcaggacgtagagccaaaaaaaaaatgtagaaccgttagcacaaaaatatcgagaaaggactcaccttcctgcaaaaatgcatgaaccatggcctgcatattttgatccagggaaattgtattaggctcatcaaacagggaaaataagtaatcacccggtccaatctaacagtaaatattcttgatctctttgaacacactaaaaaaacttcaggatgccttctataagaaaatgcatgaaacttcaggatgtgatcatgcatttaactagtggtaaacacattttatattagcatgatcagatatctaaagtctaaggtttcttcaaattttctcgcttaccattcctatgtaatcagaggtccatgtcagacatacacaaactcaaacatgttcaattataaccttgtttgcagctccaaggtgtttactggcgttcaatggcatctaagtcatattaagaataggcaaacaaagtcccaatgaatgagccaatcagttcttttgcatgcacttgttacatttagtttcgcttggatcagaacagtttgtaatagctgccatgctgcataccaggaacaggaagacaccgtagaaatcatgtagtcatgtggatactattatagcatgcgacaggataagcccctataagtttcacagatcttaagcaagtttccatgtaaccagtaaaatattgggctggttaactaataatctaaccaacatgatctaaactgctatggtggctggtggctattagtttggtgaaaacatgcatctagttgttttaatatataaacttagtttttttttcctgcagtactaggagcaaatgaagattactaaaatgttcagaaagtaaatgtccttttagtgctgactgctgctaaccatgcttccagaaaactaaaccaggtaattaccaattgtgcaaaagtgttagtacctaataattgcagggaaattggtagtcaaagagaaagaaaccggcttacttggatcagtagatgtcaccattgccgtgctattgaagttgcatgttccgccacttgctcgtgtcctatggtaataatcattgaaagcataagaagcaacagcgacaatgtcatctgatttatagcatggttgcccaggttgaattgcactgcagtttgcagagccagggccacaggcccaatccaagctttgcttcaatgcgctatgaggagcactagaatttgctacacagaatgtccctcgcaaaactggtgaatctgtattagttgtggccatgtcttcaaatgtaaggctgtacacagtagttgcattggggaacatgatgccccaatttttctctgagacaggtccagcccgaagatcctcattgaacaactcaaatatgaatgtgcttacttgattgtttggctggccaggagtaccagaattatttaatacatggcgtatgaggtttgtattgtaggccaaagcattatccacattagcagccttctcattttgcccaccatgcgatggccacccagaagctgtgaccataacagggatcccagtgaaattcattgcttgcattgagttgtatgtagcatcaaccatagcatcaaacatattggtatagaacaaatttgtgttgggatctgaaatttggctatcagggttgagtgatcgaaacagcgcatattctaaggggaatacgccttgccctttgacatagtcataataaggttgggcgttcagcatgaagggagatgctgtgttgttcagaaattgaagatactgaagcattattgagctccatgtcgaattgaatgtagcagtagatggaggaaatggcttagagatcatgtctgttgaatgaggacttgaaattttcacctgggtattgagatttgcagccaaaagcgctgactgtaggaattgcaatgcaggtacaagaacaagagctgcatttggttctgtagtaagaacctcattccctacagcaatatgcgttatgttagtcgctggaatgtatgcagcaacattcttgttaatccaatcagcagctgtagaacgagattgccccactcgaagtagctgatcatttggaaccccaaccaccacttctattccagtatttgcaagggcagatagcatctgatggtctgaatcaagcagacgaacatgttgaatcttcttttctttcaggatagacactgtgtctgatgctgatggtgggttcgaaatatcagtgccaacattgataccaacaaatgctcctgtggaagtgaataaaattgttccatgaatatatatatggcaacagtcataaagcaaccattttgcagttcaaagcagtaatttgtttggtgtactagcttaactcttcgcatgtattcgagaaaactatctctcgcacaacttggcaaatcaaagcgcaaattgaataaatacaataaagcatcaaccctaattgaaagcaccgtgttacaataaagccatattcatagaagttaagttacaaatgtgctgttacctgaaacattgaaaaccatgagcattaacagaatcaccacgccttttaggctcgctggccacatatttcggtgctctagcatctgatttcttattatccaatgacacttttctcactttctcagaagcacttaaccgaagctgaaatatcaacattgaagaaattattcccttcaaacaatatagcacaaacttcacttaacttctatctttaggaggtaataaatttgagctgagaaaactttaatgatgagaaatacaattccccgcaaaaaaaatgatgagaaataaagaatgcatccacatttgtagaatacagccaaatatgatattaaagcatcgacctttctggttcttcccaaatcatcatcacaaaataacagtttgggacataaatgcagttcaaaagtattcagatactactagttcaaagagcttgccgaatactctgcaaatctgcaaacatccaagaaacaggaaccaggcgctcatccaagaaccaagcaattcagggaatctgagagaaatctatcagataacccgaggtggcggagagctgtctgaagaaatgcctgggaggtgaacggccgaacgggtaagaagaatgaagaggaattcaagcaagaaaacccaaaggggctacgcatgaaagcacatcaacacaaagatgaacaagcaaatcaagcagttacctctcaaaacatcaggacaaatccccaatactaacgctgcctaatcatgaggaaatcagaagaactccgttccccgacagttaaaacttcactgaatataaagcaatgagaaacgtgaaacaggaggacaagagcatggtgatgggctttgtttctgagtgaaacgtgaaattaaaatttgttttggagtcataaacaagcaagctttgaagaacactcccatcacccctcacggttaaaattccattcctttccaagaaacctcggttggtgaaaggtcacgagcacaaaagatcacaagcctccagaaacaaagcaacaaacgggaacatcgcaatcgtatcaacagtacatgaaagaaaaatgaaacaaaccaacaagagaagagaagaaaataattaagccacctgatcttgtccccggagaagagacctttcttccacttccacttcccctttccagatacacacagccaagaacgaagcacgaacttcagattggaggctggaccgctggctggagccagcaccggactactactactggaagcagtgagaaatgggaagccctcttctctctcacacacacacagagaatccgaggaggtagagtagtgtgtgtgtcagtctctcggttcttggtttggattctttcctgcttctgtttcttggaggattaaaacctctccaaggagaggtgattagtagtattgatcaaagtgcataggagacgggattaaaaagaaagaaaagatgaggggattgaccgagagctcagctcagtctcagctcagctgcgcgtgtcacagatccaattaagtttcttgggagacagacatggaggattaaagaaaagaggtgggaaaggtggaggaggaataaaaggttgagcttttctaggctcggagttgggggcgggttggcgaactgatcagcgtggtgtgggatgggatgactggcgaatgtgctggactggagcgtgcacggcgtgtgtgtgtgctgtgctgtgcagcgtgcagttccagaggagcagagaaggccagcgtagcgtactagcgtttctgtgggcacaagcacaatcggtggccatctcttggacgttcggctcataaatccagcgtattctcgagttcattttccggcgcattaagggtgtgtttggtgcaagtcacagtttgccacgcctaaggttaagtaaatttgatagttgtttagttatagttatagttgtggtaatatttttctccaacaaattcggtctcacatgtcaatggctcaaaaaatgtggtaagattcccttagacttagtaagttgtggctaacaatttgatcacctcatcttaggcaaggtgtggcaacttttattggtaagtaatggtaaagtgtggccatgaattaacttccttcaaaaacgattttggtggtgtttagttttcttcaaatttccaaatatttctgcatatcaaatgtttggacacatgcatagagcaataaatgtggacgaaaaaaacaattgcacaatttgcatataaattgcgagacgaatctttagagcctaattacgccatgatttgacaatattgtgctacaggaaacatttgctaatgacggattaattacgcttaataaattcatctccagtttacatgcggaatctgtaatttatgttgttattagtctatatttaatacttcaaatgtgcgtccgttggaggaggaactaaacacgacatttacagtaaatttggtgtggcattccataggagcttcagggattcattgaaattcaggattgaaaaagaaacgagaaacgagaaaaatgcaagtgcaaataaagtattgtaaaatatagaaaaatgctaaaatggttgtttgattaggccatggaaaagaatgcaagaatcaaataagagtatttaaaaatatagaaaaaaccaaaataatcatttgattaggtcaaagaaaaacgtaaaaattgaataagatggataaaaggaaaattttaaatatattgaagcttttgctaacttttttctaaatctttcttgtctcaaatatctttatataattgttttagggttaaatttcttgtgtttttatacaaatcaagaaaggcccgactcttcatccgctcaaaaagcgaaagcatctgaaacaaggtagcctcgagagagaaaaaaaaagggccagaaatccagataaaaggagaagaaagaattcctcacctctagcacggtgctccgatgagccatgctctcttaccacttatactactatttttgtcacataatattgtaatctttgttcatatttattatatgatgtgatgggttttattttatcttaagttataatattttagaatgaataaagtatattgttacgctatgttataggattcacacgatcacatcgctacatcagttaataaatataaacatcattaggaatgtaatattctcctttacttggcacttccccagcactgaggccactgctaatagtagtaactgaaaaccgattcgttgatgaacagtagtgttaaactggctagatctttccgaacttttgtcgccggccagtaatgcatgtggaggataggtacacaaaaccacccaaatgcaaaattccatcagtgatgcaacacatgggctttgtgagttgtaacaattgtttatgcgtatatttactactggtttgaagttgcttttgaacgattgagctatgaccgataaaccttaaaaaaatagcgaaataataataaaaataattatgagcaaaaaaattatactcgtgtcgttagctaaaaggcaatactaaaaatagaatactataaaaacaaaaatgaactctaatattaaatctcaaaatttaaatttcgggcatgcctaacgagctaaccaaaaacaattcaagtgcaaatcatcaggcctctaaaacacgagaatttattacagaaatttggttcgacctcaaatctaattatggaaatttctcattcaaaactggcccgtaaatttgtattccactgttcccaggagaagaaaaatgagaaatactgtagtctctagctcgagccactcacggcaagtcttttaaaagtacgcttctgtatatgtgaattcaaacatttctgcccatgttttgctttttgcgctcccacttttaagctgagaaaagcaccggctggacagcaaggcacgcagaacaaaaggtctttagccgtaccaatcgcatggaactataccgttgtaacgcagctttgtgatactactcttcagatgggtcatttttcatgctaaaaatttctcagtttgcatcccctttttcaatcatgaggagttaaaattttgagaaacaactacccgtttttcagaatatggaaaagctgaattttccggtttctaacttctaggttaattttttgattctatactatagctgcgttcggtagcggtacatcgagagaaaatttttctcattctccacgcccatgcttttcgaattcgaactaaaagacatgtttttgaaaaaaaaatatattggaaagttgctttaaaaatcatatcatattaatctatttttaaaatttaaaatagttaatactcatttaattatacactaatagctcacttcgttttgtgtatcttctcaatgtaatctttttctctcttctcaaggacaaccaagacggtttaggggagttgaagcttatgggaaaagctgtgactagtagtttacatgccaaggatgagagatttttcttttacgggaaaacaacaacggattcaggcatgtaaaccaactcatagttccatactctgaatagtaatgacgatgagtggtgagtctgtcacaataaaaatggtaaaaatacctcaccaacaactttctactttttgtgagaaataaaaaggatagtacgggataaaaaggcatacatgtcagtaataaatacgtacagtaattaaaagattatggaaatgatgataataacaacttaatgatttttttaattaaaatcctgatacaacgcactgtctagtctgaggaaaaattatgttcatgcgaacctgaaatttgtaaacccacatggtgccattgcacgtttgcacggctgggtcggtgaccctattcgactctcaaagatcgtcacggaacaggagtcaagggtgctattaagccccgatctctggcccttgtcgcactcgagaaaaaccaaccctaaaagttgactgtcctgtgctgtcggtagtggagatctgagtaagaggaggattacattagtgcaaacagtacttgctccattattttgtcacagtaggaagaatcacaatttcagttcccaatttcttttctgaaaaaaaaatactgtcactgctctgcttccaagactgctgcgttgactcagcggccgtttcaggttataaaacgttttgattttggtcaaagttaagctattttaaatttaactaaatttatagacaaatataataatatttataataccaaaaaagttttattaaatcaataattaaatacgtttttataataaatttgtcatgggctgaaaatgttttttttatttttctataaatttagttaaatttaaagtagcttgactttcattaaagtcaaaacgacttatcacctgaaaagggagatagtaccattttgcattgcacactttgggattcgacgtagacagggcgcgtttcgtggcagtgatcaatgcggttgttttctcgtcgctttttcgtgttcagatctaccggacgcccggcaacggagacatggcaacgttagttgcggtgagtgggcgaacgacaatagcagcggcggccggtgatggtgacggcgccggccgccggggaacaggggcgcggtgaagacggcgggaacctacgtgcacctcccgcaggccgcagcgctgtctgtgtgcctgcctaggcaggtggcaccgtgccacggcgaggtcggtgtcgctgaattgaaatcgtctccccgcggcgccatcatggcacgcgcgcgcgtgcccgggaccgaacacgaacacgaagcgacaacgccgcgtcgtgcgcggcccggcgttcggtcggtcgggtggcgtcgtcctcccgtcggcaacggcaaggcccagagcgcgtgttgtgctccaacgcactgaggcctccgtgccattctgtggcctgcttggtgacgtatgtgggccttttttattcggaattactaaagctccgtcgacagaaaattctacctcaaatcttgtaaattttggacttcacgattcgtgctcttcttctccaactccggcgaccaactcttcttctctggcgccgacgaacccaaactccggtagagggccgacgaattagggtccgggggtgggggtggggtggggggg

SEQ ID NO: 1698 - DNA, 695 bp, Oryza sativa
ctctctctctctctctctctctctctctcccctagctttcccctcgttctgcccgtgcccgcacgcgcgtgcgcgtgagccgacaccgagccgagccgagcgccatctcctctctctcattctctcgctctcgctctccccgtctctctccccggcgaccccgcgtccgcgaatttcgaacccgtgcgccgttgcttcgcgcgcgcgtgcccgcgcggtcgccgtcgtcgtcagtcacttgctgcccgtgcctgcgccgtccggccccgcgccctgccatgctgcgccgcctgcgccgcgccctgccccgcgagccagcatccgtgcccgagccgcgccgctcgcatccgtccaaaacccggaggcagcgcctcccgctcccatctctctccctccccaaatcggcatagcgagagcttcctttctccccctccgtttcccgccttcctctctcggaccgacgcctcgccctccctccgttccctcgctcgattccagcgcctggacgcagaggagcagccgcgccgcgccagccgtcgcccatgttgtttgaccccgcacccgtgagcccattccttctcctcgaagctccctcgccccagcactgccccaaggtcggttcccgaaccgacatagccaccccttaaaaaccacccctccccctctcgctcgatccccctgtttcgctcgggctg

SEQ ID NO: 1699 - DNA, 5202 bp, Oryza sativa
agagaaatgccacatttgtcacttgtgcctatctgacccaaccaatcttgccgcgagtctgcaacaaccgcagctcatggcgcgtagtggtggttactggttgctgctaccaacgttcagtttgcagcacgtttttttctctcctgttccaatgatatggtacatcatactacagttcaggaagagtacaattgtacaacgaacctatcatactgtcatgtactcctgtctgtccacgctgacctccagctaacacacatgcatccacacaagttgaggcaggcaagaaacactaaacaacatcgccgtgttttcctcatggaagtgacgctgacatgcgtcgatgcaatattaattatagtgtgtctgcattagacttgtgtcgtgggagatggaagagccgtcaagccaagccacaccttcttaaagacggccaagctatgcgggtagggatcactagaagtgaagtcattgccatcaggcacagccgcacaggcagagctgagagcttaggagcacattggtttcttgcaagtaaccataggccagaagtagacgataagctagctagctaatccaagcctgtgactgtgaaggagtcgagtcgtctttgccaagtcgctgtgccgttgaaagggacaagggtctcctggacagagatctcgcccgttaaatttgcctctcttttgcttctttccctccgatctctatagctgtgcaagtgaaggaagaaaggaacagcctgaattatttctccggttagtccccgtcctgtgtgtgtgctatgcgaaggagcaagtggtgtttgccttgttttcccatggccagcacggcggcgctgcccatcgagacggcgttctctcttccggctccgttgccgtcgtggccgtcgtcaggtacgtattgcatatttgtgcatacctcgtgtttttttttgttcttctggttattatgttattatttgcacgaatggttttgtgtacctctcgaatggaattgatttcttgcaaaacttggtgatcctgatcattacagcacttcgcttcttttgctaaattactaaggtttgcctttcgatactcggttactgttcttctcacgcacagctccacttagcaaattctgattattattatttttttcaatcttgtcctgatcacgcattcatcattaattttcctcttgactacaagtccaatatgattggaacatatccagagaaaaatacatgcatggcaaatgcaggagttatatggctaaatgcaaataaggcagctttaggcgatgctggcgaggtagcttacctgcaatgacgactaggaacatactttgctatattcatgggctacaagatcctcctctagtcctcggttgctctgaaatgctcgtattggtgtgcccttttctgaacagacactgataaccatgatttccaaagaatatatatgttatcaaatgagaatagaaagcatataccagcataatcttatgccttcatctagctagccagggttgtttggaagacaaatgcgcatctctatccagaacaccacaacttgaatagaccatttctgctctctgttgctatcattatgacttgctaattttttcagctctataaacacttggctaaacgaatttctattcttagttatggcctgccattttgataggcccagttttgtggttttgtcaactctgtaacatctttgtctgactggcgtttgtttgtttgcttgcttgcttgcttctttttcttttcgagatgctgactggcctttctgaattttcagtttcagatggaggatttgcaaagggtagcattgaccttggtggtctagaggtgcgccaagtcaccacgtttgccaaggtctggtccaccggccaagacggcggcggcgccaccttcttcaggccggagcaggtccccgccggcttcagcgccctcggccactacgcgcagcgcaacgaccggccgctcttcggccacgtcctcgtcgcccgcgacgtctccggcggcgggctccttgccccgccgctggactacgcgcccgtctggtccagccaggacgacgccgcccacttctggctccccacgcctcccgatggctacagggcgatcggcgtcgcggtcacggcctcgccggacaagccgccgcgcgacgaggtcgcgtgcgtccgcgccgacttcaccgacgcgtgcgaggcggaggcgacggtgtgggacaaggacgggttcagcgccgtcgccctgaggccggcggttcgcggcgtggacgcccgcggcgtgcacgccggcacgttcgtcctcgccaggagcgacgcgacggcggcgagcgcgtcggcgctggcgtgcctcaagaacaacggcgcggcgtacacgtcctgcatgcccgacctcgcccaggtgaacgcgctcctcgccgcctacgcgccgcagctgttcctccaccccgacgagccctacctgccgtcgtcggtgacgtggttcttccagaacggcgcgctgctgtaccagaagggtagccagaccccgacgccggtcgccgccgacgggtcgaacctcccgcagggcggcggcaacgacggcgggtactggctcgacctgccggtggacaacttccagagggagcgggtcaagaagggcgacctccccggcgcgaaggtgtacgtgcaggcgaagccgatgctgggcgcgacggcgaccgacctcgccgtgtggttcttctacccgttcaacggcccggcgagggcgaaggtggggcccctcaccatcccgctcggcaagatcggcgagcacgtcggcgactgggagcacgtgaccctccgcgtgagcaacttctccggcgagctcctccgcatgtacttctcgcagcacagcgcgggcgcgtgggtggacgcgccgcagctcgagtacctcgacggcgggaaccggccgtcggcgtactcgtcgctgcacgggcacgcgctgtacccgagggcagggctggtgctgcagggcgacgcgaggctgggcgtcgggatacgcaacgactgcgacagggggagcaggctggacaccggcggcgccgggcggtgcgaggtggtgtcggcggagtacctcggcggcggcggcggcggcgtggccgagccgacgtggctgctgttcgaccgggagtgggggccgagggaggagtacgacatcggccgcgagatcaaccgcgtggcgaagctgctgccgcggtcgacgagggagcggctgcggaagctcgtcgagagcgtcttcgtcggcgagggcccgacggggccgaggatgaagggcagctggagaaacgacgagagggaggccaagtaaaaattttggcggttctcaaatttcagacgacgacacgcggtgatgacgagtgaaaagtttattatatggggtttctcaaattcaaatcagattgttacggagcaattctgaaaaacgatgacagagtgcatggtgaaatatattcttttaagataagatttaatcaaacttaaaattccaatcacaattgtttctcaaatgtttggttttttaaaaaaatactgtacatagattcaccataagaactcctataataatatcataaaatttattgtattttgtaaacttactctaaaaaaattctaatacaaaatgtcatcttaaaaagtaaatattttttaaacatcaaatatttatgattgaataaagtaccgttgtacaaaatttcaagtcaaactcgaccaaatagatctatattttttttcctttttctttcaaatgtgtatatcgaacttgcagttcactttctttacgatggtgtatttgtattgtaaatatatcatatttctagtaatatgtgaaaacaaatgtaatttctggtaaatttcacttttaagtaagttttatatttttcttctcattttgacgcaacttatgcttatacttattagccaaaatttaatttttcaacatttaatctgaagctgattttaggggtttttcatcgaattttatttttcatcactaaaaacacgtacataaaagttttatttataaattatatttcgtttgtataaatatattgtttggcttcttccccgaataagctaaatgattgggctgtaccttcctctccgcagccataggataacaaacgcacggttctcatcttccatcgtcactcaccgacaccatccgtaggtcttccaggagctccttcctgccacgtcatcaatggcgatgatgggtggctgacagtcaaacgcaccccacgcctcctccccttcccccctctctccctccatggcttccctcgcctcccctcctctcccctgccgcgccgccgccaccgccagccgcagcgggcgtcctgctccgcgcctcctcggccctccgccgccgcccgcttcccctctcctctcctccgcttcggcgcgcttcccgcgtgccccctgcaacgccgcacgctggagccggcgcgacgccgtgcgggtaagcttgccaaatcccggtccataatttcctattagttagtcaatgcgaggtcattatctaaaaaaaacgtcaatgcgatgttacctgccgctgagcacgagtaatttttgtgtactattgctctgattgattacagatagaaaaacataaggctaattggatcgattaaacatgagcagcttgtaataagttgttaatcttgcggagagcctaggtatgcttggggatatagtaagtgacattgccagtgtgccgcagcaagttcggctgctatgctcgctaggttagctagcaggaaagtgtgacacccgaactcccgaagcaagtgtatattcatttttcggggctacattatcacttcatttcactatatttcgtctggagcatgcaatgtcgctgtttctttttctgaatgtagcattggcacacataatgatcttgtgctgcatcttagatgaatgtttgaagctaatttggtttgattagttccagagccaacattgtacaacatatgttatctcttgctcgaaatttgtgaaagcttgtgcctagatgaggcattctttgctaaagcagtgattctggctggaagcaagccagcaataaacacaaatgattcaggtttaactatgaataagcttgtagatttaaggcacttagagagtgcaaacatggattctattatgtaactcaatctgagtttgaaggtatgg

SEQ ID NO: 1700 - DNA, 1830 bp, Oryza sativa
ttcaaaaatggtaaaggtggtgcctgatagatccgaattccaatatgaagcagttcgcataagtctaaagaaagcaatcttgcggatgttcttgtagtgattgagacatttatttttcttgagccaattgttttctagcaaatagtcagtactttaacagaactgtgagaattagtgttaccagatgcagggttctaaaaaggcttagatatgttgggcatgatctgttgggtatttggccttataacaagtatgatggctgagatgacctgtttaaatgcattactctgctcaggcatattattcatgatagctatgaatgaataatatgcctatgaatgcattactctgctcaggcatatttttgttacttattttctatgcttatttaaaaacactgtgtgccttgtatgcataacgatgttgaacctggtacaggtttgctctcaagctggtgcagctggaccagccccattatcgaagacattgtcagacctcaaggattcctgctggagatttttacggccacatacaattcgaggaactgccttgggatccatgtgtggttctagttttccttttatattggtcaaatttgagttttcatcttttggtgctaattttgctgtgttaatacagagcattagttgctagagctttgatagagaacccccaactgataaattggtggttggtattcaaagcgttctatgggctcgtggcgttaatctgtggcaatggttacatcgttgggatcaatcagatctatgacattagaatcgataagtatgtataatctctctatagattcatataagaaattatggtgatgttatgaattaccattaagaacaaaatttccttgcctatttcttttaactgtattctgacatttctaattttatgctgctttacagggtaaacaagccatatttaccaattgctgccggtgatctctcagttcagacagcatggttattggtggtattatttgcagctgcgggattttcaattgttgtgacaaactttggacctttcattacctctctatattgccttggtctatttcttggcaccatatactctgttcctccattcagacttaagagatatcctgttgctgcttttcttatcattgcaacggtactttgctcctatcttctctttgttcacttcagtaaccattggatttttttttatctgtttgtttttgtgtttagaagcattcttaacgtagtttgttagcaatgtattgctggtcgaattgtggttactcaaaataaaatagaacacctaatcttttcattcaaagtgcatgtaatcagagcactttaactcatctgattcaaagttggactgactgaatctatgatatattttttgtcaacaaataatctgtgagatatacctagtaagtatctgaactcatctggttcgaagcttatgaaagtgaaagacctatttgccaactgagcatgactgagagctagcagtgcgactagcaaatcacctcaaccattcctcttgctattctaattttcgagaatagatcttgtaataccttctgaacaattgttccttggttccctaatagttagcaaacaatgcactgtgcaattcagaaactttaaaatccccatgtttatgctgcatatgatttgattactaactcatatttatttttcaatatttcattcattatatatatatatatattttgacaaaccaccattcaatttttattaggtccgtggttttcttctcaactttggtgtgtactatgctactagagcagcactgggtcttacattccaatggaggtaaaatagt

SEQ ID NO: 1701 - DNA, 1043 bp, Oryza sativa
aagggtaagaaaccttctcaccgtgccactcgttttgtcaagaacaatggtaagtattgctccaagtgtcgtgaggttgggcatttggtgaatgattgccccggtggtaagcctcctaagacatgcatgtttgattctcattatatgcttaggaaggctcatgatggtagcattgttgctagatatgtgggttcccctatactcggtggtaaaaagaataccatttgggtgcccaaagctttggtctctaacctccaaggacccaaacaagtttgggtacctaaaagagcttgatcttcttttgtaggtgaactaccacaccagtgggagccattgggtgcttgatagtggatgcactcaacacatgaccggtgatagggctatgttcaccacatttgaaataggagtgaatgaacaagagaaagtgacatttggagacaatagcaaaggaaaggtaattggattaggtaaaattgctatctccaatgatttgtcaattgataatgtctctcttgttaaatctctaaatttcaatttgctttcggttgctcaaatttgtgatcttggcttatcatgtgctttcttcccgcaagaagttattgtttctagccttcttgacaagtcttgtgtgttcaaaggttttagatatggaaatctttacttggttgatttcaattctagtaaagcaaatttgaaaacttgtttagttgcaaaaacttcattgggttggctttggcataggaggctagcgcatgttggcatgaatcaattgagcaaactttcaaaacgtgatctagttgtgggcttgaaagatgtgaagtttgagaaagataagctttgtagtgcttgtcaagccggcaagcaagttgcatgttctcatcctactaagagtatcatgtccacatctagaccattggagctcttgcatatggatttgtttggcccaacaacctataagagcattggtggtaatagtcattgtcttgtgattgttgatgattattctcactatacttgggtattctttttgcatgataagtcta

SEQ ID NO: 1702 - DNA, 3857 bp, Oryza sativa
ttcctgcagcccctttccgctacctactcacctcaacaaaatggtgtagtggaaaggaaaaatcgtacattgattgagatggcaaggactatgctagatgaatatggtgtttccgattccttttgggcggaagccataaacatcgcttgccatgcaaccaataggctttatttgtatcgtctcttgaaaaagacttcctatgagctaattgttgggaggaagccaaatgttgcctattttcgagtttttggttgcaagtgctatatttaccgaaagggtgttagactaaccaaatttgaaagtcggtgtgatgaagggtttcttctaggttatgcctcaaatagcaaggcataccgggtctacaacaagaacaaaggtattgtggaagaaaccgccgatgttcaatttgatgagactaatggctcccaagaggggcatgagaatttggatgatgtaggtgatgaaggcttgatgagagctatgaagaacatgtctattggagatgtcaagcctattgaagtggaagacaagccatccacctccactcaagatgagccatctacttccgcttcgccaagtcaagctcaagttgaagtggaggaggagaaggcacaagatccacctatacctccaagaatacacaccgctctttccaaggatcacccaattgaccaagtgttgggtgacattagtaagggtgttcaaactcgatctcgtgtcgcttcgatttgtgaacattactcgtttgtttcttgtcttgagccaaaacatgtagatgaagctctttgtgatccggattggatgaatgctatgcatgaagagctcaacaactttgcaagaaacaaggtgtggactttggttgaaagacctagagaccacaatgtcatagggacaaagtggatctttaggaacaaacaagatgagaacggattggtggtgagaaacaaggcaaggttggtggcgcaaggtttcacacaagttgaaggtttagactttggtgaaacttttgcccccgtggcaagacttgaggctattcgcatccttcttgcatttgcatcatactttgatataaaactatttcaaatggatgtgaaaagtgcttttctaaatggtgaaattgccgaacttgtctttgttgaacaacctcccggttttgaagatcctgaaaatcctaaccatgtttacaaactctcaaaagctctttatggtttaaaacaagctcctagggcttggtatgaaagattgagagattttcttttgtcaaaggatttcaaaattggaaaagttgacaccactcttttcacaaaaatcattggtgatgatttctttgtgtgtcaaatttatgttgatgacatcatattcggttctactaatgaggtattttgcaaggaatttggtgatatgatgtctagggaatttgagatgtccatgattggagaattgagcttcttccttggacttcaaatcaagcaactcaaggatgggacgttcgtgagccaaaccaagtacatcaaggatctactcaagaggtttggcttggaggatgcgaagcccatcaagacacctatggcaaccaacgggcatctcgaccttgatgagggaggtaaaccggtagatttaaaactttatcgttctatgattggtagcttgctttaccttaccgcatctaggccggatatcatgtttagtgtttgcatgtgtgcacggtttcaagccgctcctaaggagtgtcacttagtggctgtgaaaaggattctaagatatttaaagcattcctctactattggcttgtggtacccaaaaggtgctaaatttaagcttgttggctattccgattcggattatgccggttgcaaagtggatagaaagagcacatccggtagttgccaaatgcttggtagatctcttgtgtcatggttatccaagaaacaaaactccgtagccctctctaccgccgaggcggaatatgtttcggcgggtagttgttgtgcccaattgctttggatgaaacaaaccttgttggactatggtatatccttcaccaaaaccccactcctatgtgacaatgatagtgccataaaaatagccaataacccggtccaacattctagaaccaagcatattggcattcgccatcacttcctaagagaccatgttaccaagtgtgacatagtcattagccacataagaaccgaggatcaactagccgacatttttaccaagcctcttgatgaaatccgcttttgcaagttgaggaatgagttaaatgccatagacttctctaatgtggcttgagatggtgcaccatggttgcttcttttgcatattgtatatttgctcctatttgctcttatgctttggacttattgccatttggttcttcattgcgaaaatggagcatgtcatattaagggggagttttggactcttgcatgtgctctacttccttttatatgtgagcaaatcaactaaaagtgctagtagtgttttcaaaatgcccaagtcaacataagtcaaaaattttgcaaaatcaatgaaatttgaaaactatctcttggaaaatgttttaaaagggtccctatatgttttccaagcctcacattgctagaaaaatgatttttgaatgaaaaatgctattttggctctcttttgaagaatctagatttttgtttttggccaaaatgagattaaaccccaaaatgagtttgagaaggaatctgagaaaagattcaaaacaaagttggtagagaggagaatttgaaatgtttttggtattcaaatcatattcaaataccaaatatttcaaaagttgtttgaaaatcaaattcgcccaaaaacccctatagaccataaatggtcacctcctagcactcaagtgagttttgttgcaaatcttcataaatttcaaatattatgaatggttggcaatatttcaactcacacatttcaaaattgctccaaaaatcaaatttttgttgaattttattgtgtgggggtagccgaactgtacaagggctgtgcacagtcggctgggggccaggcggtctgaccggcgctatatgcgcggtctgaccggcctggtggcggcggtctgaccggcctctagggaccggtctgaccggctgcaccctagcggtctaaccggccgcgtatagccggtctgaccggccaggtatggtgggcccatgtagcgcccgttccgtcgtggcgcctagcgggaaaaattatctcttaaaaaccctaattgcgaaatttgtttctttgcttgttgtctagtgtccgtgccatctcaagatctcaatccccgatctatcgtcgagttcaaatccgaatccaaatccttccaaatcaaattcctccacaaaagtctattttgcctcccccgggtcgatgggccgaatctcgctcggcccatctccctctctccctctcccgggcgctccctctctctctctctcgccctctcccctccccggcgcgctccgctttcccccccgctcagctccgctccgcctcgcccgcgcgccgcgcgcgcgtgcgcgagagccgcgccgagtgctcctcctcctccgctccgcccgcgcgcgtgcgtgtgagccgccgcgccgagcgcccccttcccttctcctcgctctgccgcgcctgcgtaagccgcccgcgccgagccaagtcctccctctccgctccctcgctgcgctccccacgccgtgttcgcgtgcgcgcgcccgtgtggacgccgcccgttgcaagccgcgcgcgcgtgccaagtggctgaccgcccggttgccgccgccgtcagcctctgcacgtgtctgtcgcccgtgtcgtcgcgccgctccaaaccgcccgccgtcatc

SEQ ID NO: 1703 - DNA, 7721 bp, Oryza sativa
aaacgatcacgtttcgagccgtcggccatcgtcacagtgccctcctctgcagtggtagtgcatcctctctgttctccttcctcgctccatctcctccccttagactcgggtagtagcacgagtagaccccccgtagctagctgggccgccccaagccttgtcgccgctcgctgtgtgctcgtcgccgtcgccgcccgtgttcggtagccgcctctcgtcgccggcctctcccgtagcgtttccgatcaatccggcgcaaggaatggattcctgaggttccctagatgctctagcccctttgaatccaaccctagccgtctcgtcgccgtttccctcttctctcgccgccagttgcccccgccgcaatccaccgccgtcgatcatcccccggcgaatccgagccgttggctcgtcccctctcaacccgtgctacctcccggtgtgctcgctttcgcttgtatcgccgtggttcgccccgccgttcgcagccgccgtccgccgtccgtttcggccgatgccttcttcaacctcccgccggcctgcatggcagccacgtaggcaccacgtcggtgccacctcggccgcgaccgggtcaagctgaccccggtccgccgctcccctccgccccgctcgggcgcgtggtccaccgcgagccgtgaggctgcgcgtgggcctaccacattcgcacccaccgcgagccgcgcgcgtgcaccgcgtccctcccccaaaccctagcgcgccgccgcgtgctccctctgcacgatgaatcgtgtcaccgacaagcgggtcccactcggggccacgcgaggtgagcccggtccaccggctccctctctcctcccccgcgccctaatgggccgtgtcctctcgggctggccggcccatttagctcggccgagccgccctcttctctcgagccgcgccctagccgcccgagggaagtcaaatctccctccctccttcttttctttttcaaaagggtttaattaaatcctttttcctttagaccaaaaatccaataatcttagaaattcaataacttctcaaccgtacgtccgtttgactccgttcaacttccaaaaatcgtcaaatctcgagatctatctaatggcacacttagaggtcaataatagggctttattttcgccgtttgttgagttgtaccgtttcacgtgtagtttcggagcccgaagacccgcagtgcgaggatttcgaggatcaagctcaagatctcgagcaaggcaagtcacctttgatcatcttgcacctataatttaaatctaagtatttcttttctgcaaatattgcatgaataggattaacacgagtaattcggccacggcttgcgagatagcctgtcggccccaatcctaattgctgcaattaccctccttgaattattgaacacttaaacctcctttgtcaactgttgtgcttcgatgcacgggccttcggacacgcgcatcggaacacctcccctcaaatttaaaatatccaacggtgggtaaaacttggggttttacaaaagacttggaaaaaccctacacttgggtcggtgcttgcgaactaaaatgaatttccaaaaccgcggaccggggaacgtaccgggagtacgatttcccgctcttgcacttaaggaccgtttccttggaatttcattcaaacataaggcaagtgcgaccacatgggtagaatgggacacccctggctgagtaattagctaatcgggggaaccatgatgccaagagacatgtggattcaacggggtggtgccggggagaaccccccaggtttcctggcacagtatggtctgggacctaacctggtgttggtctaggacccctctcgttggcatatggtgaacctgtgtcggctgtcgaaatgccttgtcatgaaagtctcaaggtctccagacgtggccgttctgcacgggctgggtgatccgggttagtaatgtcgtgtgggtaaagtgtaccccctctgcagaggttattaaactgttcgaacaaccgtgcccacggtcatgggcggatgtgaggtgattcctagcgtagttttgtttgactactgcttgtgaaattactattgtggaatgagttcgatgtttggaaaatctgcggctgataggatcagccaggcccgggtggccgtttgaaagatgttggccgggtgccaaccttgaatcaaatcaaagactgatatattgcacatactccgaccggacgagacgcactgtctcatccgtgtcgttgagaagcactcacttagttgtttcaaaaaggagtttaaataaaatcaattgcaaagacaacagcctttcctttgaagcccgcattaaacacttaattcccatgacttgctgagtactcctgtactcacccttgctctatataaataatccccccagttgctgaagaagatgaagtagatcccgctgatgaggagttcttccaggagcaagtcgactacgatgagttttagggtttcggcctagttcccaagtcacgcctgtgatgattggtccaagtcttggcttccgctttcccttttgtaatgcagttgtgagctcgggatctgtccgcagcccaacatgaatgtactcctactctgtaataaagagacctctgttgttgtgatattctgtcttcctgtgataccagcactgtttcctaggactggtatcgattaacaggttaatttggagcgtcatgggctagtaccgttcggggctagttcggggcgtgacaattatatgaagttatagaagaatatattttgctattgagacttaacaattacacttgatataattgtgttttatgatgaattgttgactgctgaacttgagaattggacttgacaaaagtttgaagctcagtttgaggggtttctgtatttcgataaattttcgttaccgtatccgtgccagttcattttcgctccattttcggtttcgataatattcgttttcggggtttccgattccgattttggaataaatatgaaaacgaaaacgataaaggttgtttccgtccatttccgtaccattttcacccctaaatataacggtatccctgggagtatgtacgagcatgtgtgaagatcgacatgaaatcatgctaacatgtcctaggaatcgtgttgtgtagtacgaagaatcatatgatctgggcaacgacgtacatgatatccacatggactcggcgagtttcattcacttggtatccacatcaaacagagtctctttcgtagttcactctcgagtcgtgacttcgcaaagaatattatgcatgacgggaatcggatacggatgacgtaccatagttttgacaaaacatcttcaatttttaaatcgcgggcgagggcgatgcagtcccaagcgaacatgcggcaagggcaaatcacacgcgcgagggcgtcgcgggcccaatcgagcatgtggaaaaatcgcgtgcgcgaggacgttgcaggcctaattgcggcggcacgcaaatgcgcatgtggaaaacggactcaggcgcgggcctgattgctgcgtgcggcaaggggtgcgtgaaaatgtgcgggcccaattaattcgagcgtgtcttagataaggacactctagcgtaagaaaaagaaaagaatttgacagaaatataaaaatgaaaccaattcaaacatggatggcataccaaaattctagcggaaacatttttaatttttataatagtagagattatgagaaaatataaatatagaaagagtagagaagaattttatttttaaatcaccaagagaagagaatatggttgccattgtttttcgtcgcttttcatgctacgtttcttgagctgaggctgatctgacagcaaaatacatgcaagaaattatttatttggttagcttcttgtgcacttatttgttcttcaccttcttgagatcttttaggagctctgcactctaaaccaaaattttggttagcttcttatggggttatttgttcgttcttcaccaattgagatcttttaggagctctgcactctaaaccaaaattgcgctaaacttcactgcattttcatatgctgtttgttgacttcatcccttatgttgatactgatatagttctgcagaaggtactgaaagtagaatttgtttctacctgaatctctggatggatgggaaattttgtgtttttgtattgatatgattatgtcagtatcaaatcaggatttctcaagatataatatatccatctaaaatgtgttagtctaacaagatcgatgttgagggccgaaagtcactgagatcagtgcatgtactaaaactcttggctgtttgtgcaagggagagagcaatctagcatatctcggagacgaccgcacaggttacagtgggatcgcgctattgcgaattggtacacgaggggtgattatagacgaataacaccacaacgcaaaaatagcatatgacggatgaaggaacgaacaaatacgacaccgatcaagatgtgatggagacggatgccataaacgttatgaatcttttaagtaggtaaagatttggggaacttaaattaacaagtgtatgcaatttattgtcataaagttttttgagtcgtaaaaggacatatatgtattctataaactcgtttatttatgagtaaagtgaaaggtcggtccctaaacttgttagcctttctagatttccataattttaaaatgcagatttaggtcacaaaatttaaagtatgtcattttggttaggtctgtaaaaagctcgaggcttgcgagctactcgagctcgacttgtcctaggctcgattcgagcttaacaatatatgtgtttttttaatcttttatataataggttagttgggtccatgccgatataaatctcatcgttttgaaatctaccaatactattcgcataatgagaaccatgtctcaaaaaaacatccaaaatcagatccatgccacccgcctgatacgtgtgaaacacattttgaggccctcacagatcttgacgagcgcggtaaagcaaatcgggcgagtcaggcgacgagcttgatcgaccacaccgagatcatcatcaagggcgtcaacatctacagcaccttcggcaccgtccattgcgatgtctatgaaagccacgccgccctccatgtctatgaagtcgatggccgagcagatccacgctgcccttcgtcctccaccaccaagatcttggcctcttcccacatcagtccggggagttgtggccaagcccattggaagacaaccacccgtgctccccctcgccatcttcctctctttgccatccgaagcctctctagctcgcctcgccacgctgtcatcgccttgtggagctcagcctccccgaccacaccggtgagcttgcatcctccgccacgtcgtgccatacccagccccacaatggagaggcggtgatggccttttcaccaagagcccaagagagagagaaagaggggagtgaaggaaggataattacatgtgggccctattaattttaatgttttatctctgagcttgcatgtggatcccacctatatttaaagtttaagttttattttcttcattatggaatgtcatgtaagcaccacatatgcaacataccatattaaaaaaaaactactcgtttcatattataagtcgttttgactttttaatgtttgtctaactttatagaaaaatatatcaatatttttaacacaaaacaaacatattatcaaaatatattcaatgaagctaatttggtgttgtataagttgctgaaattttttttataactttggtcaaaaacaacttataatatgaaatagagggagtaagagacatacacgctctcgcgccgctctcatgcaggtggctcaggagcgaaaccctagccgccagcgccaccccctcccaacgcctccagctgcctcgccgtcgccggaaaccgtgcggctggccgggaaggcggcggtggggaaaacgcgccagcggcggagcatcccctcggcgtgggaggcagcgtgacgcacgcaaggtggaaggcggcggccagagcggccggcggggcggatccggcctccccggtggaggatctggccccctggcggccagatcgggagaagtgcagcggcggcgctccgagacggaggacggcctcgagctcgcgccgatggtggcgcggcaagacggcgggcggcctcacgctcgcggtgacggcggcgggacctcgagcttgcggcagcggcggcgcgcctcggtgggacagctcgcgacggcagcggccacgacggcacggcatcacggctcggaggagcagctcggccggcacgcagcgaaggctgaccggctggacggcaattggcgatgatggcgcggacgtgcctgccgtggtgctcgtggcagttggcggcggcgtcagctgacaacagcggcggaggacatggcggcggcgtcgggctggctgcttggtggtggagggcgacggtgcagcggtttgcggaggcggaggctagcgtcggtggcagcggcgactgcggccgtggctgtggaggcggtggcgatgccggcggatgcgggttgctagcgacaacaactggaggcggggaaggagtcgggtgcgagatgaggatggcggtggcgaggtgaccgtgtctgggtcagcggaggcatggcggactcggatggctagccgagggcgtggcagacgactgcttctggccggcgcgacatcgtttggtggaggggtcggagaccagcttggcgcagagaggcgcagccgatggcagcggaggccagctcagcgcgagaggctcaggcggcgaagatagaggccggcttggtgcgagaggcgtggccgatggaggaagaccggaatggcacgagaggcgcgtccggtggaggaggccagcttggcgcgagaggcgcggccaacggtggaggaggcgacctaggtgtgaggaggagttgccggtgggtgtggcgcagtcttcggcgcacgaaggctagccggcgggggacgccggtgtaggggttccacatgtcagcggagcttgtgtggtggtagagcatcggtgcgtcagccgtggattcgcaggtggtgagcggcgggtgaaaatctagtctggcctcggccggaccgacaacgattccccttcctgagggcgttgtcgtgctgtctcacccctcaagggtggttgccgggcaaaagcccagtcttggctcctttgagccccgacggacggcggcggcggtttttcggtcgcttgtcttcttgaagacatcgtttggcatcccctaggggagcgatctcgtctgtgtccctttgttggtttagtggcggtcggttacgcttagcggcggtcggtccggtgccagccttctcctgggcttgtgtgttggcgatgtcggtgtgtggttggtggaatttttttcctttttcctggttacgaccctccaaggttgtaatcttgtatttttttttcttgcgctatcaacagaacttcgtatcgtcttgtgcgagtcgttcaaaaaaaatagagggagtagattaaagtgacacatagaacgaaaccactatcaaaaacatcgagggagtaaaatgtatctctttttttttaacggttgagggagcctttacctttacccaattttacaccctgttttgcagtggagggacacgaatcaaacgtgcctatagtcgagggagtctagatggactttttccta

SEQ ID NO: 1704 - DNA, 26134 bp, Oryza sativa
ctggtttccttgtgtgctaaaattttttcaattcacttgcccatgttccagactaactgactgacccataatttgtagcacttttttttagatatcggattaaaccggcctctggcacacagccaaataatttatagctaaaattattgggttattgttctactaaactgatttttggctagctattttgaagcttaatttgaagcctaacttaatttgaagattgtgaggatgactaaaaccaagaggcttggagggaatcttctacttgtttaaagttgtcgagtcgagtagatgaccaattacaatgtagaagagatgggcaattttctgaaggaaaacctttgcatgctatctggtcttagtcttatggcttactggccctctattcagtagtacactattagctaaaaattacaaaccacgaagatgattgtattgtttgactacattttcatgctgaattaaatttagtgcaatgatcaagttgtggctggtacctctagctagctttatcgctagtttttgggtaagtcaagatttaggtagcaatggtttgtcgctttttatgatacttttcttaagctgagtctgacaacaaaatacagataagaaattattactttgtttagctctttgtgcaaaatctgctgaacttcactgcatttacatcagctgtttgttgactttgatttgtgttgatatcctgcagaagttgctcaaagaggactggcaattggcacctgaatctccagatggatgtgaaatttggtaatgtctatatcaaaccgtgactcctcgagtctatcgtattagcataaaaatatatatatgtagagtatatatatcttgtctgggatgctaattgagatcgatgttgagaaccatgtataatcaatcattataaaaatatatgtatgtgctgttgaatgtattttgccaaggcagagtgagcctgagacgtaaaactagacagccacgaaaactgttatcaaacaaacgggagtgaattctaatattccctcgtataccttttttttctaaattcaatgcaaatagttgtgaaaaattctgaaaaaaattgacaatgtacagtataatgatacctactagtccaccaaaattcaagttcaaatttaatctacacatcgagaaacaaaaaagacaattttagatataaacagtacgctactattcgtacgcttaatttgtcttttttatatctcgacgtgtgagttgattttggatttaagattttgtggagttgtatatatgtgttgtatgaatgttgtcaaatttttccagaatttttcgtagccgtttaaatagtttttaagcaaacgaggaaacatcccctcgagggattagaatagtttccctcaaacatttcacaagataccactactggtgcagttagcccattttggtgcctgtaggcagtagtaaaaatccttcggatgcccatatatcttcttccctgtcattttttcatttgcgcaattcaactacttgtaacaatcagaaacaggttccctcttaccctcctggttttacccatgctcacaaagcttcattaactagcagacaacacgggatagaaatcacctgaactatttcaggcctaattaagcggaatacatgacactggtccatgaattgaactattttgggactatacagattgggggctccggaggcaggttgttgatcctagcgtagtttcttcaccagctcatgctgtctgcaatcaacagcctagtagccgcgaaagtctttctagcacctaggtgctgcggcacctagactagaaatcacacgatggtttaaagattcgtgcgtcagatagtatacggagatgttaggatcgtatttcttttttttgagcgcacgctcgaaatacagcgctggcccaccagaagattcatatgggagggggggaccaatacgtgtgtacgacgcctcctattctcgtccacataatgttcgatacatccccagagtcatcgggaccgaatcgccacccgccgccgccgctgttcgccggccgccggccgccgccagccggccgcatccctgttgcatgttcctttggcggaagcggtgctccatccagtctcaccgagcctccggccgaggacttccatcaggtatgctctaggaatcccctcttccccaacccccgctgcccccatcccccgtcccctcctccatatcaccctcgttgagtcatcgtcctggactccgacgagcttccatcgccgcacatggaggccctgttggctgcggcggctgcgtgaagcctcccgtatcaagagttgcctccgctcacagacaccggcgagctatcacgggccagcaaacaagttataccgccccattcgccattcttgagcttcttgaagtgcagtttttcatccatgccgtgagcggacgccggcgagccgagacaaagaaacagcacgtgcttcgtgagcggacaccggcgagacgacacgagctgagccgaggcaacaatacgttaaggtcagcaaaacaatcgatgttttcttctcccctgccgcacaagcacgcattctttcgtcgccgccgccacagaataactccagggctttcaattcttcttagcaaacggcgaacgattttgtccatggttgttttttttccctacatttttctggaggaaagaaagaaaccacaccaaatctttttttttcacattttgatctactgaaaatgatttttcaatttcttttgcatgttttatattctcattacatgttttgtggggagattggcaggtctttgagaagagtggtttacaccaacggatccatgcaactgtgctagcagaagctgagtagcccataggccatggcggcgacgaagactgttttttttttttgtcatggaaaaactcacaccccttttctattcttttttataaaaattaatgattataattaagaccaaaagagccaatttttgggatgaggaaaattggttcaaacttaaaggaggtcttgttttatctgagctctgggcttcgcggagtacatctgtacctgctttctctgctagcaaaggaggatagcaagatgaagttggtagaggagacttcaaaccaaatacctcttgcttctttttggatgtaacttcatctaagttttccgatatttttcctctctcgaatacttttaatagcaagaatgtatagaaaagctgaataagatacaaaaatttggggacactatggacacactgcagaaagttgcaaactttgtcatttgactagcttttgttcaggtaggaggaactaggatgtactgatgattgaacaagcagctgcaatagctactccaatggtatgggatgttaagctcgaccatttgaggtgtcagcctagcatgttttttttgtaaagtgtattggcacactatggctgttgtatagtatgcacttatctgaaaaagtgacatttttggagtacattagaacaacaatggggcagcgcacagatgtaagctgttcgaaattcacaatcttacgtttcatggattaatgtcaatgttccagtgccaatcttttttgtggcagtggatgttggaattttagtctttctttattacaagcgattgatgttgtctggggtaaacaatagtatgaagaaaaagtccaatgatccgatctttgctttgatcaattacacacggaagaagatggatccaataactgaccaataaatagtctgtttgctcatctagttaaagcaaacaaaaagaatccaaatacaaacagataatagaacacctctgttatctctcaaccgatcatgaacagaagatctctctccttctccctccctctctctgtcgtctctctctctcccccggtcccccctctcttaggcttttggcagatcatgaacagagaagaagcacttgcattggcaaagcgaatcagaaagaaatcatggaaattacatgtgctccacttctatgttggtcaaatctacattttatgaattgtacttcctccgtcctataatataagagattttaagtttttcttacaacgtttgatcactcgtcttattcaaaaaattttgaaattattaattattttatttgtgacttactttattatatacagtactttaagcacaacttttcgttttttatatttgcaaaaaaaaattgaataagacgagtggtgaaacgttataagtaaaaactgaaaatcccttatattatgggacggagggagtatacttctaaatcaccttgtattacctctaggccaagtgagaagagcaagtagcactgtgtagcagagcaacagcaaagaagcgactacactagcaacagcaaagaagcgactacatacgctcacagtaattaattagatatttagatgaaacacatcctaatatatttcgatccaaaaattaattattttgctttgagattaatgagcaatacactaaaacatgaagagaaatttaaaaaattgatgataaatacttgagctggaacatgcagaacaagatcagcaacaataacactagcaaaggttaatggaaatctctaacagctcggtatatagacgtcctctgcccgaaggtgtcgatggatttcctcgggacggcgccgcccggcgaatccacccgcctgttctccgacgacgagctctcggccgcgacgacgacgctgccccctgcagtggatgccaccgaccacgtgctcatcgatagcgccaggctctgcccatgcgagctcgccgtgcccccggcgccgccgccgccgccgttgcagctccccaccagcacgtcggagcacgcgtagctgctcgcgctcgcatcggtgctcatgtcctgatcagcgtgctgcggcggcgatggctgcggctgcgggtggttgctccagagccacgtcttaatcatggacagttctatggttccgccgccgcatccgccgttactgtaaccaccggcgccgttgacagtgcttccggagtagaggtatccgctggcggcttggccgtgcacgtcggagaataagttgccgtcgaggaagttctccagcttcggcgcctcgccaccgccgtcgcccaccgtcctcctcccgccgccgctcgagccgacgagcatcgagaggtcggaggagccaccgccgtagtccaaacccctcagcgcccaatctgcaaagcacgccagggagatcaccatgcacgactcccccaaaattcgctgcttgcggctgcaaaatccccatcaaatagctatacgggtattctcccctgccaacaattaataaaacagttttctctgctcaccaccaagaacggagattgcgaaacgaaagaaaatacaagaaccaccaaaaaagaaacacagctcgctggctaatacggagactcattcgaacagcacggggaagagaacacttacgagatttccaccatgggagatccggtggacgagccgcagctgaggatgagatctgtgtaggacatcgagctcgtaaggtggtgtgcagctgtgcgcgggcaagtggttggacacaccaatcacatccgccgccgtgtttccatcgcggatgggatcttggggaacagacggcttccagttagactgccgattgcacgccatggccgccgcgtcggcgagcggggcgggtggtgggtggggggagaaagtggccattgagctcgcacgatcttgttgcgcgagcatgttgttggtcaccacacccccatccaccgtcgtgcatacctcgccggtgggatgttggagaacagccggcgtgcaccccatcgccgcaggagcggcgaggcggcgtggttggggcgggggtgaaagggggaaacagccggcactgcgcgtcgtcgaacacaccggcgagatttgtgttcggcaataattgggaggggccaatagtactctctctccaacgtgacgcgctggcccacggagcgtaaaagtagtactttgtatacccaatacatacggtcagcgcaatatatagattgaaatacgtcccgaccactttacaaccggcaccaatcgcgggatgcatctgacggctcccagcctactcctctttcagtttcacctgctgctcctcctctttcaccggctcctccattttcatcttcatcttcctccattttcattttcatcttcatctcacattccaactccaacccctccacacatccactcccttgtagtcgtagtagatgtcataaatcttccattcactttgggattttttttttaaaagactcaagtatatatgaacctcggcaacacggtttatcctctccggcggcggccatggcctttgatcgatcgatcgcctcccctgcgcctcgccctcgaatccgattgatgtattgtcgatgcggcttgctggatcgaatgctattggatttggggattagggtttggaagccgcgctgcattctgcagttttgccaccacggctcaatctaaagacaatccaacgggtactatacattggacttccgaattccgatcggacgacggacgagataaacctattgacttagtcaaacgcgcatctcttgatctcttctcccgccttcccccgtctccgacgtggacatcgaagtacggaatacggatcagaaacgacttgaagcgcctcctcctcctcctcctcttttaagcaaaccggctagcgaccgagcgagctctgacctctgaaatcatcgcgtaatcaagtgcaactacttcctaataaaccctataacgatccgatcccctagcgggagcaagaacacgtgaaccctagggcgatccgatcccctagcgcgagcaagaagacgtgaggacgatgagcatagccgtagtgatgaacaaaacgagcacggtagccatggaggatcgccgctcttatgcgatccaccgcactccggcgttgccacgcattgtcagcaattcatcctctgtcgcgacggcagaggacgcccacagaggaggtaattacaagcagcggccgatatgccggggggacgagcggttgccgatgccgccgctacacagcaagcgccgccgcgacgaacaccaccgccgggactaccactacgacgacgacgactacgcctatcgtgcgagcaagaagaagaagcagcaggcggccgctgaacaggcggcgcgcatgccgaacaacaggacgaccagaccgacgacgcggcgcgcgtcgtcgtcgcgctcgcgcaccaaggaagagagccatgcccgcggtggcggcgccgcgccgcgacgcgagaacaaggatcgcaaggacggcgccggcgggcgccgctcgcagcggcgcgcaccgacgatcagcggaccgcgcgtcccgccaccggcgacgccgcctccggcggcgctaccggactcgttgacggcgcaagacgcgctgagcgcggccgcggcgagagcgagggagatctcgctgatgcgggaggaggcacggcgggagctggccaagatggtcaggaccgtcgagttcaacgatccgtacatctcacccatggacgcgctcaagccctgaccatggcgtacgtacgcctgacaatttgttttagctcttcttaggttgtgtttggtacgaggggtgcacgtaaaacagaactactcatcaccgatgattaattaagtattagctggaatatttaaaattagattaatattatttttataacattttttatatattttttaataaacgtaccatttagtaatttagaaaatgaatgggtagtgctgaattcagccttactgttggacacgcgtatatgttaattcagcatatcaatttgtttagccaatggcaaaatttagaagtcctatgttgaacagctgtactatttttgtgaactgaacgattggtctgatctatctttgaaaaataagtgccgatttatttttgtgaagcttaattaggttgatcgattggtcagaactcgggtgtaattcagcgtagagttgaagtaggtgatcatcagcatcactagttcagtacttaacaccacgcacatggcacatgctcctcgaataaaaacctgcatgaaaattaaagcacatcaatggtggggattaaaagtggattaaccgagcttccgatcgaacggacgagatcaaatcaaccaacggaaacttggcaaacgcgctacccccctcatccaattctcccgcgcgcgcgagacagcgagaccgactccgactcgaagcgccgcctcctcttaagtcttaacccaactggtttgagatctgcaccatccttcccttcgcttcccatccactgcccaactccctcttcctaaaccctggagagctcgcgatcctccactactccgatcccctagcgctagcaagaagcagccatgaagatgatgagcatggcgcagatcatgaggaagacgagcgtggtcgtcctgcaggaggaggaggatctcacctcctctgcgacccgccgtgctccagctccgccgcctcgcgaggtagtacgcgtccgcctccgcctcacccccgcccctgtcgccacggcggaggacgccgccaggggaggcaagatgccgccgccgccgccgctccccacctcgtgcgagcaagaagaagcatgtgttgagcaagaaggaagaggcggcccttgcccgttgctcctccgccgcggcgcgacgcccgatgatcaagaactgcagcggcggcggcgagcgctcgcaggagagcgcgccggcgccgtcaccgtcgccggcgaggctgggctcctcgacggcgcaagacacgctgagcgcggccatcgccgtggcccgttcggtcatggacaagcggagggaggtctcgctgtggagggaggaggcccacggcgggagctggccaagatggtcaggaccgtggaattcaacgacccgtacatctcacccatggacgtcctcaaaccctgatcgaacatggtggtgccaagaattttctttcttaagctcttgttggggttcgagatatgaaattattagccatgtgtttattgtagtgtttaatgtcgaaatcattggcaattttgttgtgagccagtggtttaacctagaattcttttgtacattgaaacagacaaatgctctgctgttagtagtaattatgaactgcatgtaatatcagatgtacttaacaaacattatctattctgaactgaagagtactactaagttttttttttcacgattgcaacaaaattctgtcgcgatgcggattaccactcattatgagctttgaattagttgggccaaaacacttagttcgtgggcctctcagcctacaaaggcaggcacaagctgcccagaaccagaaccagaaggcccagtggctagccacgcacaacccctaaacccggagggcctctcctctccgacggcggtagcgcggcgtgggcggcgcgcgcgctccggcggccaaggctacggcgccgggtgcagcggcgcgggaggatctggaagggtgcagcgcgggaggagcacagccgccgagcccttgctgcgggctgcggcgcggcggcggcgaggcggcgagccgcagggcaggccggcaggcggcaggcggcaggcagcggctgagcggcggccagcgtcggcgtgtgcggcggcgactcggcgtcgacgcggcttggcggctgcagcaggcgcgggcgcggcttggtcgcttggaggcttggccgccatctcgccatctccgtcgaccgtcggccacctcggcacctccttgaattgtaagatttcttcccaatttattattttctatcattttggtatttcatatgttggcactttgatatgtttaccaattagtatttctacatatttaccaattctatcaatgtgtgaacttatgatcaattttatgttatatacgctaaatattgtaattattagtgtgttatactccctccttctctaaatgtttgacgccgttgatttttttaaacatgtttgaccgttcgtcttattcaaaaacttttgtgaaatatgtaaaattatatgtatacattaaagtatatttaacaatgaatcaaatgataggaaaagaattaataattacttaaatttttttgaataagacgaatggtcaaacatgtttaaaaaagttaacggcatcaaatattttggaatggagggagtactatacaagctaatttttaggctattaggtgtatgaacaaattttttttacccccttgtcattttgaatacacaagttcaaaaagctaggcccacagctgaggaggagccggcaagccttcggtggtccagccgtccagcccgctagggcgcggcagcgtgggagaggggtgggggggggggcgccaggtatcaactcctagctgctagggcgcgggcgctgcggcgtggccacggctcggagcccaggacggacctacggccgaggaccatctgattgttgtgagagttctgaggtgagtggatgaaatccgtgaatcccccccattctccaattgaaaatttgaaaaaaatgtgtagtccctgaatgaatgttacggttgttcatcaatccatctatctcctgtgataattttcatgtcattgtggactgaaattttgatcggtggtgttgattgtcaaattgtgcaattttaggatgatgacatcatttctagattacaatgcatgacaaaacacaaagttaaacggtactctctccgtgaattcacaatgtaagactttctaacattttctacattcataaagatgttaatggatctagatgttcatatgtgtctagattcattaatatctatatgaatgtggataatgctagaaagtcttacattgtaaaacggagaaagtaggtttcttaattattttgtagtttgttaatattagttgagattccactgatacaaactgtttgtattttgatgtatgatactgtgaacttttcatattgaataataccttgttacttcgaatacccagccgtgcaattctacatccactactggctgttgagaaacttggtagcaatcacaagaaagagcatcaagaggcagttgctggcactgaaagtgaaaagtaagttctgaaaatcaattcggtttttcttactagtttgttttggaaaaatgtggaggacagaggacagagtttaaagttgaattgaatcacttgttaccatatcatactcacaattgagcctctcactctgcacgaacagtaggtagcacacgaagctgacaactgggccttgccttcaagttttctcaccggatgcttgccacccccacccactgcctgagctgacactccggttgcagaacctcgacctgctcttctgattgcagtcagctctcatcggagccacagcaactgctacataatgtctcttgctgcggttgcttctccacatttcccaccgtcatgggcctatcagatccgtatggctgcttcccagggccaatttctccacgccatctctctcttcctacaaatgcgtgcctctgttgcgccccgatcatctgttccggcctccctccctgctgcactcaagtcctgcgccggccttggcctctgcactcttgctgcatctctccatgctctcgccatccgctccggttccttcgctgaccgctttaccgccaatgccctcctcaacctctgcatcaagctcccaggttttcatcacccctttgggacaaatgggcctctggggaaggaggcctggaatcagctgcatatgagagcatgcggaaagtgtttgatgaaatgctcgagagggatgccgtgtcttggaacactttgatattgggatgtgcagagcacaagaggcaccaagaagctctgagcatggttagggagatgtggagggatggatttatgcctgacacgtttacactgtcaactgtgctgccaatctttgcggagtgcgctgatatcaagagaggcatggtggtccatgggtatgctatcaagaatggatttgacaatgatgtttttgttggaagtagcttgattgatatgtatgctaactgcactcaaatggattactctatgaaggtgttcgacagcttctcagactgtgatgcagttctgtggaactcaatgcttgcaggttatgcacaaaatgggtcagttgaggaggctcttggaatattccgtcggatgctgcaagctggagtgaggcccgtgcctgtgactttctcaagcctaatacctgcctttggcaatttgtcattgttgcgtcttgggaagcagctgcatgcctatttgatccgtgccagatttaatgataacatatttatatctagctcccttattgacatgtattgcaagtgtgggaatgttgacatagctcgtcgcgtttttaatgggatacaatcacctgacatcgtatcatggactgcgatgatcatgggttatgcattgcacggtccaacaacagaggcttttgtgctgtttgagagaatggagttgggaaatgtgaagcctaatcatataacttttctagcagttttgactgcatgtagtcatgctgggttggtggacaatggatggaagtattttaacagtatgtctaaccagtatggatttgttccatcccttgagcattgtgctgcacttgcagacacccttggtcgtgcaggagatttagatgaagcatataatttcatctctgaaatgaaaataaaaccaacttcaagcgtctggtccaccttgttaagggcttgcagggtccataaaaacactgttttagctgaggaagtggccaagaagatctttgagcttgaacctaaaagcatgggatctcatgtaattttgtcaaacatgtattcggcttctgggagatggaatgaagcagcacagctgcggaaatctatgagaatcaaaggtatgaagaaggaaccagcttgcagttggattgaagtgaagaacaaattgcatgtgttcatagctcatgataagtcccatccctggtacgataggattattgatgcactgaatgtttactcagagcagatgattcgtcaaggatatgtgcccaatatggaggatgttttacaggacattgaagaagagcagaagagagaggtgttatgtggccatagtgagaaacttgcaatagtatttggtattattagcacgccacctggaacaacaatacgtgtgatgaagaacctccgagtttgtgttgactgccatatagcaacaaaatttatttcaaagatagttgcaagggagattgttgtccgtgatgtaaacagattccaccgatttaaggatgggaattgttcatgcggagatttttggtgattcaggatgtcttcaaaagattgagtgcatgcttatggtcgatatcatgcttgagcacccctctccagggcattatggtcgatatcatggttgtgttgggtcttcttcagtcaccatctagtgctacatgtactactctgcagctcccatttgccataggcacatgtttgcaagtgatctgaatgccattgccataagcaggggcagccgccactcgacgcctctgccatctacaattcttctctccgccacttcgaaatcaggtaaatcttttctttatgcacgcaagatgatcagctaaattaccaactgacatgcacaggaatctaactgactctgattcttatttcccttgacctctcccagtgattccaagttccccttgcattctataagcctgtcttatgacaacttggcatggatgttggcgctggtggagatcagcgctgatctttggtcaatacgatcggcactccaagggacggaagagattggctgccttgtttatttcccttgtgtgatcaagctttttgttttggaggaatgagactgtgggggtgaagttggagatcagttcatgtacacttgtccatggcgctatcacctgtactgtctaaatttggtaagagtatttgcaatccactgcatcacctcctgtgtaatcttctaattttcttctgttagattgaaaattttgcgcgacacttgcatctgttgtacgcatagaattcatttagttgagcttatatagtagtataaatgttcttatatagtcaaatttgttgagtttgattcatttcaaatagatctcatgaaacaccggcagtggtttcagtgattgggtttattgtgccctttttcatatgaaatttctcttactgtttaacttgattcttcaaacacatggatgtacaaccaaacaaatttgaagcctacattccttctgtgtttctcccatttcaaattccaacaaatgccgattttattcatagtcttgacgaaaagatgccaagatgccgttgaatttatcagaacggtatttctcccgctttcccctgctcttctccgcctccccggcgaccggcgacgctgtcagccgtgtctccgcggcattccgtcccgtgcttaacgacaaccatgcacggcctggatgaggtaccagatacctcgtgtggcatatatgatcagaacaatttttttgatcatgaacaggaaaatgaaggaattcctatattttgatcaccatctgtaggcacgagcacatgatcatctgaatttttttttctttggtaagatactaattgcgttcagacaaaacaggacagaagtgaactaatgctcaagcttgtcagaacaaagcagactttagagttttcttttaaggggtgtgggggtaaagttttagcgtgtcacatggggtgttcagatactaataaaaaaactaattacagaatccgtcagtaaacaactagacgaatttattaaacctaattaatttgtcattagtaaatgtttactgtagcaccacattgtcaaatcatggagcaattagacttaaaagatctgtctcgcaaattagtcgtaatatgtacaattagttattttttagcctatatttaatacttcatgcatgtgttcaaacgttcgatgtgccagggcgtaaaatttaggatgggatctaaacagaccctaaatttcatatattcttcgtagctcattttctttgacgtgtatttttgtgtcttacatgtaaggtcgtagctcaattcacaatccatgttttcttctctcttcagaccggtggtttgttactcaaaaaatatgcagtgctaacttggcaacgcttccatagttccatccggaaatggaaagcggcaaagcgccgacttgaagcatcaaacgtctccttcccttgtatataggcaaaggcgcaggggtggcagccatctctacatccatcagttcgcgtgagcttcctaaaccctcgagaaaacccagagatcaagaagcgaggagcaaaaagccttggctaagagagacacgagcatggccgcgccggcgccgccggcgccgccacctcggccgccgttcaaggtgcgcatccgcatcaaacccgcccgcgccgcgagggcggaggaggacgccggcaaacaggaggagcggcttccgatggatcacccgctctccaccaccaccaccaccaagcgccgccccgagggcgaggagagctccggcgcggcgagccagccggcgccggagcgcgtgaatcccaccgggacaaccacgccggcggcgcgggcggcggcgtcgtgctgcgtgaatgaagaggccctggccagcagctcccacgccggcggccgcgacgacggcgcgagcgcgatcaagaaatgcaaggacggcgaggggaggcaagaggacgccaagaacgcgcaagaaagctcggggatgacaagcccggccgtgcattccgccagggccacctcaccggcgccgccgccgtcgcgcacgaagaaagagaccccggtccgcgcccatgccgccgtccgcgacgacgacgcgacgccgccacgcgcgatcaagagctgcaagaacggcgagcgggggcaagagaaggacgccgagagcgcgcaaggatgcgcgaggacgagaagcccgccggtgcgttccgccagggccaccacaccggcggcttcgccgtcgcgctcgaagaaagagaccccggtccgcgcccacgccgccgtccgcggcgacgacgcgacgccgccacgcgcgatcaagaagtgcaagagcgacgagcggaggcaagagaaggacggcgagagcgcgggacaatgcgcgacgacgagcagcccgcgcgtacagccctcaccgacgccgtcgccggcgccggcggcgcggccggatcccagtgcggcggagaactcgctgcgcgaggccattgagagggcccgcccacacatgcggagggacatcgcgcggcagagggaggcggcgcgacgggagatcgccagcatggtcaggaccgtcgagttcaacgacccgttcatctcaccggaggacgtgaacaagccatgatcatggcgtcctcctaacaaggtcttttgtagctcgttttagggttcgtgatctctagttgttaaccatgtgttagggttgacgccattggcaatcggctgtttttgttgtaaaccaatgcctcagttcatgattcttttgtcgaaccgagcaaattgctctgctgtacattgcctattctgtactgagtgacgtaatttcaaaagatgaatgtcactatttccgttgagattgattgttcaaatcagtagacatcgtgaacattaactgattaacaggagtgtttcgtccgaccagttaatacagtatctacaaacaaattttgcatgcgctgaattcggtgaagtatcatgaacatgtgggctagagtttagggcttcagaactgcctgaggggagcaatgggccaaaccaaactgcacatattcaggtccatagtcctctatgaatatatattgaacttattgtatgtttgatcaaagttgtcattacaatacgcagacaaaatcaattcatattcagaatacagatacattgcgtaacaaaatcacttgatcgaaaaatttctcagctttggtgaagcattatctaaaaaagtgttgttcagggaagagaggttgactgtcaacgcaaagcagaaaccaatcagctcaattatatcctcgccaatgctgcaggactgattggaatgatgccagaggatgagaccagagcatcaataggaacatctgttgagttgactgggatgatgccttcctccaaaatttgcaccgagtatgaaagcgcgacttcaaaatagaaaatcaggccattagtctatcatttagcaataatagtgctagatcggatttcatcatttaaatgtaactatgaactgcaacgcacaaaagtgtgcccactaggtatacgtatttcatgggcatgtagaagtaaatgaaatgcaattacaagctttggttcagttaaattataatgtaacttctagttgacttgttaattcactacgtgattaaggaactagtcaccacaatttagtttctggttggaccaagaatccctgatacccttcataaaagaatctgaaagcttgttgggatctgattatgaaatttggttcagtattgcgggccaaacaaaataatcattgtagtagaaaatacaaaatagcatgttacatcaaggaaccaacagaacatattaggctaccaacaggttggcccctctgttcatggtgttggtgctacttcaaaacagctcactttggtcctgtttttgacattaagggaccaatagtaaactttccgtaactataatcaactaaaatgacataacatgtcaacgatgtgtaataacaaacaaaaagagtctaaagtaaacaaaaacaactgaacttctggaaatctgcacatcatacctagaagaggctgatcccaccctttctctttagcaagttcttgatatctcatcaagaatgtgtcatagtaccttcgatgaacaaacatacaaatatataatttagatgaaggaaaaatttcaggctttggtctaaacaatactaagtcaaactggcataaatgaactattggtgacaggatggcattaaaaagatttgaagttcatgtgccccttgccattatatgcattttagatgcacttgacgaattgtggaccattaagcagattgtgttaaatcaaatgagatacagccaaagcacaaaactaatatgcagagacatcatatactttctccctaacagaggaaataaaatgcacatcatagagctgtggaggctataaaatctaaaaaagaaagcaaaggccgcacccacacgaatagcctgagttcttcaaactaacagcgaataaagcacagaaagtaagttatgaatctaattgtcaagatgccaacccagattccacgacttatgtttacacagtttagtttctaaatccacacgctacactgcaaccattcaactaccagctcttacatttcttagatgttctgcagatgttgtgacaggtatttgatttgtgctgctagaccaagaactttcatccatgtggatcaccctacaacaagtttctgcatctataaagtatgtttaatttccactgtggtaggtaacttttctctattacttgggctgctaatacactagagcatccttggacttcattttggaatgcttgcatgccaaatattcagagttagcaaaatcatgacatgaataagttgttgaataggacccaaagttagcaattgaaccactgcatagatattggatgaagatgacactaacagtatttggcaacttcaatacaggcagttattaaagtgaaagatagaataatgtgtagacctaccctccaccacgtcctaatcttcgtccagtcctatcaaaagcttgtcctacatgaataacaatcattattcaattgaatgttcagtgatggatgcagtgtattaagagattgaagggcttaccaggcaatagaaaaagatcaacaggggaagaggttgacaacactgtaagcattaaaagaggatcagtgtaatgcatataaatcatattagctacccagtgatgcactaacttaatcaaccgaggaaaagtttcattgtatcacctagataaacttcataccttcttcacgagcattcccactagcatcaagtggtgatggttctagaatgttcattgaatttttaactaaatcatccatggtagtgattttgagcatccgcatattgcgattcttatcttccactcgaggaacataaagatcctttgcatgtccatgttctgaaacaaatcaaattgttagaagcaggagaaatcaagggggcatatctgtatatagtactcaccagaatttggggataaaacttctgacagtacttttgatgtatcaacttcccgcaattgtgcacagcttatataagcacataaccgcttgctttctttgaaccaagaagagttcaaaattgcattttgaatagcctggtctggaaatataagaaaaaacacatccataaacttcgcaaatcaacacaaacaacacctgttgtgttccagcaacagaagcataagtagcactgacgtccgcattacacttcaggtctttgaagagaaaaattaacaaaacaaaaatctacttcgttgcagttacagaagatggggggggggggggtgtggaaacaacacaaccaaatatagttggtccagctacagaagcaaaggtagcaacccttttgtcttggtgtccttctgtgattttctcatgacaggcagttcgattcaattgttaaacgacgcctgccatcaggttggaatgtccctaatgtgatccttctaatgctagctactgatgagagattgaagtgtatcgccaagttaaattttgcttgcctaatgcttattcagacatgattttatcatccttttctgtgagcgccaatactaatagccagcacagtaaaagcagcagcccttgtcggcaaatcgacgagcagctggtggccaacggctcaatcgatttacatcagggacagcggaatcagatgcttgggccatatgagcgagaagggggatcaccttcgctggcgcgctgctcgggggtgagggccctgagcgccctccgcacctcggaccgcagcgcgcgcttctggtcggcgacctcctgcgccgccgcggcactcgacatggcggcggcggcggcgggcgccggcactcgtagccggagcgaggggaggagggcaaggtggtggcggcggcgggggtaggtgggggcggatgcggcgcggggcaggtggaggaggcgcaccatcagcgaggccgcgccatttttaatcattgccagtgtgtgtgcgcctctgccttgctgccgtgtgtgtctctcaccgcgcggtcatctctgccgccgcagcgggtggagtcggagtgggccgggccgaaggtaaggcccagctacgctcgacgaaacctgattagaatggaaaaagtacaccgaaggtccctcaacttgtcatcgagttacgaaatcgtccttgaactgcaaaaccatatacaacacatcccccaacttacaaaaccagtgcaaacaatatcccacggtagttttgactccggttttatcctatgtgatggctaaatcagcgtaggatctacgtggaccccacatgtcagggtggccatgtcatcatcttccctctttcctcccttctctctatgcctctctatgattttcgatgaatgaccctatggtaatgcttttatctctattctatggaccagtcaacttcactaatgaaaacggattacatctttcaaaatattatttagtactacctctatctaaaattctttatattattggataaatggagtataagattaggtgataaacatgaatagtattttatgtgtgactaatttttattttttttataaattttttaaataaaacggatggtcaaatgttggacacgatacccacgacgacacttattttgggacggaggtagtaatagtaggcttgttctattagggcaagtactataagcccctacatactgctcctaaatttgctacataagattagatgatgaggtggaggagagaagttaggagagagagaatgagccacgcctcatgtaaggagtaacctctacacaatctccaagaaaagtgcaagatgatgtgagagtagactaatattggagtttgtgtattatatgtgatatgttgtatgtgttacctcttaattaataagaatatgacatggtctaaattagatgtgacatccacctccactataaaacttgccctaagctcaacgatccccacaacggatcacactcctatgacataaagtcatagggacgtgggtcactgacgtgtgggcccaacccttatgggtcccacatgtcagtgacaatgtccctctgactttacatcagaggagactcatcccacaacaacatggactggggtgtggaaattccatttggattactttactactagggccttgtttagttctcaactttttttttcaaacttctaacttttctgtcacatcaaactttcctacatacacaaactttcaacttttccgtcacatcgttccactttctttaaactttcaattttagcgtgaaactaaaaacaggctgtgtttgcaaccccttgttcccaacccctctccctcgttttccgcgcacacactttttaaactgctaaacggtttgttttttaaaaataaattaatacttaattaatcatgcgttaagagcaagtttaatagtagtatagctaattactagctacaattcatctatagccaatctaataactcattcatacaatagttacatactacattattaatacctagtcccacctgtcatatacacactgtgtcttggaatccatgctacagctggctataaatctgtagctcgctacttttctttcttcttatttatctctttaaaatatattttgtagctagtttatagtctgctattgcactcgctctgatgaaccgctcagttttgttcgcaacgattcatggcgaacacacccacagcctagttcagaagttgattgcgaagcttccaggagaagcctgaggctaacctctgttctttttctaacagctggcacgaaaaagtaaggcgcggtgggggtggatggcatgcatacgtcaccggactccagactcgatggcccacatgcagtgaaacaggggtaggattgttgggtgtaaaggttctaaatcgaactgtgcgtggccgttttgatccgacggtcacaatcaactggaagctaatcggacggcccatacgatcgtgtggcacagcgctcgaggatacaaatcacgccttcaggtctcacggaccacgcctctcctcttctctcctcgcaaactcctctgcactactgctttaccctctcccagtctcccctcccccaactccggcgatggccatggcggcaccggcgcgcgacgacgaggagccccaggacggctactactccatcgtctacgagttgcatgctccgggggacgacgagtggctgctccggcacctgtggagggaggcgcacccgatggcgcaggcaggcggggaggccggggccccggttctcgggaggatgatggcggcgatgaggaggtggtggtggcgcgcggatccgcagctacatctcgggagggcccgtctgcttctccgcaggtggagggcgggctccgcctccgcgcgccgcctcgcgaggtggaggagggagggcggcgtcacgccgcgggtgctcctgcagtctgcagaggtggtggcggcgcgtccatccacaggtcgtgctcaggggcttgacggccttgggggtcgccaccatggtcttgacgttcctcatcctcaaggacatcgaaggctacttcgacttcctcagcatccgttacccatttggtaaatccatggcttcaagtgttcaactaggtcgtagctaagcactaatctctggctggatcgctaactaattagctacaatctgtgtgcagcgctgccatctttcttcctccgctacgagcgggtgatgcacgacttcgttgtggcgggcgggatcaccgtactcaccccgttcatctggggcgccctcgtcgccatcatggttggtctgggcgctgacatgggcccgcttctggagttagatgttcttggtattaccgatcgattttgctatatctcactcgaaagatttttccttatctctcactcgattttctcactcaaatttacagtgcattttcttgtaagttacagtgtaatttatgaaacttacactgtaacttttgtaagttacactgtaatttttgaatcttcgcatgtaaattttaaattttgtattggatttggtctttttcttgaggatatggtaatttagtgtccattacggtgtttcttaattgctttttctttttattatatctatcggattttaatccaaagattaaaaatctgtgggatacgatcataaaaatctttcgaaagatgtataggtactcccattaccgatggtctgcagctagatggccgccctgtggtgccggagccggagcagcaagtccatcagccggatccggatgagcccgagcacgtgtaccgcgtcgtcctgcacggcgaggagttcacgttcctcaccaacattccgagagccaagttctatctcctgatagctgctgtttttgtcgtcgttttcttgttccaccccttcagcgctgagacctgagagcggtatgatcctaatttcttattactatacattgaattcgtgttactctgttgcatttcaatttcgtcgccgacttcaaagcatgtgcctgtgtattgttcgattgcttgtacagatttgttggttggcgatgagtgatagtgcttccaattttagatgctctgatgttcagttatgctgtgattgcatggttagcaagcagtccatatgtcatttgatcaactgttgctttctttcaggagtacagtaaccacaccaattttttgtgaaatttgatttcgttcctagacatgccatttcgattgtaaagctatgttaagaatgcaagtgttccttaccaatattgtgtgcaactgcactaatttgctgtgcatgcttgttcagtagtcaggttttaagccacctcttgcttttttttaagcccttgaagttacaatgcatttcttttgttatggttagctatatgaccattggtcactgctgcatgttaacttgttaaattgctagtgtccctaccaaatataccaactgcatcatcgagtgctgttgtgattctaatccctgtgcagctgtgcaatgatatgttggggcatgcttgtacaaccatataggttcctgtggcttataatttcatttcttgttgtgatgcttatctgtgcagttataacccatagcttagtgattcgatttctggatcaatatccactgcagttatagtacatttcttttgttatggttagctatatgaacattggtcactgctatactagttgcaactgtgcctaccagaatttcttttgtgttgtagtgattttaagtcctctgtgcaattatactgatctgttgggcatccttttgtgcaacaatataatacaagtccctgtggcttaatggttttgtttctagttcaatgcccatcagcccattaccattagtgtgcgtctttaattttgatctattttgtggcttctgtgattttaaacccatgcctaactgaacaattgatgtgattatcagtttgttcatgtctcaggggcgggcgcttctaacaaagttggggctctctcaaatcggcgtcatgtctttggtttcggtttcaatctttagagtacttctcctcggctacggttgtgttactttggctagctgttcgcatgttctgatacgctaacgttctggtcttttactcttttgcaacaacccttgatggaacattacataggaagtagctgctggagtagtattaagaggcacttagtaccatctgagatctgagaccaccttagttggaacactattaggaagtacctgtcgtagttattacactattactcctagtaccatctgataactgcgatatgtgactttacctgttttgatgcttgtcaaaactagtagtagtactctatcatatatgtgctgagatgaaccattgcaccatatatggtgcaagctaaacagaacattggagtgcagtctgctttttcttatgcatttttgtcaagctgaaatgatgcatgttctcccagttgtccacaccgctcaatgtacttgctgttgtcgcttgtgtaatcagatattaccatgttctcccttgaaattaaggaattagtcggccatatcatttatgttggttcaaatgttgagagggattgaagcggtaacactttgtttggttttgtcactatccacaaactaatcgggggctcggggcatgtttggtttgtactatatgttgtgttacaaaatctgttattctttaggggaaaattctattgaattgctctgtggtgtttagtacacgaactatgtttataccggtccaagctctaggtgggcctatgaaaaacctggtttgttttgggctaaaatccgtgtctgaagtaaccaggaataaaggtgtcgcgtacaaatgctgtactaaagtagagaaaactaaatcatttctttaaaaaaacacagtataaatcgttcccaaacgcccgtgtgtttatcctataaacatatactctatccctatgagcacctctagaatattggactgttatattttgagattgatgaagttgctgcaagcgtctcatttggactcatttggatatgtttgggcagatcctagtttatttttctctgttttagggtgggtattaagccttacataggatatgttgaaaagaaaagaagaataacaaacgaaaaatagttcagaaaacgggtcatcgttgcgatcgaactcatgaccccttttcgcatgtataaaggtacgatcatacgataaattcgtatgttatatatcacattaaaatattagtactgataaattctacaggtcttttaaatactcatgaaaaatctacagttagacttaaatcctattgccctacaaacgaagcaaaaggtaccacaaatatcgggtctccgctcggtaaaaagatattt

SEQ ID NO: 1705 - DNA, 1582 bp, Oryza sativa
gtccattcgcggccgggtcgtcgtctacctcccgccggcctgcgtggcagccacgtaggcgccacgtcggcgccagctcagcctagaccgggtcgagccgaccccggtcagtccctccccgtgcgcgcgttccaccgcgagccgtgaggctgcgcgtgggcctgccgcatccgcgtccaccgcgaaccgcgcgcgtgcaccgcgtccctcccccgcccgcgcgcatgagccgcgtactccctccgcacggtgagccgaaccgctgacaagcgggtcccacccgggaccgcgcatggtgagcccggtccaccggctctctctctcctccctcccgcgcgcgcgcgtcttgggccgccttgggccaccttcttgggccggccggcccgttaagctcggccgagccgccctttctctcgggccgcgccctagccgcccgagggaagtctatatttcctccctctccctttttcttttcttttcttttccaaaaaggatttaattaaatccttttcctttagaccaaaaatccaataatcttagaaattcaatatcttcccaaccgtaaatccgtttgactccgttcaaattccaaaatttctcaaatctcgagatctatctaatggcacgcttagaggtcattaatagggctttattttcgccgtttgttgagttgtcccgttttgcgtatagtttcggagcccgaagacccgcagtgcgaggatttcgaggatcaagctccagatctcgagcaaggcaagccacctttgaacatcttgagcctatatttgaaatctaattatattgcttgcaaaatattatgcattgataggattgcacttaatctgttgttccgtctgcagggcagattggcagacctacctaacttgttgcatttgatccttccattgttaattactataccatgtccccttgtaaccatccagttgcgcctcgatattcgtgcaccctgtgccagtatcgacggtcgccttcaaacttaaaatctgagtaacaacttgggtaaaactggagttttacaaaagacttggaaaacccgacacctgggtcggtgcttgcgaactaaatgaatttccaaaaccgcggaccgggaaatgtaccgggtgtacggtttcccgctctcgcacttaaggaccaattccttggaatttcatccaaacataagtcaagtacgaccacatgggtggaatgggacacccctggctgagtaactagcttatcaggggagccttgatgccgagagacatgtggattcgccggggtggtgtcggggaggacccctgggcttcctggcacagtatggtctgggacctaacctgttgttggtctaggacccctctcgtcggcatatggtaaacctgtgtcggctttggaaattccttgtcatgaaagcttggaggtctcccgacgtggctgatcccctcgggctgggtgatccgggttagtaatgtcgtgtgggtaaagtgtaccccctctgcagaggttaacaaactgttcgaacagccgtgcccacggtcatgggcggatgtgaggtgattcctagcgtagtttggtttgactactg

SEQ ID NO: 1706 - DNA, 675 bp, Oryza sativa
  unsure (1)..(675): unsure at all n locations
ggacacgccgaattcagtttccactatcttggtacacaactgatccaggaaagccctgtcatgagaaatgatgaccatcggcacttcctgcgtcttgaggtaactctccagccactcaatggtgtccaaatcgacgtgattggtcggcttatcgagcagcagcaaatcgggatcctgcacacaatcaatttcagcattggaaatgcacacagacactaaaaactacaattcaaattcaacaatccagaccaaattcatcaccaattggccataataccactcatttttctctccatcacaatatgacaaccattgattgctacatgtagagctcaaattttcttttttatctgtacctgaagaagaatcttgccgagggacatcctcatctgccacccaccactgaaggaggcgacgaggcggtcggcgtcctcgggagcgaacccgagctcgggcatgagcttctggatcttgacctcgaccatcccgaggtcgacgtcctgcgaccgccgctgcagcaggtcgagctcgtcgaggagcgccccatgaggtccatgtnctcggtggcgcccttcagcgcggnctgcaccttctncaggcgggacctcaccttcatcttctnctcgaacgcggcgaggaacctcctcctgacggtgcgcgacgcgcacacctcga

SEQ ID NO: 1707 - DNA, 8397 bp, Oryza sativa
  unsure (1)..(8397): unsure at all n locations
atgaatttagttcccaaatagactggtgcaagggtcttcaaatgcttatccatgatcctagaaaagatttagataggtgtccatgaattatcatcagggtcaattaattatcatcaggtcaattataaaacaacttatttttaaaagaacaaattatgtcctacttgcaacggtaaaattcacggtggtagaaatggcagatgaccttttcgctgccagtgacctctcctaggaagtccccttcagttatctccctatattcaccatgaccttgcctttttagcacttcacgcttctcgacctctttctgttatgcacaggaaaatgaataacttaaaatgaagattatccacacaggttcacaaccttcaagggcaatgtgcagatcagtaccttcagagcagcaattctctccgcatgcaacttctcaagctctggatcctatagttgtagttccacagcatgatagataaaaaggtaatcagtgcttcaaactgaaggaaaaaaaacaagagaaatatagaagatactatagttaaactcacatccaataattcatcaagatcaacctcatcatggcttgcatttgctgcttgggctttctctttagctacaatttcctaacatgttaactatgtcagtatacaggaaaaaaaacaaaaggggacagagagagtagtattagcctgttttgaaagcaagtttgtttttaaaaaatgcaagaggttcaaagcactggaacaagagtgtaaaaatacagtatttcacccccattataacaaggacataaatgaaaatgacccaaacaataagagaagatatagctcgccaatcatatcaaaaggagtgaagaatcaagtataaataatggaaacgagtgatgtgcgtggaggacagttatatccttttgtactatactttcgatgcaaacccccaacagtttgttgctgtcaatatacagaaaggccattttgatagaaaaatgaatacctacaaattttacataacatgaattcatgagagagcaaaaggcatcagaaggtaatccattttcaacatacataagttaagaacacccgaatggagaatgatccactgcaactttgattattgcaaacttgcaaaccatattccaatctaaccacatttataggctgcctaaatgggaggagcacccttgtttttgtgtaccctgaggtgccataaagcattatctcctatccagcatagaatatactggtctctagaccctgcaccatcactctatttgttgtcctggaatacatgactggagctaatccatcctccgaatgaactgtcccccaccccaatgttcccagccaaagattggatcatgctacagcaacaccaggacagagcagtctggaaggcaagacttttcacgtgagctaacaccactcccatagccaaatgcccaaatccaatgcacctgccctttctcaagacaaaaaatcacactgttgtgttaccaggatcatcctccacgttgatctatggttataccttccacaatccatgcctgtggcaaagctgagtggaggcaaatcagacacaagttctaaagataggtgtaccagactacaattcactcccaatcaaaaaccaagatttgatcacgcgctggttccgagatccaggagcacactggctccacggccaccaaccagccaatttcacgacccaacccgctggatcagttttttacccccattacaacaaggacataaaatgcagttgacacaaataagcagagaagattataacttgcaaatcacattgcaaggagtgaagaatcaagtgtgtgcatgaaggacagttataccttcctctacactttgatgcaaacaccacattttgttgctgtaaatctaggaagaatatcaaaaggattacctgcaaatgttacatgacatgcattcgtggcctaagaaggtaacccattttgaacatgtaaaagaacggccagatgtatcatgatccactccaactctttgttattctaaacttccaaaatattatactcaaattgatccatgtttattggctacacgtgagaagcgccattgtttttgtgtacactgaggtgtcataaagcagcatactcctattcagcatggaatacactggtcttcaaaccctgcaacatcaacacaggactggagctaacccatcccctttatgaactaaacctccccatgatcccaaccaaataccagatcaagctaataccacccaattgctaaatgcccaaatacatgtgcctgccctttcccaagacgagaaattcgcattgtcgtgttaccagatcatcttccccgttacctctaccttccacaatccatggctgcaggcctgcagcacagctgagccgagtgctccgcggccgaatcaaccgcccgtcaaccccactcccaatcaagaaccgagattcgattcccccccgctggtgccgagatccatccagcagcacgcccggctccgacaccaacctccacagccaattccgcgagtgagtgagagaagtcaccttctggtagtcgcgggcggcggcggccatgacgttgccgaaggccaggttggagagcgtcgacttcaccgcgtcgggatccatctctccctctcggcgctcgcctcgctgctactccctccgctacgctccgccgcgccttcttcttccccctccgcaaccgcggcgagcgccgccgcttctgctcggccgccgagatctcctcccctccggctccggttcaggtggcgccgcgagagaaagagcgaagtggtgcgtgttgcgttgcgggtgcaggtgaaatcaaagcccgatgggccaaattctttcaaactgttccagctttttttaaaaaaagtatttttctttcaaactacgtatatattgactaacctttcataaaactataaatataaatttaagatgatgtatcgtgatttattgttaaaactgtagttttgtgatatatcattttaaatttatagttttacgataatttaatcaaagtatattttaaatatttagttccgcgataatttaattagttttgtgaagttaattatctttttttcggttatcttttttttaagcaccacttaaaaagttgcggtattggtaccacactttgaagactactgactgagtagaaatttcctctattctggtttaaaaggcgcattcttggtttttctggtaccaattcaaattcaaatacagttttaccgtattgtcatctggtttaaaaggagaattatttgtctacgtttctactcaagctgtcaccaaccaaagtatcaaacacagagcatcaggtattcaggcatccctaccagacaaaactcattgcaaggtttcctaataccagaagcacatattttcccttgttcagatcaccaacctaacatgcacaagaaatgagctcatcgaaataaaactgtgaaaccattcatcgtataaaaatcaaatgctgttgtcatttttcagataggtattcccttgttacaatgtacaaaaaaagacaaacgatattgttgtgcatttggctgcttaaaaaccgaaacgcctgcttcaccgcttaatttgtatcatctcctgtacagctggatagtgccgcaagtcctaaattaaggtcatcattggtataatcatgggctacagattatagaagccccagagacttcagctgttggacatgctccgaagggagagggggcggacaccaatccgcgcgctcgccatcgacatcttccacaacatattcctgtaagaaccagatacagcttaagtgcagaaggaaataaactaaagtcaaagactgagaaataagcggcaaacagaactcaccttagttaacattcgttttgcaagaatatggtagtgtctctgccagatccgctgacccaccatggttgctaccaagacgctgtagaaaatgccgataactgtgaatagtccaagcacgattactcccatgataaagagcaatggtaaccctgcttctccagcaccacccaagcaaccaccacactctccagctgtcgttgcacagccctcaaagcatgtagtgcaatctgtccacatgcaaagcgtaccaggtagatggcaatctgcacacatcctgaaacagaaaagaacaatgagcagtgctgatgaaacaagcatgcagcattagtagcttgttaatacaattgctaaattagttgaagcataccctggttggcagcaacaaagacataactctcgacaaggctgtgccaggtcattccgtactcttcggtcataacaagttatgaagcatcctgataacccaagcaaagcaaaaaatagcaatgcccctgtaaccataagaacaatactcaaatttagtccagattaaactaatatgcgcaagagaaggtacggtgaatcttatagcgagtcttcccacagatttagtgagtatatatgaattttccacataatatctattatcacaattggcaaatcttagttcctcataatataagtaacagagcccaatgaattcacgcagtagggagaatacgacatgcatatcatatatccacttctttacatacttggctatgatacagatgaatatcctagcttgcccaattctccgttcgtttgtgatgaaaggggcagattatccctcggtttccgttagcacgcttttcaaacaactaaatggtgtgcttcgtgtgaaaactttctatatagaagttgctgtaaaatattcgataaaatccatttttcaagtttaaaataattaaaattcaattaatcatgtattaatggctttcttggtttgcgtgcccatacttaatcttcatctttatcacttgtgaacacctcattaacaaagaaagttcaacaactcaaccatgtaacgaacatgtgttcctgattaatccagccatgtgagctacactcaggtagtttggttgatataattggcatttatttattgagccgaacaaagttaatttattggcatttatttattgagccgaacaaagttaactagatgtctataaaactgttcattgcgatgtttcagcaagagctcagaattaatcaaactgaaggcattaatgtaaaaatgggtgaaatgagcagctcatgtcaggagtttcttgttagttatagggttatagcaaattagaagcagaggtgcttggtttcgaaggacacatgcctcgaataagtcacaagcaaactataacatattcaagtgacaacaattaccatgcattaaacagggaaaagtagcttgctctttcctattcgatacatatatcattcactctcatatcacatttctacacttaaattcctttttacaagcccatctcacccatcatacatgaaacaagattgagccattgaggttcatcgtgtacgcactgcacatttaaccttgtaaaacctacagcgcccatgtgattgagttatatggatgcatggtgaactatcatgataattatttcaatcagggtacaatttcatcaaacaatcatgcaaaactaagtgcaagaaataacaagtttgatatgataaagtaatttaccacatatgtaataaaaactaacttcattgtcaaatgcccaggctgtcctcaaccagtaattctgtaatccatcaataaaatgcaccaaatacgctaatgcagatatgacctgaacaaataaataacaaaaaacaaactcttttatcattcattagaataaagacaatcgagaactaacaaagagtatctagagggacttacaaactgcactagagcaaagatgaataatatatctctagtaacgaagaaacgaaatttcaatgttcgccatttcctatcagtgtgaacatgaaccctcaaatagtaaggagctttacaagtggtgcaatgcgaaaaggcaaatccttcctgtacatgagacaaagaaaatgccaagcaaagttagttttcttacgaaacaaagcttagcaaaataacattgacctgccaatttttgtgcaattaaaatatgtatcttgaaagcgtaaatgttgacaaaggcaactctggatactctacgttatgaagaatcatagcttaaattgtagcaaatcgcacctaaactacattttaggcacagcattcatataacgctaaaattagttatcacaacaaatgaggtttaaacatggtatcttatctaccaagaatgccacaaccccccaacttctctcagcgcacagcaaacagcagctcccccaatttattaacagctaacgtgcaaccaatgaaatgggcgggagatcagcggggaggcccgagggatcaaaagcttcataccttcacggctctccagtggtcgaggcagtcgcggtggacgtacttggacgtccccttgcacttgcacggcgcgatgaaatccctccctgcacacacccacacacacacgcaccgagccaacaaagcactcagatccccctcgcacgataaggtcgcgcctcgcgggcggaagggggggtggatctgcgcgtaccgtcggtctcgaggcagatccggcactggaactggtccccggccccggcctcgatgtcgatctccgacggcggtgggatcagcggcgacgactccgacgccgacgacgccgccccccgcgccggctgctcccccatcgacgatccaccgcagcctgcccccgcgcttttacaaccttcctcctcctcccatccgaaaccctagctcctcctcctcctcgcctcgatcgatcgaatcgaagccgacgacgacgagtcgagggagaggttggcggttgttaggtgcggtggtggactagcgaggagcgagcgaggtatagattggtcgagaacttttgccacgcgacggtggcgtacgcgcggtatgatgacgcgtgggggnncggtggttatnttggtttggagtaactncgntnngnntgnntgnntnggtagtcgtacgtgcgggtgagagttgaccagagaggcttcgttgtgattgcgcgtgcggttaatgtttttgctcttttgcgaacggggacttcagtgactgcgtatcaacctctcgcgacacctagttcgcgcggattcgcgagtagaatatgtagcgcgcacttttttggttattatacggtacaccagtggagcagcctcattccgactcctgggcattcagcccaccaacgcgcgcccctgctacagtgctacgacattcgtgccgcaaattacgacaattagcgttaattaccatcattagcattagtctttaaaaagcatatatagttaatttagtcgaaaacttttcaaaaatagtggaaagttttaaatttgaagtggaaaggtttcgaaatttgatttaaaagttttaaattttaagttgaaagttttgaatttcaaataagaagttttcaattttgagatgaaaattatgaattttgagttgaaagttattgaaatttgagctgaaagatttcaaaatttgagttgaaagttttaaattttgagttgaaagtttttgaatttttagatgaaagtttcaaattttgagttgaaagttttcaaatcttgacttcaaagtttttaatatgatttaaaaatttttaaatataagttgaaagtttttaaattagtgttgaaagtttcaaattttgggtcgattttttaaaaatcattgaaatccttgaattatgtaaaatcattgaatgcagattacggcctaattattctggaaaaaatcagcactaatctcgctaatctgaaaaaaaaaaccacgcatcacctttttttcttctggtttccggcttttacttataataacggtagcgctgcgctgtgtgagcgacacgtgtacgtgcgtgccgctaactcatctggcgcgtacgcgctaattagttttcctgtcaaaagtttgcgatgtttttttgtttgagggggtgtttagatataagggtgtaaaatttttactgtcacttcggatattatatagggtgttctatgagatattcgggcactaataaaaaaaccaattacagaatccgtcagtaaaacgtgagataaatttattaagcataattaatccgtcattagcaaatgtttactacagcactacattgtcaaattatggaacaattaggcttaaaagattcatctcgcaaattagtcgcaatctgtgcaattaggtttttaagtctatattcaatacttcatgcatgtgtttaaacattcgatgtgatagggtgaaaaattttggggtgaaatataaacagggcctaaaatgcgaatcaacatgaatctcgtgaaaaaaagtgaatgatcatacttgaaactctactgtgttagatcaataagacataggctctgtttggatcctc

SEQ ID NO: 1708 - DNA, 773 bp, Oryza sativa
aacatagctggattaactgtgaaatcaccccctttttatgcataccctacaattgcttcctagaaatcagggagcactgtttcagacagtcctgcaccccttgcagagtaatgtctttaccagaatgagtaaatctcacagtcttacgcccccaatgaatccacatgggactatgagcctcaagccaatccattcccaaaatcaaatcatagccacccaacccgagaatcttgaagttagaagagaatgtattaccctggcaccaccactcaacttgctcagccatctcatcacaaaacaattttccaccatctattatcatcaccagagcactaggtatgctattgggaaccagatgcaacctgtccaccaaatgagaagccataaaactgcttgagctacctgaatcaatcaaaatgaggacctgctgaatcagtccttgcaaccatatagtacgcttgccctcagttccaaacaaagcattttcagataaaagcagttcttcatcactgctactctcctccacctgcccaggttcatcagaaaactgaaagacctcaagcaattcatccaagacatggagctgaacagcctttggacacttatggcctggaccaaatttttctccacacttaaagcactctcccctagctcttctagctgcattcaatgagtcatattgttcttcccatttaggcctttcttcagttttcttgatctcatcaggtggagggccaaggatgcccttagctagacttgcaccttgaaattat

SEQ ID NO: 1709 - DNA, 16201 bp, Oryza sativa
cttaactaattttagaccaatataccttgttagtcagtttcttcagagcttcaggtccattttcttcaataaatttatcaagtgctgtgaggaagtcatcggatttaccgaaaaggccctttttctgagggacataccaaatgttaaccatttggtgcttcacaaacataggtctcacataattttggtacacaaaggctgcaccattgaagtatggcaagacaagccagcaaataaagatcaatttcatagatggccaaaaaggaagcctgtagaaacagaagatggaaagacaatggaacagcaagtcagtgtaccatgatgactaactgtaaatttgtccaagccaatggaaaagactcagagaaggactagagcaagtacgaattaataggtctctcttccttaacattatgttgtaatcaccatccaaataaagtatgcaattaaaaaaataacatgggtgtattattccaaaccctacaaacctttcatcacactgcaatggcagggataaaacaacagaactgtggaacatttgtaattatcctctttttaaaaaaacttttatgaagagggactcttacaagtgaaagtagatcagtagtcagttctatgtagaatggtattggatatagtttctactgctataatttgtttccaagaatgattaatcatttatgtttgaaaccctgatttaaggaacactgtgtctttacctgcccagaaatgaaatgctctgtacttgtgtcctgttaactaaacaaagcacacaagtaatcaggaccgtggaactatattgcgttccttcgaggatgttgttcccatcctgggaacacatggacaatcttgcccctgcgctgttaaaaccttttgaaagaaacgtcccacgctccttgatcccattcctcaacccatggacccaggaactttggtgacatatgcacacgtgtcttgctctaacgattgtcagaatgttgatactacatagtgtgaaaatggcaatgcaggtatgcacatcccactagttcaaagatcagggatttgtcaccaatagttcagactaaaacaataaataactctaaaactactagtacaaagtttttttacattaaaaagaccacaaatatcacaagagtacttaccactgaataattgatgcaaatgtgagctcaaacagtgttattaatgagtacatcacccagtatgtgagccattgttgatcatccacaggggatttggtttctattgccttaactgaagcgtacctgtaatagcatcgagttacatttgtgtttaccattacaaattaactttaaaaaaacatgaatatgttgaaacaggataaaagcaacaaacaacttacaacggataagctagtgcaaccaaaggcctgcatgagagattaaaaaaaaagtgttaagctgaaggtaaagtcaaagcattaacaacatattcatagtagcatccaagctagccaggaaattaaaggtggaacggttctaaattcaggataaaacaggtagtattagatggtctctaacatagtagaaaagcaccccttgacaagtcagcaagtcagtataaaattaaccacatcatttcttatattacttttacaaattacgcagcagctaaagggatgtccatattttctaatccaacatagcatactaaaacatgacatcgattagaggaaggtagtgtgcatttctacagcatgcatcggtccacacttggaattaaagaaatcacagtgcccaaaactggcacttgtttctttatgcaccatgatcgctacgagacatgaatgacaatctaccaaataataaagaaacagcagcagattattcaatcacacccattctcctgcatgtgacctcttacatactgcatagaaaggaatgagaaacagctaatggaaaagataattggacaaagaaaacaaacaaactagtattgaaagtggaaatgccgaaaggtcgaactaccctacaattgctccactaccactagcaaaactacaaatcggaaagcaatactagctttttctaaaagactgtgaagaggtcaggatgcagtagaaagatacaccgcactagcagattgaagtgacaaaaactccacatctgatctacatgttcagattgcagacttggtgatctacagcagagcagcccacagcacgtgcatcacaggcaaattttagatttttgatgtcgcataagcattcgggaaaggtgcgggttgcaatgtcagcatcaacggatatgttcttgtgtcaagattgggataagaaattgacgtttcgaagtccaaaacagtaaacgcacccaacaacaacataaaaatctacaaaagcgaggatttggtgacagataaacgaaaaatcaaacgcctttcctccagcagaataaacaagaagaaatcctcgatgttagactgcaatagaagatcgattctttcaggaagaacaagccttcgcaggttaataaaaaggaaaaaaatgtactcctactaatctactaggaaggaagtgtttatttctatttctttcaaatgaaatcgccagttacatcaagaaaagcaagaacatttccgatcctgaaatatccactgaaaaatttaagcattgtactactcttcgaaaccaacattactcgattccaagccgcaaccagcgggggggaaaaaagaacaccctcagcacctcacggaccacaagaatcaagaacagctaccgcaatgctacattgaaccggacgagcaaacacatcactaagaatccacccattgctgctaaaatcatcgccattccgaaaggaaagaacaaaacggtaaagagatgaaccaaaaaacaaagaaccgaaaattaatttgggggggggggggggagagcgaaggcagggcggtgcgactgactgacccagcaagaacatcgaagttcttggcaagaaccttgagcaaagatccggaccccatctctcccccgctcttcccaatcctcccagcagaagatccactctgattgagcaaagaacctcctcgagcgcttcgaatcgggtgggagttcttggaaggggattcctgggagactgaaacctcgcctgctttgctttgctttgcttcctctttcggtggtgctgctgcttttggtggtggtctcgaggggagcaaaatctggagtggagggggaggaggaaagcgtagcgtggtggtggtggatggtggagcagacgaggcgaggcgaaggcgagacgacgggttggaaatggcgaaacggaacggagcgcacgcgtacagaggaggggatttatgcgggtaagcccctcaggatgtgaggatttggttgctggtccactggtggagtggtggtgggctgtcagcttttcagttgttcactcgctcgctatagcaggtctcgctggatgtgaaagtgtgaagctgccgtttttttgttgcggtgtattgaatgttcaccgctaggaagtttgaagtgctgcatgtcggtgtgtttagttcacgttaaaattgaaaatttgattgaaattaaaatctatgatatttagatacggtaaaaaaccacgtatccatatcggatacgtaataggatacggatacgtatcggatccgtacgtatcagccaatttcgcgattttccgaaaaagaaaaaaagcaggatacgtccctgatacggtctgataactcccagatgcgatcaaagaactacacaatcgattcattgtttcatcctggtaatcatctgcgctgcgtattgcctccgtggttctcggctggggctcgattcgcggctcccagcgtcagcgctgcgaacatcgaacgtagcgctgccgtcgtcgccctgtagcgccgccgtcgccatacgcctggacgccggctgtagcgccacctctgcaaggcgttccaccatctctactggacacaacgcggacaccatcacagggcacaacgccaccgtcgctagacaccagcttccttcgttcctcggtgaggaaagttcgttggcccatttctacctctccatgattggttctgggattaactttttccattttcttttcctttttttctgaacgaagctactacctccatcctaaaatgtttgacgccgttagcttttttaaaaatgtttgtccgttcgtcttattcaaaaaatttaagtaatttaataaattttttattaaattaccacaagtaattttatatattttttatgtattatttttaccacaagtactctatttagatctaataaattttgttattggaagtactaatgcagctagcacctccgatttgtctaatcattactcttttagttgtaaaaacatgcatgttttggtttgctctcagttattggcaagttagcagtctgcctgttcattatttgggcttcatagcttcaccaacttgagatcatttgggctttatttccttgctagaatctatacatttttgtattttctgttttatatatacatatatagatgtattcatgtatccgtgttttatgaaaaatgacgtatccatgtatccccgtatcgtgtatccgtatccccgtatcagggtaacatagattggaacaatgtgacggaaaagttggaagtttgcgtgtgtaggaaaattgtgatgtgatgaaaaagttggaaatttgaagaaaaaattgggaactaaaccaggcctattatagcccgaataatgagaaaattcgataccgagatccctgatgtactccctccgtcttaaaatatagcactcttgtacttgatgggacacatactagttcaacaaatctggacaggggtatatctagattcgttttactacaatattactatattttggaacggagggagtatattttattttgatttttgttaacacgtttttcaaattactaaacaatatgtttattacaaatttcttttatacggaaattgattttttttacgtagtattaactaaatctattcttcaagtttacaatagttaaaactgaattaatcatgtactaatggctttctcgttttacatgtgttaactttaactttaactttatcccatagaccgcctcatagagtcccatttgggagagatcaaattgatggatcgatggacaatctgattttgtgatagttattcgagagtataaacaggtgaaaactattacaaagttgaaaaggttattttagaaaagtagtctacaaaattttcttaggaaaattgtgctgtgaaatgtagcgtttatgagtttgggaaacgtgcaaataaacaaccagtatcaataaatgaacaaagtcttaaattggataaattaaatattatatatatatattattaataaaataaaatgtctgtcaaaaactgatatgtgcaatattttttttgaggaattgtactttaaaattggcatgaataatcatacctaatttatcggcgttagtaaaaaagaatggggccatcttatagtttaaaaaactagaagaattatgttgtttgaatggagatgaaatcttgattatgtacgatgtcacatactttcatgtgtgatttttctacggaattcattcattttaaatatgtagcacctaagaataaaaagtttgtgaaatttcttcttatcatgttttaaaaatataatgtgtttttctttagtagtgaaatggcgcgtgaccatttgtcagatggaataatttcagtttctatgttggctccagtgacgctcgcgtattaataccagagtataacaaaaagctgtctacaacatagtatatcatttaataatattaggatgagctgtcatgggacacattaaaaagctcataactttgtggattttttttcagaaaatgttgatggtaggaactgggccttgttcccagaaaattttaccaaaaaacgtcacatcgaatctttggacacatgcatacaacattaaatataaataaaaatactaattgcacggtatgcatgaaaatcgcgagacaaattttttaagcctaattagtccataattaatcataagtgctacagtaatctacatgtgctaatgattaattaggcttaataaattcgtctcgcggttttcatgcgagttattagattagttttttttttgtccaaaaaccccttccgatatccggtcaaatgtccgatgtgacgttcaaaaattttcttttcgtgaaaccctaagaacacaatatctacagaaagggaaatgaccacaagagaatgtagagtctaaactttttagctgcattcgtgtttgtgaaatgtaagtagttagatgcatatgaaatttcatgatatcctagggatagcatcataaaagtaagacacgtacaacatcaaaggcaagcgatgactgcacggatcgatgcagaacagcagattacacacaactcatcaaagaggatgatgatccgcctgtttattctgatcctgatagatagccttgttaattgtgcaaagttgtacagtactactatagggataaggtttaggcagtacttgccaatccaagccatccatcaagaaatgagcgttcaggattgcctggctcgatctcctcgttccttttagctactattccgtcaaaaaatcgaagtcctagctacgaacatcgattggtctctctttttacgtaggggtactccttagtccttgctccttacctgttgattgtgcaaatgtgcacgggagacacttagtgcgagaatactgaagcattcaattaactttaaaatctatgataaattttatatggaaacaactaagggatccaagctcactcttaaaaaccttgtttctgtaggattagacacaagcaactaaacctaccagagaggctaaatggtagattacgtcagtgaaagtgaaataatcgaatcctgatagatcaaaacacaccgcaatctcaaaaaccaatgaaacacacgttcggcggtctatccaacctaatagggtcggtctgtccgaggcatggccggtctgacaataggtgactcggcggtctgaccgtcaatctaaaaaacaacacaataacgcttctataaaaactcaatttctcttaaaccaaccatttggaacaagttgtaaacttgacagaataaactagacaagctaagaaacaactccaccggagggatttgtaaaataataaacaatttaagagaaaacatcctcaaaagtcagctgtctcagaatttcagcaaatctgaataaaacctaaaacttaagtaaattcgaaactagcaagatccaatcaacaaagctttccagatctgatcattgaagtattagagaggttttggatggattaaattgaacagaatcgcagcaaaacaagcaatcacaagttaatgtcaatacccgctcgactccgcgatgccggcgaacgccttcttcgccttggccacccggaactttggtcccccgaccatcatcggcttcaccgccttgttcaggaagtccgcagcggcttcgacggcgtactccaagttcgccttgttgctcaatctgatggaacaaagataacataattaagaaactaattaatggataaaaaaagattttaacacaaagacgcatgcgttttaggtcagtattaccttggcgagatgaacaagggcactggctcgcggctaaacgtcgggtgagagaggcccgccaggttgcagcccacgctaatatacacgggcttgctctcacttagtgccgtcgcgatggcagtgtcgatctgctcgtgcgcgttgtcgaggttgttaatgagcctacatacgtgcgggaggagatggagttcgatcgcggcggcggtggtactgaggacggggatgtggccggcacaggaccccgcggtggcgccgaccaccacaccaccggtctcctccaacaagacgcctgcgcccgccgccgcgccaaccacccccgccaccccggcccccaccacaccgcgcccgccaccgcacgtaccaccaccgcaaccaccgccgcgacaaccacccccgccaacccggctccaaccatcgcggcgcctcctctcccccagtcaagggtctcgtcgccggcgcaattgtacaccatcttagggatccccgtcgcggcgcatgccgagccgccaccgccggaggtcggacagcccgcctcgcttgcctgctccgccgcccacccgcccatccgctccgatgctccccgggagaagagtgagaggggagagggaagaagataagagtgaggatgaggaagaagagagagaagggagagggttgaagggaggagtgaggctaacacgcggggctcacatgggcctcgccatttttaaattattttttgtgtgactgataggtaggtccacagtttttattatttttccgtgatataattgctacgtaagcgccacgtcaatgccatgtgggacgaagaccgagtcaaattagtcacgtagacgccacgtcagccaaaatcgccatcaatactgtcaagggacctcatctggaccggttttgatagttgagagaactgttgtatctaattttctgatggaagaacgaaaatcgaattcgttaacaagttaagggatctcggatctcagatgaacttattcctattattactgggaaatgggctggccatcgatcagacttggtccaagtcgtagcccaattccaacacccacctggtgaatttttttcttttttaatttttttaatatttacataaatattatatcggtggaaagatttacaaaaatagacaatgccgccctctatttggacggcaagctgacgtggcatacggcgtcgtgacggtgccatgtgctcattttgcgcttagacctttgccgaggctaaatgcaatttttgccctgccaaacaagcaattggctagttctttttgcatctgggccccttgccgcccttgcaaattttgcacggaggccccttgccgcccagacagaagacggcaaggggaccacgtgcaaaattcatagcccccaaaaacgtccgtcctgcgcccatgtgccacgtcagcttgccgcccaaataaagggcggcagggtctacttttgtaaatctttccaccgatataatattttttgtaaaaattaaaaaaaaatttaaaatgaaaaaaaaattccccacctggttgcctctccccaagttcaaacttgacaactgacaaagttctgagacacttcgggctacccaaaaacttttcccaaaaacatcacatcgaatctttgacatatatatagagcattaaatatagataaaaagaaaaattaattgcacagtttgcatgtaaatcatgagacgaatcttttaagcctaactaggccatgattagctataagtgctacagtaacccacatgcgctaatgacggattaattaggctcaaaagattcgtctcgcagtttccaggcgagttataaaattagttttttcattcctatccgaaaaaccctttcgatatcctgtcaaacatccgatgtgacacctaaaaattttcttttcgcgaactaagcaagcccgaaatttcatgatatcctagggatagcatcataaaagtaagacacgtacaacatcaaaggcaagcgatgattgcacggatcgatgcaattgaactaatcatccgatctacgatctgattacaccgttgtgttcgtaagaattgaatctttataacaagatctcacatgattatatttgataaaaaattagaaattacttttataatatatctaaattacttaagatttcactaaattacttcttagacccataaaagtaaatttaataaagcctaaaagtaatttacatatattatagaattaacttagaaaaaaaagtaactttatcacgacattaaaagtaaatccgttatggaggtaaaaacatgagtctatatagaaattaaatttaataagtataaattacatcattgactaaaaatgtgtataaaataaacaactcacaacatgaatgtatagatttcttttaataccgtaacaagttacttcacttttgttttaagttacttctacaatatagggtaaattactttcaggcttaattaaattacttttatgactaagaagtaatttaatgaaatctaaaagttatttagatatattataaaagtaatttctatttttaataaaagtatagtcatgtaagatcttgttataaagatttaattattatgatcacaatgatgtaatcagatcgtaaatcggatgggtaatctaagagaaaattccataagaagaaaaaatacatgcacgcacttttgagtatactagtagcaactaaatatgaaattgaggtagctggttatgaccatatcgtagacacttgtagacacgtccatatgttatggcttctacagcacatatttagggagtgtttagttcatgccaaaattagaagtttgattgaaattggaacgatgtgacggaaaaattagaagtttgtgtatagaaaagtttcgatgtgatggaaaaattggaagtttgaagaaaaagttgaaaactaaaccaggcctaagtttctggcaagacggtcaatctgggaagaggaaaagaactgcagcttacctacaaaacatgcatttctctgaagaatcatatcggcctgaactttctctgaaagcaattgctcttatcatttcatcgctctttgcaaattgctcagtgcaggaggaattaccatgaccagggcatctaaagaaatcaaatcaatcctgcaatggttcagctgctgcatacaactgattcacctgatgaagagatagatatcaggtatgctttgctgcaaaacaaacaatatactactagtatacgctatcatgtgacctgctggtttactgaggcagatatcagctaacagcataatcaccatatgcaacaggtctctgtatcatttcaacctcagcagatgactggagctactaccatgattattacaggatgcattatgtagccattaatattacagaaaaacatacggcgagtgcacgactggcatgcgaagcccaggaaaatcttgcgatgcaaccatatgcatggcattctacagttggtaaagttctcttaaacaggagaaacaactacactacaagaacatagtaacacggttccaaccttctcggaattcagatgctacgctaaatactagttattccaataaagtttggtacaatgccaatgctttctgcaataaataccctcttttgcattctcatccagacgaaggccaaccttattacatggcatcttgaaacactgaatgcaccctgctgcttcatagttctacaacaatcgcctacttctgtaggtaaggacagttcaatttgtcagaatggagatggaatacattgccaatatctgttaatcgacatggatctacaggcaaaatgtgccaaaaaggagatatttagcttttattgtgttgacagtgatgtaaactttaaaaaaattaaagaaaatatgctcagtaataagaatatgacgtaaggagggccaggcttttagaaaggtactgaagatacttcatggtataaatacatttacataacattatgttgcttctggtcatattatttgtgttcaacgctagaaagttcaaaatggatagggtactcatgaacaaatattttgtgattcaactatatgtatgcacaaaactaatgtgtatatgtttttcaaataatttccatttaccaagttttccatgttggccgcttataacagtatataaatctatagtagtacaggaaacacaggctaaatcacagttcgcgagtaaaatttcgtagcgaatgtgaaggagcagccttcaactcacagaagttgtgagttctgacttcacttaaatgaataagaaccagctataacaacttcattttgctggaaggcactaaattacttaactccatttttatttggaaattccaatccatcaaccagttcaaaaggtggaacactatgcaccctccaaagtaccaagtatctagccatgaactccataacatagtaaagaaagtataattgtcacaaataagaacatgcaattttcaagaaaaaatagtactgtcggtgacgaaatgagaaaacatccaatgactcaccttgcaatggcagattatgctttaatgtttttgttgcagggttcgcattttagccaaaggaacctctgcacttgcgagaccaacataagcagtttttggacttccgacatccagaattgattcccagttgaacattaccctggctctgaccataatcatatgtaagctctgtcatcggaggaatatgcttgattgcaaagaatgcgatatgtggatatccctcgtcaccatgatcatacaaaactggttgccaaaaaacatttggtgagcagctgtggttcataaagcgagctatgtttccagttcgttttgcactgataattattggcagttgcttaggtgtctcacttgagtcagaaagactgggttcacccagtaattctggtgcatagttccatcttaaattctgctcagaagacggtgtctcaaagatgtaatcatcttctccaatgatactgtttctgtcaataacttctcctgcatattcacaaataaatgtgcctgcccgaattggatcccaactacgaagtccccaacctcgatctcctgtcttaaacacctcaaagtggatctgagaacctttctgtacaactcggttccggcaattatgtgagcatgtacaggaatcgttacactcatacagcataggcatccggctaacaagtatgcctgaagcactgtatggaagatcaccggcatttcgatgagtgcaagagcagttgttatcaccaggaaggcacacacttgcgcaattgcagccttgcatctttctcattgagctgagagaattcctgtagttcagtttagttgtgtagttgaagtggctaggacctttctcatcatccacttcattcacaaggcaaacaggcttgctttctgcaccatatgatatgtcacgcaatataacatggtctcgagaggaaggattctccctccatttttcagtcttcttccacactgctatgccatcaggttgaccaggttctctgagcagcttgtgtttaaacacattaaagccagtttttcctttctccacccatgcttctcttattttataaaggccatcataaatgtatatcttaccagtaggacaagtcaaatctcttacactacgaacaactctgatttgattacctctatgcaaactcctttcaagtgcaagattacctctttcaagcttttggtcatcctttccagacatgccctgtccagtgtaaaccagcacatctgggtcatcttcggtattctcatacacaccagctgacacgatactgatagccacaggatcctcctcattaccaaacttagcagacatgtaatcaatcccagacatgctctgactattcagtccaaccagacacatctctattctgaagtagaacatatcaccaacctcgacacctggaacctctccaatcctcttgttcttatttgcacgaagttcagcactcatcatgatactcccggcctttaagttatgttgctgctttgctccttgcttcacctcatccaactgcatgagcctccgccgcagtgcatcaaacatcatgagtacattatcaacagattccctaggatcatctgaaaacaaagatggcagattcagaagattgacatcaattttcctaggccgtccacgtttccctgttattatttcaccactgtcatcatctatcgaaacacctgagtgacttaaaggaatcagtgcaccatcaggcacacgctttggccgccctctcttcctcttaccatcttctggtaaggtgacagcagaaggtgtctgcaaaacaggctcattatattttgattgaattggaggagctgaagtatctgcaccatcctgtacacgcctgggtcgtccccttttcctcgtaacagattcatttacagcagaagcggtgtctgaaaaactgtactatctacctgaggagctgaaggagttgacaggacagtacatcttgtacccgcttgggccgtcccctcttcttcttaccagattcatctgtggttgctgaaggaggcgtctggacagcagtgatgttacctcctggagctgaaggaaccaaatgagctgaaggaacagaagaatcttgcacgcgcttgggtctgcccctcttcctcttagcagattccactgtacctgccacagctatttgcaaatcagggatgacccctgtgttgtttgctgtaccgttagcaggagcagctccattcaagtgaacagcatatggctgcctctggttggggtctgcaggggcagccggtgatgcaaacattggtggaatactagcaggcattgcctgttcagtgcccccagcatatggtccaaacggggtaatacagacaatcgaagatgagttttctttagcagtgaaagtgtgcagaccaagtgccgcagggaacatgggagtcaatgtgcgcaagggttttgcatcaacaactgctgcattatccatcggaactgaagttgtctgccgagttccagccatggtaagccactgttaatcttttgcaaaacaaaagtttatgccgttatttcctttgtatcttctctaggtttgtttaccagtcatagtttaggttaagctggataggggtaaaaaggagacctatcagtatacaattgagcaagaaattaaagctatgtttatttaatgcagcattttttaagtcatctgttttactgaccaaggagaataaacagaagatctaaaaggaagcttggtcgttcatcacagatcttgagctaaccaactgcaacacaagagatatgtgtaaacatcgatatgagaagactaagaattactaaagcatgataaaaatcaacatgcaaagactaaatcaatagaacatcccattagaagattatcaactagcggaagagattgaatagatattttacatgaagctaagattagaaacagattcctattttgtcgcaacaagttaaaaatagaaataataataacgacacttgttgataattagatgggtggagaccattttgcacgtaaaacaaagaataatgatgcttgttaataattagatcatttaagataaccaaaagtttcctgagaataacaccttgtgactgctatagattagagtcatttgataaaaaaatcactttctagaagggaaaaggaacaagatagccatgcatttacaggatggcaaagatagcgaatcagcacaaggagggtcactaggcatgcacttcggtagtgtataagcacaatagcgggaagggggttgcaccttcccgtgacaactaatgtaggtgtcttttacccacactctattttgtcgactatgagatgagcgcaacagaacacatttaaatatttgtctcatagcagcatactagatagaatcacagccaatggcccctattggacacatgatgcaataaaagccatgaagagtgaaaccgtccccacgcatcactggagtcgaaccgccataccagtgtgtgctaccgcgctgacatatcatcacagctataactgatggtagtgtttcgctattgggcaccatacccactttattagctaattccgtttgtctctatccattcttgtcatccgatccaaggattccaattatgttattccaactcttaaagggggctaagcaagaaacattgcctgcctccccccataaataaatacatatggcgcgagaacagcccacggaggggcatgtcgtcgccttatcccctaagcacattaatggccaaaaccaatctcctacattaacacacataaatataaaaacctacaaacaaagcaccgaaagagtcgcaacgattgcccttacattagctcaatcgcaaaacccctccccgttccatgcatacgaaaccctcggcaagctacctacccatccatgatccccatccagcgacgggcgtgcggccatggaaggatgtggtgaggctcagttcaatcaatccaaaccaccttcatctattggcccataggtaatcccttctctccttggaacccttttccttttcttttttctagactcgataaccacagccatcattg

SEQ ID NO: 1710 - DNA, 5736 bp, Oryza sativa
gaatgtcttaccatctgcaatgaagtaataaatttgttcataacacttgacagagaaagaaaccactgtagatagtatagttgttcataagaaccaaacaataacatagaaagaagccctacagtcccaaattccttatatcctgaccccaaaaatatacaaagcaagaaagcaactgcacacacaacccagaaagacaatgcaacaatacaaataaagaaaactacagtagttgttgagattacgcccaataatagtatgggtattcaacacacaaatctacatatctcgaaattaaatccgcaccacgcaactttcaaccacagaatgcgcggtcagttcaaatcagcacgaactaatcggcatagatacggacccaacgcagtggagacgagaatatgaacaaagctacgggaacagaccgcgtcgaggcaaatcttgatccagatcatctcgccaaccgaaccagccatcgcctcatcacctaaccgccactcgctaatcaaccaagacacataagcaagaaaagagggaaaaataaaaggagaacattctctcgctgcgtcagatcgcactagcaccaaccaagacgacgacgaagaacacaacagctaaggccggccgttcttggacgagagagagagggagaggaggaggaggaggagctacgtacagttgcggtagaagctgacgtgaaccatcgtcgccggaccgcctctcccgcgtcgccgccgccgccgattgctggagcttgggtttctcgaggggaggaggagcgcggcggcgaggagtgaagaggagagagcttttatatggcagcggcgagaggaaaccctagctttagggctaggttaaatgggccgagatttcccggcccattaacgcacgggtgggaattaggcccacacatcgagatcataaatgggccttcggtgcaggggtcatatttacaccgctcgttaaatggcctttttctcgttcttttttccttatttttataaacaacaaaatccgggcattcatcaacaggaggaaacgattccagataatcaaccagagaggattacgatgcaatgctgattgatatggtctcaattctaccaactagacaaggtttacagcttcagggggaaaaaagcatcatcatttcatcaccaactaaacatggcagatttctacattactcatctactggtgtatattgcagaaatatgttacatgatgacatgtcagaacaattgacataggataaacttaggacaaggaggcgagttccattatccttgctttcttgatgaaatggctcctggagactgctacctaatcaaagaggctctctacaccgtgctgattttttttggcccgtaaaataaatgcaatgatcaagttagttgacatgatcaagactgcaacgaaaaatatatttgttgagttcagggcttacatgtctagagacctctagctgcagtaactattcatcctcaaagatcatgaggcagcaaagaggccccatgagttgtgtttcggatatgtgctctgataagcagaggttggatggcagtcacacttcaattccttctccggctcaaatgccacactcttgttgctcttttgtttaagttcatctgaatcctttagtgaaccctgctcttctgagtctttcttgcgcttttcagtatcttcgagtctttcttgcgcttttcagtatcttcgagtctttcagtaccttcttttgttcttttgaatccttcggtgccttcatatcttctttcgagttcgatgacttttgactctatcaaaacttttggtggtttcagttgtttcgaatctttttgatagttttgatagtttcatctgacaaaggaaaggtgcatgtttttatactgtatctaaggaatgcatgaaaagaagtaaataatgcttgcagttgcggggtgaccaaaaagtgaactcataatttccctgcattacaataggcaacatgtattcccccaaaaaatggcaaaatgattcaaagcctatttgttaaatttttgcaattgttttttttcatgtaggcaaacattgtatggtcatagctactacttctgtaattctgtttctatgctaatgatatgcatctagcgtacctggatttcacttggccgtgtagccctttagtaccgagagtgccaatgtggtgcctgtattcagatctaaaaaaggtctattcacagctcacaaagaaaatccctctctctccagtcagatccggttgcgttctagttattcgtcatatcaataagccaaaagaaatgttcacaaagagtgccaactgaggatttgaaattgcaactggatcaaaactagtatctccgcagtacatagaaatgctagcttcattgtctgaatttcagcttgtatacaagcaagctagatagaacactgaagccaagtatcacaccccagaggttgaactctacactttcctttttgctaatcagttcttccctattggcttcatctctgcttgcttcagaccgctgttcacggcactgttgcggtatccatctagtgattgttctctcgtgaacaacaagctgttctaagcaatctggggagctcagttcgcaactgccgctgctgatggtcagaacaagcaatgtcttggctacactgccagaagcccggagagcacatagtagatcagaccacacctccatacgaccacacctattgccaaacgctgcgccttctggaaccacaaccaccgcaaattctgagtgaacgagtgctggatggtgacggtaagacacaaaatctgcaccatactgcaaccctgatctcaccacccagttcttaaatctcagatgcgagtaagccttgtacatctctggaaaggactccgacatggacctgaagtgattccacagttgcttatcactcatctgcttcttgtcgtgtgactcaaccctgatgcagttcagaacatggcagaggtagaagacctcctcagggctaagttggaaccagtgcttctgtgccgcagcaatttcgacggcgtggccaaaggcagcacggtttaggatcacggcttgctctggctcaactccaagaatggcaccgccacctggacctgacaaaactgccacaggctttgagcttatgaatgaggccttgagctcagcaacaatgactgacatgggattagctgctgctagtgctgagaagtccttgccatcgttgcccttcttccatcttggacctggcaaatccatatgctgaacccactcgcagaggatggactaaaattgatgcgtggtcaaatgctgtagtgaatagcaacgacaataaagcaacaagtaaacaaagttgtccaaacaaatacctcaagaaaggaagattcactacatgcatcactaatttatcgaacatgttaatttgtaaagcatagatacataaataatctgccaaacaactatgcattaagttatggcctcacgggttgaaagagaaagggaaatggaccgaaggcccgacaacaacttgcagacttgtccactgcgctaagggttaggaattgaggattgctcttctggcgaaaagaaaaggaaaggacagtaaaggctgaatgacttctaaaatgaaacaaaacaatagactcgtcacgagcttttgaaattcacaaacggaaaaagtttctaaaatctggtcatttccaaataattgagaacaatcacgagatagataccacagcagtgccatgaacaatggtccaaaccttacatgggaagaactgaccagcaaaaagaaaaggcgtactagttattattcaaccactggggtgtgtgtaatactaggcttcagtgttctatgcagctgcttgtattcaagctgaaattcaggcaatgaagctgaacatttcggtgtaacctacctatacaaccaaacgctatagaagaagatggcatgaaccctaaccatgaacagaggaggggacatgatcacccctacctctactagtgcaaacatttcaagctccataggatcaaatgccaaaagagcaacctgccttcattcctcgatacaaaaagaacatatattagcaatctatattatcacccaaaccgtcctaaataagcctctacacatctccgaacttgaaacgcactacaccacacaaagtttcaactagagaatgatgagaaatcagggttcgtatgacctcagactcggttgtgcagaacccgtacgtatttcgacagtaagatgcgtatgccgtatgcatcgacaaacacaccgaagcaactacggggagattgggaaaaggaaaaaaaaaatctaaatctatcgctgcgccaaatcgaagcaccaatcaagacggcgacgacgaagaagctaactaaaccgccgttctccgacgagagggagatgggggagaaggtacctaaaattgcagtagaagctgacgtggaccaccgccgccgccgccgccgccgccgccaccgcggattgatttgctcaaccgaggggaggagcgcggcggcgagaggaaaccctatcgatgggccgaacatagatgggccggaatttaggcccacaaaatgatatcttcatgggccttctggcctagaaactagcgggccggcttacgttgctgcatcgcatctacacaataatttctcatttttattacattttttattataacaaaattagaaatttatcagtgtaagagaaaacgagacccacataatcaagagaggattaggatgcactgagaactgatataatctgaattctaccagcatcaccattttcatcaccaacccacattgcagatttctacattactcatcatctactggtgtaaattagagaaatatgttacatggtgacccaagtcagaacaatcgatagaggacagctagaacaagagagtttaaatggcctcctagctacttctaactaactgaagactcttcaccgggctgctttttttttttggcctgcacaagaaatgcaactgatcaacacatcaagtctagttgacatgatcaatattgaaaaatggatgaggtgagttcagggcttacaggtctagagatctctagttccagtaactgttctcatcctcaaagatcatgaagctgctgctccatgagttgtgctccgggtacacgctgtgatactcggaggtcggatgccagtcgctgttggaggccttgagttccttctcgggctccacctcggcgaacgtcacgcgcttgttgctctttggtttaagttcatctgaatccttctgcgacccctgttctttcgagtccttcaacgccttttttagttctttcgagtccttcagtgccttcttctgttctttcgaatctttcgcagccgccttcttatcttctttcactgccttcttgtcttctttcgagtccttcaatggctttgactctttcgaaacttttggtggcttcagttgctttgaatctttcgatggttttggttctttggattcctttgatgacttcgaatcttttgactcctttgatgactttgaatctttccatgatttgccagactgtttagatgatttgccagcctgaaagacaacaccacagataataatgaatttgtcacttattctcaaaatgacatgggttgtgaaacttttaaaagcaatagcaacatgttcacggtaacaactcaaaattgaggtggaaaaaaagcattgcttaatcagtaactgatgaa

SEQ ID NO: 1711 - DNA, 1510 bp, Oryza sativa
ttctgaataatgccatcagtaacaggtttttgatggaattcgatggattttgatgacacttcttcaaaatttgtcgatcacataggagtgaattatctagcgaacgccatttgtaggaaaatgcgctgtatgattggatttggatctttttggtctgaacatgtaaatattacctgacacgctactaaattaatcttaacaactccataatccatgttgcaacttccaatccataaaaacactaaaaacagcatcggtacgagtatcactagttcaagcacactggtacgagtgagaattaccatgaaacgaatccataaaacagcattaaccacaagtctatgccgaatgcaaaaacatctccagatatatctttaattcgagctatctaacataatgccaaaaagtgctaacataaaccaacatattaaggacacaacctgcttgaattctgaaacccagataggcaagctacagaatttgggcccagttactcagcacagaaagttttatgatcgttacggaaacaactagctgcaaacttcttctcattcctcatcttcttcctcaccgtcaccaccaccgccgcttgccttcttctggttcttccgcttcaccctaccaggggggcctccaccgaatgggcttgtcagtgagaagtcaatgtgcttctcagactcacgccctcaccatgaatgatgggatgttgacatttgcctgccgaccctgcccagtgattttgaaactttaatgaatgatcttcagaaaggctatcaacttggaaaaaaatattagcaatagcaacatcacgttcaacttatggtcgacaagtcctctaaaatagtaactttagagtgcattaaagaatgttgtggcagtagcctttttcaggacaatcatgtgaagttgccaaatgttctcatcatcgctgtacatagttcaacctaacaaactaatctagatttataacactgcagcaggcaagtaacgaactacagcaacagcaagtggtgcgtgccaaattgcttgttcaaagttaaacatcacaggtaatatgtacatatgaaaagagtaacactagtaaaggaacattgatgtaaaggaacatcatgtaaagtaacgaactacagcaacagcacgtggtgcgtgccaaattgcttgttcaaagttaaacatcgcaggtaatatgtacacatgaaaagagtaacactctcaaatgcgacattgacaagcccaacaagagtatcaaatgcacgaaaaagactaacttgaaagcatctgcacactcaaatgatgggaagttaacaggagtacaggaccaatactaatatattatgaccttcagctttcagctcatagagcatgtgttgtgcctaaaatgacattttagctctgcctacacaatgctagatcaacagaaatgatgaatatacagtgaacgattactatgagagaatgatacagcttccatgctgctgtagaagaatcatatagaagcatacttgggaat

SEQ ID NO: 1712 - DNA, 20824 bp, Oryza sativa
gctcactgccaccccactctgtcccgctagcttagcgtggcgctggtggccacagtgaacaaaaccagcgccacatagaacaaaaccgtgtgaaatactgccctgtgactgcttgtgaccggttttagtaaagttaagggaccctcgatatctggttttttggttcgaggatgttttttatctcggtgacaagttgagggaccttcggtgtactttttcctaataatgacataacttagctataaatgggcctagtataaagggcccatgtctgggccggcccaatcaatttggatcccatacatagaccgactcggtgacgtcagcgtccatcgcgactcaaactccaagtccctatctcccggcgatctctgacttttcgccgctggtaaggcagtctcgtcgcccacgatcgaaccatcactacatcgccgaacaccatgtcggctgaggaagaagagggtccaacgacgacgacgacgatggatccaaacgacgccgccgttcccacgctggcggctgccgccgtcgccgccggcgacgagaagaagcctcccgccggcaaggtgccgatgcccgacgactacatcgccaccatcctgtcgctgaagagggagccgccgccaaaacctgagtacctgagcctcctctcgccggaggagcgcgagaagcagctggagttcgacgccgtctgcgcgaaggaggacgacgcgctggaggagctgcaggccaagatcctcgccggactcaggaaggacggctactacctcgtcgacgagagtttcctcgagaagtcggcggcgatgcgggcttacgtgagtgaagaatgggccaagatggactgggcaggcagcggcatcatcttcggctactgggactacgacgatccgcaatgcgttcagtacctgtgatttgatttcagttttgatcttaattaggctggcgtttgccatatatttgtaagctagaatcttttgtttcatgttggcaaagacaaacagcgaagtataattattacttttttgttttaggctaatatagtttcgaattcaccacaatgaaaaaaaatactcctccggactaataatacttgtccttttagataagggtgagcttaaagtttagaatatttgattatgaatcatttttaaaatatttatcttttgactatatatacatatatatatatatattagttttaaaaagtactttaataaaatcatatagtatttgttaacacttttatacatcttataatggaaaataatgataaagttgttttttttaaaaccgtactgttatctaaaacgataagtattatcaatccgtagggagtatgatctaatggttaaaaagagaaagactgatcggtagataaagggaaataaattaaaattttgaaaccctacttttcatatcaaaattaaaaagaaatcacacataatcataggtgctatggtcgacgtgtttttataaagctgccaccttattcaagccttaattaatttcagcatacctgaaaccatgtttttcaagtagtaaagcgaagatttaaaccaacaacatggactaaaagtttcacactatatttttaaaatttaagtaaatatgtgctcaacatgtatagggataggattttgtaaaactctagaaccataattcctaaggttatgcatcgttatctgagggtatatacaactttgatcataaaaatacagggtttcctatttttcttttaaaaaaatcagccctttgacaacaaacagatcaccaagaaatttccacatcgattactgaaaacatgcaaaggaagtaataaaatttgcttagacaagtttctcaaatctttatctctactattataaaaatcaaagatgtttttgccggtaatttggtaagttatcttatataagtcggtttttaagttcgatcacttttagaaatacaaatccgtatttgagtcggtttttaagttcgttcgcttttgaaaataaagaaagagtcatataagaattctttttaaaaaaaactcgcatgctaagacgatcatacttctaattacagttcatgattttctaaaaaaattatatccaacaaaattcccacagtgaatttcaccttaactagaccgtataataacaataaaattaaaatagccttcacctattgcaacgcacgggcattttttctagtcttaacctattataaaaaaatatattgtttttactgttcgttcatcgttgcttccgcatccgttttggtttgtccattttccgacgcacacaaccagatcacccatggctcactacaggccctatacggccaaatcagcagattggcaacggcagcggcgccaccaaatccattaaccatcccagctcaattgttacatgcactttgaatcaaatcaaaacaaggcgcaaaggccagaggttgagtttgatgtgattcgatttatttgtcacaaacacgatagcggttcatgttcctcaatcactttctttgctcgatccacggccacgcgccgccggatcgcccgttctctaaagagggaatcgccacaaaaatgatccacattagcacgttacctccgttgtgtgaaaatgacataggcggtgacagcacgagaccacgtggtaatgcagaacgaaacagtgagaccgaacgtcacgtccaactgcacagcttaattagtgattaattaccctaattagcaattaattactaattattattagtgattaattatcctgattagagagtaattaaattaatcaattagaatcggccaggcttcctggaaatgcaataccattcagtctcgcagcctcgccacgcgaaatcgagcggtctcgcagcctcgtcgcataacaccgcacggtctcgcaccgtcaccgtgtgagaccgcccgtgttgttatgcccacgttattttcgtgcaacggttgtgcgaaatcgatggtatatttgtgtcaaacaaattatatctcaaatatttctgagaaaaaaaatgaacaggatattttcaaatttaattcaggtaaactatatggatgttttgatattgatagtaaaagtagaaatatttgaattagaacaaagctagaataacaaaaagagagagttgttttattgtattctgaatgaagttttaaatgcaaattaccagttgccacttttccttgaacctggacgtgtccgaatcgaagcccccaaacatcctgaatcctttcggactcagaatccgaatccgactccttcacaccgaaccatgcatgctatcaatcaaagagacaatctgaagcgagagagcatcaagttcatcatcagcagcagcgtacgtgagatcgatcgatcgatcgagcagatcacaagcaaccgagttcgtcgacatacgcactccaagtgaatactgatccatcatccatggacgcctctgcggtggcatcagccgacgaggcaaagaagacgacggcggcggcggccgccaccgccgccggcgagccgcagaagccagccgccgttgcgccattattggcgcaggggtacgtcgactccatcctggcgttcgagagggtgcaatggccggtcttctccgacgacgacctgaagcacctctcgccggagcagcgccgggagatcgacaagatggccgccctgcacaaggctttggacgacgacctcgccgtgttccaggccgaggtcagccgccaggtcgaggacaacggctgctacgtcgtcggcgagagctacctcgccgatcaggccaagctcgaggctctgatcaacgaagaatgggccaagatcgactggagcgccttcgaattcgagtagccatgagatattgagatgtgtgtggacatgcagatactgatcgatcttgtgatgaacagatgattcaactagtcattagttagtaatccaaaaaaaaacctggtcataagttcattatctagcatgatacggagtatgatatatagtatcagctatatctactgacctgtttgaagaactatgatgctggtaatatagggagatcatgtagcctatattatgaatgaattaaatgtggtataagtatttgcaatcctatcagggtttacaattttgttttgcatatttacgccaaggaggcaccaaaatttctgagatctcggaaatttcggaacaatgtcttttgaaaaaacattagacaatttttgactgaatttgactatacttttaaaaaaatataattaagactgactacacatttttaagctctacatcatgaaataaatttgtaaatgtcccgaagacccgaactaattaatgtagagcacccatttgaagctccgcgtgaaaaaaaatattttctccgtttaagattataagacgttttgactttgatcaaattcaaactactctaagtttgactaattttatagaaaaaagtagtaatatttttaacccaagacaaatatattatgaaaatttatttaattataaacttaatgaaactatgttggtgatgtaaatattactactttttttctatagagttagtcaaactgagagtagtttgactttttaccaaagtcaaagcgtcctataacgtaaaacagagtaattcgaaggtaggaatatatattagttaggcatgaagtttcaacacaaaattatgaactttccattcaaataattgttaatattttactagaattttttagataagaaaaagtaagagagaagtccatcaccagtccctaaacttgtatcactgtgccatcccggtccctaaactcgcaaatcgaccgtttaggtcctcaaacttgttcgattgtgtcatcccggtccctaaacttgcagatcactcgtttaggtcctccaacttgttcaattgtgtcaccccggtccctaaacagaacggtctaaaaactttatattaaaaataattcataactttttcatgtgaactctaatgaagacaaactttatatcaaaattgtagccctagacgtgacctacaactttgtagttgaaaagtttttgaattaaaactgtttagggtcccaaaatattgtttcatgtttatagattttgaaattttaattttaaaattacattttgggacaaaaatgacttaaaataaaaaaatatcaactacaaagttgtagatcgcatcgagggctacaagtttgatataaagtttgtcttcattagagttcacatgaaaaagttatgaattgtttttaaatataaagtctttagaccgttctatttgacccagatgatattcaaatccaagtttagggatcggggtgacacaactgaataagttggaggacctaaacgagtgatctgcaagtttagggaccgggatgacacagtcgaacaagtttgaggacctgaacggtcgatttgcgagtttagggaccgggatgacacagcggtacaagtttagggaccggtgatggactttactcaaaaagtaattataggttgcaacttgaaacgctttccttagaaagtctcgagtaagaaccctataaagtgtagttctagcttcacggaaaattgttttaaactgtcgagtggatgtatgtctgtgtttgctcatcatgttatttccacgctatcaatttctgttattcttcatcttgctcctgggcacctctctaaacaactccttcgctgtagtgacacgtgccgttgagatactaacatgtgggcccatatgaatttaggagtttgcaattttgattcagacaaatttcgtaaatttaggtgctaccgaaatttctgaaatttcagcactttttggaccaaattatttaaaattttaataaattctgattgaatttttataaactttgatcaaatttaaaaaaaaaagagaaaatctgatatttttgaacgagtcattgtcagggattcgaaattttcggaaatttcgaacagaaattgcaatcactagttaggacccacgtatcagtgacgtaatggctgttcctataggcccacgcgtcagtgtctcaccgcgaagacggactatatacgctcatcgccgcgagttgagaacacacagcgcgcgacactatatatatcaagaaggcggagacgatcgaccgacgacgcaacgcacgtttgcccgatcagcagctagcgcgcgcggtcgcttgataggcaagaagcaggggcttatggacgcttctgccacggcggcggctgcgccaacttccgacgaggccgagacgacggcgacggcggccgcagcaggagctgtcatcaccaccaccggggagtcagagaccaccacggtcgccgaggcggcggcagctgaaactaccaccggtgggaagtgttctggcgaggcctgcggcggcggcgacgagcagaagcagccgtcagcgaagaagatgatgcagttgccgcaggcggagatcgacttcatcctggcatggaggagggagccatccccctacccggacgacgaccactgggcgctcctctcgccggagcaactccagctgcgggaggagatggccgccatcggcaaggagttcgaggacagcttcgaggagtttcaggcggaggtccggcgcgaggtcgaggagaaggggttctacgagttcgacgagagctactacgccgatcaggccgagatgcaggctcagctcaaggaaggatgggccaagatcgactggagtgacgtcgtctgcgccgactgggatgacttcaacgaccccaattgctgtcgatcgctgtattaaaattttataacaggatcacatgtctatcatgtcgtgtgattgttgctgatggacttggacagggtgaatctctcagtatctctcacctctataaattaattttttaccataattttttttaacacaaacttggctagattgataaaatcaccacagactaccggtacattattttaggaacatagactagcttgacatatattgagattgacgaaagctatcaacatgacatatattgatattaatgaaatcatcatatatgactcgctatcaacaggtacgtcgtctatcatcgaaagagtaattaaccgtaattccataaatgcaagcactcatgtcaagtctgaaacttgaaccctgataagttggttccaccacacggaacctaaccggttaattgagttacgctcactttgcatcttttaatcttacttactgttgtacaaggatctttcatgttactagtacagttctaatggacgaatttatatattaggatagtgaagaaaaagttttgagaaaattgataaatagattatattagcaagggcatgtctggctggagggccgctgaatgtggatgtcgctctcgcggccaaggtcatcgctgccgtcaccaagccatatatggttcttccgccgcgtcgtaccatacatcgtcccaactcccaagtctagacattgattgtaattttggttcgaaatttcgaaccccaccagcaaatcaatataccgaccaaaattttcaggttttcttaaattttatttgaagttgatcatattttattcaaactgagtcaaaatctgttaaagttttagaaaattttggtccgaaaagtgccgaaaatcctaaaaattccaaaatttcggtcctaccgaaaaatttcgtcgaaatcaaaagtggtgtaaaccctgacggcccgtttggttggagggagtttttaggagggattaggagtttagagggatgatgctattaattgttttgtttggttgggagacatgagaattttggtgggatggggatggggaattgagaaaggaactccctccttttcaatagggcaggtaattgggagggaatttctcctttactttaatcaagcaaatctcagccatccgtttttattaatgacctaatctccaactaaactccctatcaattccatcacctctaccaaacaagatattgagattaaaaatcaaattcccatcttaatctcatcatcaattgtaaactctcaatccctttccatcgagttaccaaacaagccgtgagtcaaagtggtgtaaaccctgagtcgggggtagagtcggattcgaagccgactccgtctcctagctcgtttccgaacacaacggcgctatgtcatcaaggtggctcacaagtcagaagcaacgcagcaaaattgaggaacaggcggaggagagacgcgacaacgacgttgaatcgatctcagtagcagctagcgttccacgtacgaaaatatatggaatcttcggtggcggcggcggtggcagcggcagccgcctccgacgaggcagcagcagcagcagcaacggtggcggcagcggcagctgaagccgccaccggagtggactgtgcatgccgacgatgcggcggcggcggcgaccaccgtggacggagacggcggtgacgagaattcgaagcagcagcagcagccgtctgtgaacaagctgcacatgccgcaggagtacgtcgactacatcctggcatggaagaagagccccttccctctccccgacgacggggagatcctctcgccggagcatcgcgagatgcgtgagcggatggccgccacctgcaacgagttgggcgacggcttcgaggagttccaggcggaggtccggcgcgaggtcgaggagaaggggttctacgaggtcgacgagagctacttcgccaatcaggccgagatacaggctcagctcaaggatgggccaagatcgactggggcgacatcgtcttcgccgactgggatgacttcgacgaccccaattgctgtcgatcgctgtaataattgagtgttattgacatggtaattaacctgtgatcgatgatcatatatgtgttgtgtgctcgatgttttgctgagggagcggatagactatataaatgtatttgcagttatgcagttatgtgagcttaatggtaattgctaacttgcaatgtgtaattacatatttattttcacctatacgcataaaagattgtatgcaaatatattagaagaaagcatttttgaggttacaccgtacaacggccgcatgccattgctaggtgggcgggaggcaagagacgacacaggataaaaagaaaaaaaattgagagaatggaatactaaaaactacacctagaaacaggtgtgacagcggcggagcaccactatcctcccaacagaaccccaaaagccgcggcgccaatagttaaccacaaatgaccttcttaaaagatggaggctagtaccattgaaaccgacgagacagagaggaatccaataccttgaagtttctctccttccacagctaccaagaaaccaagagaactagggagtcgaaacatttacaaagatgttccggttggcaggtcctagaagtcggtcatcaaatctaaagcgtgcaaccgcaagaacaaagggtgaggtcagaggggagagagaattaatgagaggcatgcaacaataatagtttactgccctcgactagtttaaattgccagttcacaatcaatagcaatagtgtcattgtattttttttcaaaccggctatgatattattttcagtgaaagtttaaactgaaccggtaatgataagatcatgatgattgtgtggtagtataacaaacgccatcaattaaaccaggtagatataacaaataactagtacactaattagctgtcagtggttgatgaggagcaatatctttattgggcaagtttaccacaatatctttgttgatttcaacataatgtgaaaaaatatatattttaatttagtcctccaaactttttttttgccacaacaattgacttgctattgaatatgattcacctggacttcgttttacttcctaacggtattttctctatataagttgtattttgtaatgaaatttggtgaggttcatagatgcattataagttacctcctaacactttttagaatttgtttttatcatatccctatttacatatattggaagcaccgagactgatttagacatagaggcttcaaatttctagcaaattatcctaaaataaataaaaaatagtgtggatcattgatatgggtgttatcaatggttgtacaaagttttagcttaaaatattatccaccaacaaagaaggggctaaatactgcagtcgcattcactactgcctcctcaccggagaactccaccatgataggaaccatggcgatcgaggcgccgtggcgattaccgactcggagtcgcaactgaccggagtgtatcgtacacgccgatctccattccagaccgagtccgagttctactagggtttgcgtccccccaataaattcaacgccgccgccaccgcttcctcttgcttcttctagctacagccacaatccccaaccatccgtacgagcttagtagacatctccagagtactccaggcaaggcgaggcaaggcgaattgcagcggccaatcgagcggatcaagcgcatggaggccgagaagggtacgacgatcgtgaagtcggtcaccggtgctgcagccgaggagatcttcaccgagcaggaggatgagctgcaggctctggtcagcgaagaattcgccaagatcgacctgaagagcatcaagttcggcgactgggactacgacgacccgacttgctgtcacatgccgtgatatatcatgtgattttgtgtttctgatggatggacgatcgactgagtcagactgaattagttaatgtctcttactgtaaatcttggaactaatctgagcttaattattactactattagtatgctagtgcgagtagttgctgatcagttcattactttatttttttgcaagtgatttatgcagttgttttatattataagttgcttgaactttttccccaagtgactaagggcccatctggtatcactccagttcttaaatttaacctcagcttcaggaggggtggagttgaagtgaagctgtgctaaacagatcataagtttgtagaaaaatttagcaacactacaacaacaaattagttttattaaatgtaatattgaatattccctctgtccctaaatataagcatttttggacttcgacacggtctctgagatgctactttaatcaataatatctacaaaagtaaaatgttttaaataaaaagagttgtagttcgtttaatgataaatatagtaacatcaaatttacatgattaatctttcttaatttatcgctattaataatagtcaaaatttaaaaagtttgacttgacactattctaaaaatgcttatattttgggacggatggagtatattttgataatatgtttgtgttgaaacttaaaaatattgttatatttttctacaaacttagtcaaactaaaaaaattaactatgaaaaaaaaacaaaatgagttataataaaagacgtgaatattaggaaaggacccaatatcaaataattagaaggggtgaggcttcgaacctcgtctcgcctaccaccttgtggagttagccgaaagatccttgggcgtttctcaaaatgagttataatatgaaaagaagagactacttgctaagagtcattttacggcccttcatgagaaacgggaatgtaccacatttttaagtgtaaaatttgatcctctctattctctcatgctagaagatagcaaatttacactacaatctttgatatctctgtttatatatgtttgtagctacgtttttagctgagtttggcccatttgttttcgtggcacgcttttcaaaccgttaaacggtgcgtttcgtgcaaaaactttctatatgaaagttattctaaaatagtatattaatctatttttcaagtttgtaataattaaaacttaactaaacacacgttattaccacctcattttacatgaaacacttaatcttcatcttcatcttcaggagatttaaacaccacctttatgtaacgctccgcttctcgtgagacgttaaaaactaattcggcaaaatcctaattgcgaaaatttcattctttgtgtgcgagtctaagtcgtgccgtggatctcagtttaaatccatcattgttccctcccgtcgccatcaaaatcctctacctctaaaatgtcaattccgattcaacttcctagatcaattctgaaattcaatcgcctcctttgaatcctcgccaaatacttgtcccgattccacaaatatccgagtccatcttgaatccattccttgacttctccttgagtttcccttgatacatccctaaaccctcgagttcgaatatcagatttgaattcgaatccaaaccctaaatctctccagttctatccaaatcagttttctctgtgaaagtctagttgcctcccccaagttctatgggccgaacgcccctccccagcccattccctccctctgtcgtcctcctccctcctctcgcacgtgcgatgcatgcgcgtgagccgagccaagagagagttctctcgctctctcgtcctcttcctctctctcgctgtttctctctctctcgttcgatctctctctcccacgccagcgctgccgccatcgccgatttcccgctgccgccattcgattttcggctatgccgctcgttcccgcgcgtgtgctcgctcgaggccagccgctcggtcgccgccgcgtcagccctgacgccgcccgtgaccgcgcgtcgcccagccccgactgtgtgcatgcgtccaagggatggaggcagagccctcggcctcgctccctctcccttttctttttcccgaatcagcaaggaaccgtgctcctttttcctccccttttccacttttgcccgacaccaccatccctctgccaccgcctggccgcttgcacctatgaccgccagccgagctagcgtgaccgcagctcctcctccttgaccgccaatgtcggttcttcctccctaaaccgacattgccatctattaaacctagccgccccatctccctctcgttcattccctcgccaccaccgtgcccttgccgccttgctaccgctgtcctcgcctcccccctccatcgcgcgcgctggtgaagccggcgtgcgcgcgaggagctgacgcgggactccaggcgccgtctccttccccttccccggcccgaggccagagagctcgctcccgcgtcatcggccgctcgtcacagcgcccgtctcggctcggtagtgcatctcccgttctccctcctcgctccctctcctctccttagctctgggcagtagtgcgagtagccttccagtagcaagctggcgccgccccgaccgccgccgctgctcgtcgtaggctcgccaccgtcgctgcccaaactcggtagtagccgctcgtcgccggccttcctcggtgtagctccacccaatccgactctagaaatgaactctggaggtcgcgtagatgctcaagtacctaggaatcgagctctcgtcgcatcgtcgtcgtttccctcttttgccgccgccggcaagcaccaccgcgattcgtcgtcgccggcctccttccggtgaatccgagccagtggatcaaccccctttcttctatctcgtcgttccggtgtactccctccctcttgaatcgtcgggtcgtgctcccggtgaagccgccgccgtccgccatccgtctcggccggcctccttcttcctcctctcgccggcccgcgtggctgccacgaaggcgccacgtcggcgccacatcggccgcgaccgggtcaagcacctagtcagccgcccccaccgccctttcttctgtgcgcgcggtccacggagagcccttaggctgcgcatgggccctccacctcttggtccacccgcgtgccgcgccgtgagccgcgtccgcaaaaccctagcgccccgcgccgcatgaacccttccaccgtgcgccgagtcgctgactcgtgggcccgtcccgggacccggcatgatggatccggtccacccggacccatccccctctctcctcccgcgcgccccgcccgcttgggccgcgccttgcccggccatgggccgcctcctcgtgcccgcacccggcccattggctcggccgcgccgcgcttatcccttgggccgtacccgagccgcccaaggaagtctaaatccgatccatccttccttttcttttccaaggaaattaataattccttttcctttagacagaaaatcaaataatctttagaaaatccatatcttctcaaccgctcacccgattgcctccattcaacttccaataattccgtaaaattgagatctatataatggcactactaattagtctaaataggatctttcttttggtcttttgtttaggctttcgattgtttgcatatagttgcggttaccggattttcgtcaatcgcgggatttcttgaagattcgtgaagcacagtgaagaccttgagcaaggcaagtcaccctttgaccaattgctcctataattggaaaatcattattattttgtttgcaacttgcattagtagaatcacacacttaacttgcttggcctcggtttgcgtgccaaaccgacggacctacccagtagtcgcactaattcctgtaggttgttctaccctgattccttgtcgttccacctttgtggtacttcggtatccgtgttctctgagcgcgtataccaactattccacatacaccgttgtttgtcgataatttgggaaatgggtttgagaagccttgaaaacccgacatgtagcgtcggtgtgtttgaaaacaaaatggattgtgaaaacttgcgatgctggggttgtgcctatgtggtactgtcctgtattcacatataaggaccgattcctgtgggaaattcatccgagcatataataagtgcgaccacacgggtgcaatgggacgcccctggctgagtaattagctaatcgggggagccatgatgccaagagacatgtggattcaacggggtggtgtcggggagaaccctcgggcttcctggcacagtatggtctgggacctaacctggtgttggtctgggacccctctcgttggcatatggtaaacctgtgtcggctttcgaaatgccttgtcatgaaagccttaaggtctcccgacgtggctgatctcacgggctgggtgatccgggttagtaatgtcgtgtgggtaaagtgtaccccctctgcagaggttaactaactattcgaacagccgtgcccgcggtcatgggcgtatgtgaggtgtttcctgtagcgtagatttgtttgcctgtgctttgtgaaaagttgttatggtgtgggaatcgttaccagaatcagcctatgtggtagatggatgacctgagtggtcaagaaatgaatctgtgtgattcgggatgtctaccggcatcatagactaggcttcccgagtggaagcggattgttgtgctgctgggcagctggactctaggagttcgagaaaatgaaaaaggctctgggagccgattaatcaagtggaatggctctgggagccgagaagtaatgatctgacccaggaggtcggtacattaccaaatgagctgttaaaaaacatctcttaaggtcgaatcgagacgcaagtctcttttcgagccaaacttagaaagaaataaatcacttagtgatttcaaaatgatttcaaaacaaaagatttgcaaaaacaaccttgcctctcttccaagcttacattaaacacctaaattcctgtgacttgctgagtacaaaagtactcacccttgctctatataaatatatatagttcctccgcccggaagttgaagatgaagtaaagtgaagattagggtttcgtcctggttcccagccatcgcctgtggtgttgggtgttagtccgttggttccgctgctgccgctgttgttggtgtttcctcgtccgcgtcatcggttgcaatctcgggctgttctgagctgcaacctaagttaagataaataagtcctctatttattttaaggattgtaatgattcatatttgtcaccgtgggtaccagcgctatgtcctgggactggtattgagatcgcggtttcgtaggaagcggttctcgccgtttttctcacgacacgctcctgtcaggtgccgttgtacggcggtgccagattagggtgtgacactttatatatgtttgtaggacatatctcgaagattaaattatgtttccatggtacaacgttagtactgtgtattccctctgtttaattttaaaagtgtgatgttgattttggacacaaagtattaccctttttgttatgtttctcacagtagttaagcggttggttggcgagcctatatagatcggtttcttcgacctgttcaagatcgagtccatttaggtagtgttttttttctataacaagtacttcctccgttttacaatgcaagtcattttagtatttttcatatttatattcatgttaatgaatttagacacatatatatctatctagattcattaacatcaatataaatgtggaaaatgctaaaataacttacattatgaaacggagggtgtaataccaagttatttctaagataatgactagtgatactaactgaatacacatagacattttgcaaacactaacagagatagcataagggccaagctgaatcgatcctctcctaattaactaggtctgtcagttttgtccacaatgacagtttagcatgtggtgtgtggcatctgatcgatcagtcctcgaacaggatgccgctctaagttcaccttggcccataattcatcggagagagcctgggcttcttccagctcggcgaagtaggtgtcatcgaccatgttgtcctgcctagctaggacctccacgccgcggcgtcggagtcagggttcatctatcagttgaggcgtttagacgtttgtattagggggtcactgaaattctgaaatttcagtccaaaatttagagtaaattttagttgaatttagtaaaaataatatcgtattgaaaaattaaaaaatttcggtccgaaatttccaacctggtcagagtcggattcgatgtcgttgtgtgtccgagtcggagacagcaggtagcctagctttgacgttggccggaaaataatgtgtcacgcttcagtggttttgcctcaacgaccaatctcgccgcacttaattacgaacctcatgagtttctgtagttgataggcacggaacaaacaaatggtgcctataacgcgtgcgcacttattcggatgaacacttattttgaaatgaaggatagaaaaaaaagataaataagaaaaatacccaagatttagaaagaaatataactgcataacacataaaaaatgctaaaaggaaaaaaaacatctgaatagaccgttggaaaaatataggaagcaaatgggaggagaaactttagaaaaacaatctaagagattagagcttttcctagaaattttccacaaatgatttaaaatcctctaagaatcctatgttttttctaccaatcaaaggtagcctaacaaaagtacttgtaaaaatctaccaatatggttttttttcaagctaaatatttgagaattattagtgatcaaggtttcaaaattttgcatgcataatatttaataatgcaatatatttaaggaattttgctatgtatcactagtgtattttttttggtacgcactcgaaattgtgataatgatagaggtgatgacaacaatgaaatctaacataatgataaaggtttcctttgaaaccttgattgatagtcatttcttactaaatgataggatcacagttcacaagttaacaacactggataaatcactcgcaactcaccagcttgtgacactgaatttaaatatactagccaagaggccatgctttgcaacaaaaaacaaattgagtttatagcttattaactcaatcaagcacgtatttagtgcaagcagtacttttactatttttcttgttaaacaagtaggcgattttaagattttagagagatctagcaatgaaacaggagagaactcattggaggatggtgtaataatatagattgtgggatctaaatatcagtggtagggatggtgtggtaaaatggataccactacttagtaagactataacgcgtgcgcacttattcggatgaacacttattttgaaatgaaggatagaaaaaaaagataaataagaaaaatacacaagatttagaaagaaatataactgcataacacataaaaaatgctaaaaggaaaaaaaacatctgaatagaccgttggaaaaatataggaagcaaatgggaggagaaactttagaaaaacaatctaagagattagagcttttcctagaaattttccacaaatgatttaaaatcctctaagaatcctatgttttttctaccaatcaaaggtagcctaacaaaagtacttgtaaaaatctaccaatatggttttttttcaagctaaatatttgagaattattagtgatcaaggtttcaaaattttgcatgcataatatttaataatgcaatatatttaaggaattttgctatgtatcactagtgtattttttttggtacgcactcgaaattgtgataatgatagaggtgatgacaacaatgaaatctaacataatgataaaagtttcctttgaaaccctgaatgatagtcatttcttactaaatgataggatcacagttcacaagttaacaacactggataaatcactcgcaactcaccagcttgtgacactgaatttaaatatactagccaagaggccatgctttgcaacaaaaaacaaattgagtttatagcttattaactcaatcaagcacgtatttagtgcaagcagtacttttactatttttcttgttaaacaagtaggcgattttaagattttagagagatctagcaatgaaacaggagagaactcattggaggatggtgtaataatatagattgtgggatctaaatatcagtggtagggatggtgtggtaaaatggataccactacttagtaagactaatgaaaagaattaatctcatgtctaattaatggcagcaactaatctactcctaactgcaatgacagatttcttcagttcgtgaagaataaaaaaaatgaaaaaccacaagtttgatcaagatttgaactaatccactcctaattgctgtaaagaaaatgaaaattttcatcaaggtttgaactaattaatcttgatgaacatttgttcaatttgttgaaaaatgaaaacaattgcaatggattgaaacattttaaaaatgaaaaattaaaaaaattaaaaattatgtctgagcccaggttcgaactggggacctttagtgtgtgagactaacgtgataaccaactacaccacccagacaattcgttctagatatttcaacacaaataattaatagtaacttgatctgcctgttttaaaatgggccagtatttgtctaattggaacaattccacaacaactctttacaaattatccagaacatatttttaattgtttttatatagaccagaatacccatctcctacaactcaactgtactgatcagaccaaatcatatagcacaaaattgaaattactactgcaaaataattagagataaaaaaaagggaaatagcgatggagctcaccgccatgacctcaggcaccacaacgatgagcttgccgccgctaccggacatgccatctccgtggccttgccaccgccacgacgagctcaacaccgatgttgaatttgctcgcgctgtgtcttctgacccgccatctctaagacctcgccctcaatgatcgatgtgaccgccgctcctctattgtttactccaccgctcatgctgctgctctcaccattatcgatgctgcttgtacgccgcggacgtgaccaccatcgccgcccatggttgctcgctccaccaccgtccccaccgctacttgctttaccacagtcaacgcccatttcccaactggatgcagttgacgcgaccgtcgctactctttccatcccaacccctgttgctgctccgtctaccgctgccacccctaccacgctctccgccgctgacacgccgatatccatcttacgctgacgccctacgagtagacaaggatattttggttcatatatgtttcaggtgtatagcatagcatgtttcgattttaacatatttacagtggcatcgttccaattaaacgaattgcagtgacattttctaaagttataatcgcatgatccaattaacccaataattaatcttgttttactagtaaattatagtcgctgttcgcaactgcttagccattccattccgccgccaccacgagacggcgaatccccaatcccccggtcgccgccgccgtcgccgccgccatggagaaaaagaaagagaaacccaaccgcaaacgccgcaaacctcggcaagacccctccccggactccggccccggccccgactccgactgctcgccgccgtcctccccgacctccctgcgccgcctcctcgacccctactccaagccccgcctcctcgcgctcctctcggacgccgccgccaccgccggagcgggagccgacgacgaccccacgctgctggcccgcatccgcgccgccgccgacgcgtccccctcccaccgcaggctgttcgtccacggcctgccaccgcacgccgacgcccccgcgctcgccgcggcgttctcccgcttcggccccctcgccgagtgcgacgtcgtcgcgcggcgcgccacgggggcgtgcaaggggttcggcttcgtcacgttccagtcccgcgccgccgcccgccgcgcgctccgcgaggtgggccgcggcggcgtctccatcaccagccgcgccgtctccgcccagtacgccaccgccggcgcc

SEQ ID NO: 1713 - DNA, 911 bp, Oryza sativa
gtcgtcgccggcggcggcggcgacgagttgtacgccgccgtcctcgccgtctcctggacgagcaccttgatgatgttggtgatgatcgccacgctgtcggcgttgccggggtcccacccgggcagcatcggctgcgtgatgttctccgtgttcatgagcaccatggcatcgtccgcgttcgtcgtcgtcgtcgtagagttgctgctgcggttgaggatgtcatggccggagaaccggagctggcagccggcgtcgtcggcgacgaccacgtcttcggcgagcgggcacgcccgccgcgccacccgggacgcgccggcgacgcagtcgccgcaggccgaggcgttgggtaagtcgccgcggcagagcgccacgccgtacacggtgtccggggcggcgccggcggcgcccttgccgaacagcgacggcgtcgacgcgttcttggccagcccagcaatcaatcgctcgaggttggactcgtaggcgctcctcgccgtgtagttggtggcgccgcagttgaaccacacgtccggatcggcggcgacgatcgggtgatcgtggccgacgacgaggacgacggcggcgacgacgacgatgtcgatcatgtcgacgccgccggtgaacacgaaccaacaagaaattaagcggcagagttgtgggaattcgtcttctaccttgaggaacaacgacgatgacgtcactcatgtcggcatctttggtgagacaagcgtatgccgcttcacatgttgattttgttcgttcgttcttctcgccggtaacgagccaaaatagaatgaaatcagatacttccaacaatgtgtgtacgtttattttgatcttggaaattttattgaccagtattatgtcttcctcagtagttaattacacgagagtaccttcacggtctctattct

SEQ ID NO: 1714 - DNA, 2936 bp, Oryza sativa
gtttgtgctagtttttgtggacgacattttgatctatagcaagaccttggctgaacatgtctgccatctgaaatcagtactgacagtgcttcaacaacatcagctctacatcaaaagaagtaaatgctctttttcacaaccttctctggaatatttgggacatataattggtgctattggggttgccactgatcctcagaaggttcaagctataagggactggccagtacctaaaaatcttaagcaattgagagggtttttgggcctggcagggtattatagaaagttcatcagaaattatggggtcatcactaagcctttgatagagttacttaaaaagggtaccttctttttctggtctacactggaacatactgcctttcaagaagtgaagcagtgtcttcagcaagcaccagttttggccatgcctgacttcaaccaacaatttgttattgagactgatgctagtgacaagggtattggggcagttctcatgcaggctggccatcctattgcttttctgagtaaggctttgggacctaaagcacaagggttttctacatatgagaaggaatgtttggctattctcatggctgtggataaatggcatcaatatttgcaatatgctgagtttgctatcctaactgaccacagaagcttgactcatctgtgtgatcagaaattgtcaacacctatgcagcaaaaggccttcctgaaattgttagggttgcagtatgtcatttagtataagaaaggggtggagaataaagcagctgatgctctatcaagacagggtgagtatgatgaacttggtgccctttctgttggtcaacctagatggatggaagttgtggtcgatggttatcaccatgatcctgctacaaaacagttattggttgaattaagtttacatcctgatggggtcaacaatttcacattggttaatggcattatcaaattcaagggtagaatctggctagggaaacacgtggaagcccagcaagctgtcttactctccctgcacaatagtggcgttggaggccactttggtatagctgccacttaccaacgaatcaagagcatgtttgcctggcctggactaaaaagggatgtcaaggcttatgttcagtcttgtgcaatctgtcaacaagcaaaagtagaacattgtaagagcccaggattgttgcaaccccttccagttccactttaggcttggactgtcattagtcttgacttcattgaagggcttcctaagtctgggggctttgatacaattatggtggtggttgataagttcaccaaataagctacgttcattcccttatctcatccctttactaccttaaaagtggctcagttgttcatccagcacatctatgatgtttttggcatgccgcaggccatcatctctgacagggacaggatctttacaagtgctttatggcaggaactctttcgactctcggatgtcaagttgaatatgagctcgtcttaccaccctcagacggatggccaaacggagcgtttgaatcaatgtttggaagcttatttgcattgtgctgtttattcttcccccggtaagtggtcttcttggcttgcttaggcccagcactggtacaatacttgtcagcatagcgctcttggtatgtctccctatgaagctctgtttgcccgtaagccaactagcttcggtgtgattgatatgggtcaaagtactatcccggatgtgcaacagttgcttgtcaatcgggcgaaattgaacgagttgcttcaccatcatctggttcgagctcaacagcgcatgaaagcacaagctgacaagcatcgttcaaaacgccagtttgcccctggtgatatgggttacttgcgacttcaaccatatgttcagctaaccatggccaaacgttcttgtcacaaattgagtttcaggtactttggaccttataaagtcctggaacggattggagcagtggcttatcgattggcattgccggctgggagcttgattcacctagtggttcacatctcttgacttaagaaggcagtgcaacctgatacaccagtcagttcagatctacccctgacttgttctactgatgaagttgaagtctatcctaaagccattgtacgtcgtcagttgatcaagcgtggtggttcttccattaccttgctggttctggtacgatggtcagggctctcctgatactcttgccacctgggaaaatttgcccgactctatggcgtcgttttccatctgcgctggcttgggggcaagccagtccttaagggggagggaatgtcatgatcaatgggccttgtaagggacattgtttgtgttgggccaactattgggccgtcttgtaagaaccgagccaccaacacgggtgtgttataaaccctgcgtggttggtgaagtggggtatcgaagaagagatatgataacaaactactaccaacctctctgctcctgaattctccttcttcctcctctgttcttccatgtttcctgtgacgattccccaaatctagagccacgaaccctaggatcgtcacatatgtcttgtgccaactttatctgagtgaaattatcccaatcctttcttttcacactgcagagtactgccaagtacaagtgattcaatgcccttgttgagcacaaagagtgatttagtacttgcaggtgctcatttgctagattaactcttttttgtcagagatgatagatgcaataaaagacacataatagttatatttttttagataatggattttcattaatccggcctctatatccacgaaggaatacatagccaaacataatagttatatgaacatgtatgtgcatctcattatattgtctcactatttctcgtctttcattctatctttctcttcgccaagctcagaaagaaagaacactgtttcgttttaggctg

SEQ ID NO: 1715 - DNA, 4205 bp, Oryza sativa
tagtggatcccccgttttgctcagaaagaaagaacactgtttctttttaggctgaatgtaggcttgagaagcattgggagattgatatagttagtctgcttcaacatgtcaagggtggttggcacaatttgtggaatggagaaatttcaagtggcggcggtcggcaggtactccaatttccgattgcaattatctattaaaggaactgagacacaactgtagctaggcaagaagtatatattaagaagattacatagtttctaatgtttatcattatcagaaagagagccatccttgaacaatacagaaaaaggccagcttaattgaaagataggtctgcatctccagaacatagttgtccatctttctgttgaaaaatggaaataataggcttctttccagatcacatacattcctaactgatagaacatatttgctttgcagatcatgtagatctttgtctaccaactcgcagctgtgctcctcaaccatatcgatacaggctgacacactgagtacttgaatccacatttgcctcattggccctgtacatttacacaagtatgaaatgctcaacagttaacacccactaaccctaataaaactgggaaaaagataaatcttttgcaaataactgaagatgcaagcagcctggccctgcataagctggataggagcagatgatttcaacaataaggttttatttgtggaagtgatgccttactcattctgcagattcccctggaacagcaatcaggcacatattattaatcttaggaaattcatagaactactgtaattgaggtgaatctgcactgcagcaaagggcaaaaagatgaacaccttgttctctcgaatttttaggattacagtttccaatgctaccgtatcatcctagctctaaccaagcaaacggcttaaaatttgggctttcactgtcacaaatacagaaatataaacagaatgctctcaaaacaatccacagcatccgaaatcgtgaacacaagttaagcagtaggatcgatgaggaaaatcaggaaggattttgccaaatgtggaaggtgactactagtgacttatgaggaaaatattgatctatatgcttcctaattttttctttttgcggggaacttcctgattatctgataagcttcagaaattgatcagtgtctacaacatgcagcaagagttttcttgtgcaatttagcttagttctttaatctctcaaggcatttttcatattacttctagaattgcactgttgtacaatatatggttttagtcagtaagctatgtgttatcccaatattcacccttggatggacaaagtagagcaagcgattcaatacttggaaatgtgctcagttacttaatttaattttttgctagtcagagatcatatatatgaaccactgagtatgtttgtgtgcctcgcaatttgcttctatcattcttgggtctcagtttcaaatttcatcatgcctggttatgaaagaactacttctctctgttgctcgatgtgagattggtaggcatcgggaggtcagtttgtccactgatgcttccattaactccatggattatctttgaaatagagaaggttcgagtgaagtttgcgacacattcaggaagcaggaatcaaagtgatgccacattcacgaaatcgaacaaacaaggatagagtcatctttaagctcaatccagtggcggatacaaatatatctaggcatctacactcacacactagaaacaagcatgcaatgcactaacaacactgcaaggcgcttaaggcgtccagatctgtatgaacctcatgattaattagttgatggcgaatgccggagcataaaaaatggaaaaaaaaaagggaaatacatattgttctttgtcttcagacatcttatatcaaacagtattatataagttggcataacaacattttcgtcctttgcatatatttattaattaagaaaatgtatagcaatgtgagtgacagcctaaaagttgttgcaaagctgtttcatagacaaagatcatcaaacataaaaaggagagctcacattgagatgatcgagcaactcgtatgaaacaaaaaccagttgcttcctttcaaactgctgagagttcttgaatcgtgattgtcaaagtggatgctagcttggtcagtcctgaatatctccgttgtcatattattacatttgttgtctaagcgcttcaccaattaagctgtgctgccatctatctgctgcctcaaattaccacttgtgaatggaaggtgctgggaacttttgcctgcaagctactggactttcatatagtttcattcgtagagtttcctttcccactgttttagaatatacatcacatcagaaatttgtatccctcttgtttcgtatatgaagaacaggactcaatgttagtgatatgccctagaggcaatcatagagatgattgtatcacatactatgtttatatatttatccaactttgttccttgaaatagataactcattattggttaatgaatatgtgattctttcatgagactctttatgttgtgtgttgctatttttaaaggatcccttatcaaatatcatatgtggaacaaatatgtttagatgatcagcacatgtattaattgatgatcatgtctcatagattatggtataaagataccaaattaataatgtggacacatgttagtgaacatgttggatagacccgacatgagacactgcaagagccatatgtgttgtgtcatcagtgatcagcgtgggaatacggcgaggagaacgcacgaggaggagaaggtcaagccagtgcgatcgactacttcctctacatcgacgcgcgctacttcgcgagaattccttcgacttcttagcgccttcttctactgcgcagcacgtcgaatggtaacgctctatgatctaattaatacttgcatggttcctggtttacgcgatagaaaattttgatttatactatcatagcctacgcgtatcccaacactcaaactatccgttttcggattttgggatgagcacaaatgagaaaccacaaaatggctgtcaagatatatattggcctatccaacctaaaagattaatttgattggagggcaccaccctcacatttttgcgttatgctccttcatcatcaatttgcgatcttagatacctattactgaactccccatcgtgcaacccatgaaaaatcgttctaggtttctcatggttcatgccccctactcggaccaaacttatcgctgacggtccacctatgatcttatagtgggggtgcctacaaaaagcattatttgtagcagtattggacactgatagaatataaagtgaattgcccacctttcctcaccagcttagattttttggttggtcggtgcatgcaactcaatatcatatcagagccataggtcacgagttcgaatcctagctagcgcactattaaataaaaaattgcagcccacttcttttccatgctaaaggctgaggggggtctctcgtgagggggattcacttctattgcacggtagagacttgagagggcctcacttttgggttgaactggttggtgtatgtaagtcaatagacgccttggtcaacctagcaaatcccttatgtgtggcttgaaccaatagtgatactattctcactaccagttcattattgatctaggccagaattaaatgtgaactggtcatcatgggccggcagggatggcctttttctttaatggtagtggatgcaccacataagtataacatttttttatatatttatcgataaattttcttctaaaaatttctcaaacgtaaatacggtgtaatcgtagtatagttacattctaacttgcatataattttagtgtaatttgtatgtaactttcaggtaattttcagataaatgtatagacagtcccgatgtataatactacttcaaacactaccacaggtacagtttgattttactcaaagaagacgattattgtcagaccgcctaaaccttggacaatggcatgtgctgaaagtgatacgctagtatcagagtttaagggcttctgggtatataattaaccacaagttaaggttatttcgttgcttcatttgtagactgcagaaatatacgtgctgttttgtattccttgaaagttgaaatcaatgagacgaatgtgcaattacgacttaa

SEQ ID NO: 1716 - DNA, 574 bp, Oryza sativa
cacaactcagtcagctaattcattataatatgaacagttttcctactgatctactccatgttcatgtgaaattcaaatttttaatttgaatttggtgaggcgacgattagttagttggccaaagtgtgggggtcgcaggcgtcgaccgcgcaggcgagcacgtccttgtagcccctggtgatggagaacgcgtcgagcacctcgccgtcgtcgctgcggatgaactcgagctccagccgcgagtggtcgcgcgccgtgagcttcacgtacccgtagctctcgctcctcgccgcgctccactgcggccactcgccgccggcgtaccccctcagcctggcgccgcccgtgccggccacgacgtggatcgtgccgcccagcgcgccggtgtacgccgccgccggcgagctcccgttcccgccgccccccgccgccgccggcgccgccgtgcaggtgttctcgtagaccgggcacgtccgctcgtagttgtggacgtggccgtagacggcgaggtcgacgcggtgcttctgccacagcggctgcagcgtccgccccatgggctccgagaagggagccc

SEQ ID NO: 1717 - DNA, 2038 bp, Oryza sativa
aaaaaactgaaaaaaatggcttaattggatctatgccactgcaaatataccaattcgaaaaaataccattactattcacgacatcggctacatgtcactagaatttgggaaaattggaatcatgccactcccgtccaattttctatcaacctctgtcatctctctccctcttcctttcttcgcttctccgccatggacgccggtgagccctacacctcggactcgttggtccttgccactgcagctagccaatggtcccctctccatctctcgctgctcctccaccaacagcagccgcgacccgtccgttccttgtcatccccaccgggggacacggcacccttgtggcctcgccaccgtcatcaagggaatcagcagccagggagcttctccgccatcagaatggtaggttctcagtaaggtcaatgtatctagctttaattaacaatggttatgttgagaggaacaagtatatttggaaacttaagatgtcgcttaagattaagatctttatgtggtacttactaaagggggttgtgttaaccaaagataatttggcgagaaggaattggaatggtagcttaaggtgttgcttttgtatgaaaaatgagtctattcaacatctcttcatggattgtcattatgcaaagttcatatggagagcagttcagttttcttttggttttaaccttccaactagtatatctcatatttttgatgggtggcttttgggggttgacaagaaaaagagtaaactgatacttgttggagcttttgccatttgttgggctctatggttgagtagaaatgatttggtttttgacaaaacaccatctattacatatatgaaggtaattttcagggtaacgcactggctacggttttgggcacagctacaaaggtgtgaggatgatggggaattcctaaaagttgcatgccgcaggttggcgtcgatggttatgcaactatttgccaattatgggtggaggttcacaaatagacttcaataaatgtgttctccttattttggcttggttacctttgtttttgtttggtgtgttcttttatctgaactacactcttttctggagtgcaactttataataattggctgtagctctttttgagcaaaggctgggatgttatattccattatcttaaaaaaatggacgccggcgagcccaagagggcgacaactgaggggaatcggcaaccggggagccgagggcgaagctcagcgggacgagcggcacgggggaaggagatcggtggcggcggcggcgagggttggggacgacgacgcggtggtgggcagggtggcgatcagcatgggggcggtggccgggacctcgccgggggagcggacgacgacgacacaggcacagctcagcccgctggctccgagacgaggggatcgacaacgacgatgcaggcgcagcccggcccgccggctctgagacgaggtgctcaacaacgacgacgatgcagcgtagcccggcctgccggctccgagacgaggggctcgacgacgatgacacaggcacagcccggcccaccggttttgagatgaggcgcttgacgacgacgatgacgcagcagcctggcccgccggctccgagacgaggggctcgacgatgatgacgcaggcgcagcccggcccgccggttctgagacaaggcgctcgacgacgacgcagcgcagcccggtcggctggctccgagacgaggcgctcgacgatgataacgatgcaggtgcagcccggcccgacctccatctctgagatgacgacgacgataacacctcctgccgtgtctatggtggtggagagagaagaagggggaagagaagagaggggaggaaggtagggcccacgtgcagctgggggctaacggagatttttgacggaagatgtgatggagtggcacggttccaatgaagagaactcgaacctccatgctctttagcacgatattttgatttctccaattttcagtggcacgtagccgatatgttgaatagtagtggcattttttcgaat

SEQ ID NO: 1718 - DNA, 13390 bp, Oryza sativa
agatgctcaggccgtccctctctaccatcaccaccgcggaatcaacgtaatgtctccgttataagtttcaatatatatcattagatgaccatctcgatattctatttttctcttttagattatgcacggcagacgcacacacccacatacatcactagctacacacgcaatactgtactcacaccaccttgcaaatgcgcctcctaacacacgcttaaagagacagaaaccaacggcatatccctaaaatcacagaaaccaatggtcaattgaaagtccttctgctgtcttgtatgtgtgtaatatttgtgggtaccaggatttgaatcctgatgagtgaagtcatgcactgcatccacgacttcaccatcacaccacgggtgcttccccgccatctcgatattatattgcactttagttattgttatgcaattctactttgttttgttcaaattgcacattggatgatcagttggttgatttatagggtcgtcatcgtgtcgccgggcgattcggtgctgacggcaacgcagaagatggtggaggtgcacgcgagctcggccgtcgtcgccgtcgggaacaaggctcagggaatcctcacgtatgtgactgatcacaatcttgcttgcttactttgctttggtcatccacaaagttctctctaaaattgatgtgtgtggtgcaaattaaattaacggatttttgttgatgtgcagctcaagggacatcttgatgaggatgattgccaagaatctccctgcggattcgacgccggttgagaaggtaggacaggattgataaactgataattgatgaatcacttgctcttaataccttccaagaaccataaaacatctcaaaaaacatatattatgcacgaatttgatatgtatatacgttttatttactaggtgatgacactggatcccgaatgcgcgacagtggacatgccaatactcgatgctctccggatcatgcaagagaggaaattcttgcatctccctgtcatggacagaggtaggtaaaatgtagactagtaaatgaaattgtttggtatatatatgatgtgatgattgatctgcgggttttgccgttgtcggtttcgcaacagatggatccatagtctccatcctagacgtgatcgacatcacacatgcagcattctccattgtaagttcttgattggccatgtatgattgaagaaaaatgttcaggtttgtaatttgttgagatgtctctccactgattgcaaatgagtgggtgggtaggttgaaggcaacggcgatggtgccgtgaacgatgacgcggcaatctccatggtccagaggttttgggactctgcaatggccttgggacccctagacgatgagattgaatcacaatcccagataaggttgctgtcgtcatcctgaaattctcgtttccgcaaatgtacactggcatttccagtatgtgtgaccttgctcattctccatcttcccaatcggccagcgaggcatcgaggtcgcagatgatgtcggacatccacaacgagcagtcgttctcgttcaagctccaggacaggcgaggacggatgcaccggttcagctgtggtactacactagtactcgaaccgtgccggtttttgtacagtgttttcatttctggctagcaggtattgttgcactgtagctcatccgacaaaccaaaacacattttcgattttcttgcagaggtgcagagcctgacgccgttgatcacctgcatcctccagcggctcggccccgacctcgaccgcgaccacctcctcaaatccttgtaagcaatgtcaatccagtcccaccattgcccagaaaaaaaaaaagcttgaaaatgcaaacaaaagctgcaagcaagtcgttaactgaacaactggtgctgcgtgtgttgcagtacgaagacgaagaccgtgacaaggtggtgctggcgtccgacgacgacctcacggcggcggtggaccacgccaggctcgctggctggaaggcatgcacgaactagacagctgatcgatctctgaatgttcctgaatcctgatcatcgatcatcaccgtcctttgattcttgtacctgtgcttgtggatctttaattgcagggcctgaagctgtacctggactactccggtagctccggcgtccgtaggaagagcgtggttcccagcgtcggggtcgggggcggcggcggcggccgcagcagtggcggcagcacggcggtgatggacctgtcgagccgggacgcgtgggcggcggcatacagcggtgtggccgccggcgccgccctggtcaccggcctcggcctgatggcctatctccggagagctagctgagttccaagagttgaaggtttacaaagtgatctttcagaaagcttagacgggccgggctggaaaaaaaagctgtatggtcatgaaggctgggctgagctgggccaaaagcccaagatgtatgatgaatatccttagatgggcttgggctaggcccatcagaaaggggtggaaatgaaaccattgtgtatagatgaaagtggtttgatgaaagatgaaagggttaattggatccatgccactgcaaatagagaaaatctactccccggtatcccgtggtgtcgggatagctcttcaaccttatccatccgaccacccgcatcctcatccacccgacgcaatccccatctcactctcacctcactcccctcctctctctctctctctgaagaaggccgagcggagacgaagccggccgggaggaaggggtcgtcgtcgtcgtctccggcggccgaggaggacgacaatggcactgtgccggcgaagtcggccaaccctcagcggggtcgccctcgagctcgccttcccttgctgcgccgctttggctcaccgccctcgtcggtcggatgtgcgccggggagtcgtcgccccggggagggcagaagcgggagctcccctcgtcctcgccctcggcctcggcgtcaccgtcgtccccgctgcggcctgccgctttgcgcctccgggatgaaggctggcagtgtgcgtcgacttgcaacaggtatggccgtcaacctcctcctcagctcctcctcgagacttctcatactctctggctcgggcctcgaccctcaactcgccgtgcctcctcggcgctatcctccgccgttgcggccctccctcccccacatctcctcctcgttttgacggtaccctctgataccccacaagtatcagcctggtacctaggtaccacccggtaccttggcacgggtatcaggtatcagtcgatacctagtcggtaccaaaggtactaggtaccaggtaccaaccggtacctaagataccaggtatcaggtatcggtcgatacctagtcggtaccaaaggtaccaggtaccaggtaccaggtaacaaccggtacctaaggtaccaggtatcaggtaccagggagcacacgtggacagagaaaaggaaaagggagagtcacttaaaatatcccattgtaacagtatcccgttgtgtagctgccctcttgcaaatatgccaaattaaaaaaataccactacttttcgcgatattgactagatgccactaaaactttgtaaaattggaaccgtgccactccgtcgcgtttttcatccacttttccgttatccccgttaatttctaattttctatccttgccagctaactccggcggcgagcggtggtgttggaagcggcggaaggaagcggagaggcgggaagggagagacgccgccgaaggccgagtgccaccttccccgcgttcttcttcagccagcttgactggaagatgatctccacgatgttcatgctcgtgtcatcctgcccgagctccgaaagatcgaaactacaatcgaaatcgaatcaagggagtcgggcttgacgaagacctcgtcgcagtcggagcaggagaagacggtggcggcggcggcggcgagggtgcgcgggtcgagcaccgagtggcagtggaggtagaaatcggagagattcctgatctgcattgccctaaatgagccaccgatggatgacaacgacgaggacagtgccgatggcggcgaggtcgtcgtcatcgtcgacgatgtgctaattaccgacgacgcggagatggcggccgcggcagcggagtcgccgtggtactcgggaccacccatcagcgacctgctcgacgtgcgtgctgcctccgccaccatcgccgccgacgttccggcgccggcggcctctccccctgctcgccaccgagctctccttggttctgcagatcgatcggcacacgtgatgctcacctccgccgctgtcattcttgccttctgctgctgtagctgcagccattggttggcttctgctagcccctaggctgaggaggacgaagacaacgacgactagaacacaaccgataaaattaaagggggcggcagaaaagtggatggaaaatgtgacagagttgcacggttctaattttataaaatttaagtggcacccagtcgatatcgtaaatagtagtggtattttttaaatttggtatatttgtagtagcatggatccaattaacctatgatgaaattaggggaacaacacttcttgcagatcgaggagatggaacagtgtggatttggcataacaaccttttaagttgtatgtgaacagtaaacgttttggcccttcccctttttaaccttatggtttgctaggtagttctccaaacagaaactggagttgaagttgattgtttgataagttacggaatgacattgccacctaatttgttcttcaacttttacgagaacatctttttttttaacatcagattccaaattttctacaaatacatcagtataagaaattgacaattgaatgcccgaatataacaaggtgcattctagtataagaatttgataatttagtattttagagtagcaacttggctaagcatgtgttgttttggttaacgagtactaggtaagtttttttcacgatgtcaatatgtgtcatcacatagcaatcctacaaatattactttataatattaaatttaatctttaagaattacattattgcgcatccaatttgccacaggtatggatttttttctacaccttctcaatctcaactgaaatataatattttctgcaaagtaaagtttaattaaatttcagattttagaatgaaaatttaaatatgcttatacaaatccatgctagtatattgtcaaaattaaaaataatatgtataagaaaatattctcgaaacaattaagttgccatatcacttcttaacctattgtaacaaatttgcacccatcttgcaagttgttacactcatatgctcacttataaatttcctacactaaattgcacccaattaccaagttattatattaggatgctcatttcccaagttgttatattaggagacttccttctattctcgaggaagttgagaatgatgttttatatctgctaattgatggctcaggagatgtgtcttacaaggagctaatggctgttgtcttgtgatatattgttaaatttttagaaaatggatctaaatctggtctctacatccaaactagatacacaaccaacataatacaagattacatgccttgcaaaaggacttctcaaaccaagaagattaaaatagaacttagactcaacctgctaacaagaaaaacaatacaaccacttaatcgacaagcaacataaagggacaactagccaaagtgagatagcttccatcttttcttcatattccagccaacctttgagagaacttccaacgttgtagcttccaacaagatgcagccttcgttcaccttatttctaccgtcctctttaagcaacaaagaccactgttatacagtacactcctttgatgattatttgaaaaaggagttagttttggagccattagaggctgcattattcctaaaaacatactgctaacataaagatgccaactaccaaaatgattagcaacactagtacatggtttaatcccaaaggttataaacatgacattccacataaatattgcaatttggcaatcaaataagagaagttgtattgtttcattagaactataagaacaatacgtagtactaccctcccatctccatttcacctaataatcattggtcaaaatgaccccattttagataccataggaaaggaattctaagttttcaaataaaagatttcctttgtagtacatccccttacatatgagagctctatacttcgcgttgatagaaaagactccatttttgtgttctttccaaataaaagcatgatcttgttatgatagtgtaatacatgtcacttctgacattaggttgtaccaatctattatctaataccaaatccctcctaaaggagacaactaaaggcacccatcttaaaacatccaccactttagcatttttaatactagttatataatataatgagagataaagcttgtcaaaagaataattttccatccaacaatcctccccaaatctcaaatgttggccttgtcaaatgtggaaatgttaaaaatatattagttggtttttttcatgtgaaagacaatttatgttcctcttcccttcaaaagaaactatctatgcacctcaagtctactattgacattttatttgcggagcataagttaagtctggggcaagtgagaatggtgcaaacaatatgagaggtgagttcaatggttttctctcaccaattatgagagaaaatacattggcatattatgtttcatttgccttgctcagcttcttgaattaatagttttggccattattgtaaagaagcatgtaaaaaggaattgaggaattctttgatatgatttacatatgttctattaaatgtgattggtggatcttccaagtgaagggatacggtttgattcatcaacatgtggcacataagcaatagaatacaacaatttataatagagtttgcaaaatttcataggtgtcgtgtgataccatgaaacatccttggatccgtccttattctgctaccaatagagttaggatggggaaacattaaggattaactacaagacatgacacttgagaggttatacttttatggtctaaaatttggtacatctcaatacgttagtacaaggaagtacaaaatttaacccgacaacatttttaagggtcatgtcaggaactcttgctattcactaaaggagggtgagagcatcccatccctggtcggtcatacagctcaatggcttgccttgccaactgagcatgcgctcgtccgcttttaccctacaacttaaggagcttaactgaataagcaaatccagaaggatattattaagaaatcttatctttgtgctagtttagaaatccttttgatttgctattcggatatcatatcttatctttgtgcttaataaacacttcctccttcgtcatccaaatgtggctataaaagaagccgttgtgttgatttctctttctcacacacaccatcactgatatcatcaaatacaccaagaaaaagagctagctaagtatgttgtcaatcccattactaggtttgtgctggaaacgatgctggatggtgagaaggtcatccttgagcagaagatcgccgccgccacggcgaggatgaatgagctgcgacgcaccaaccgtgagatggaggtaaagctcgtcatctatgacgccattgccggcagccgcaagaaccttgatgacttgtctccgaacttcatcgacgacctccagaaggaggttgcaaagcgccgcgaggaggtacagaagcgcatgcaggaacttttttccatggattcctccaaacccacctgaagggattggtgcatgtgtaattacatggtgctttgagtggatgcaccctgcttgcatgtttgcacatgtatcatttgcttttggcttaatttgctttgaaattaattctcatcagcagtcctagttggagtcaagtcacaccatcaccaccatatctgttttcttttaaagttgcaaaggcatgtgtttagaaagctcggcttttatggatcatttgctagtaacccgtaaatagtatgggctattattattaatattataaatgctaatttttttatatatcttgacatgttagtatcactactgtaagtcacgccccaaacccccaccaatcactatgggtaggcgattggttgtcttgatcgagattctgatctgggtaattcgatcttttgaaaatgacaaccaaacttggtacaaacaatttaacaaccaacatatacattttattttcaatcttcggccctagcaaagtgaccaagctagatgtgagcgtagaactaggagcgcatgggatggggatggccggaagggagtagatcctgggcgggcagtagcaatgggccagccatatagagagctaggagacccactattttgtggataactaagggcagatgaaatccagagagctgtgctcctagtgatggaatctgagccaggatgagaagggagattgaatctgagccaggacgagagggagatagaatctgacgagggaggagaggggtcttctatatggcaaaaagggtgggctggatgaaggaccagtagactagcaacggttttggtgaatgagagatcgaaggtaacggttgactggataaggataatgttcacatatcgggtagttcgggtacctaatacagtagaccaaaagacctaacaatgaactgatgacaacatcttggtcttggtttcttttgcccacctatacccaatgctcccacgcgtgccctcatctctcataaccaaatgtggcaattttcggtctcagtttattttgtccacccattctcagtgttctaatgtgcctagttctcttacacaaaatatggtaaatttccatgtgccacccagtcagcctgtttataagatatctaccaacataaccaaccatatccttacatccacgttatccactcatgtttcttcagatctagaggtcgaataggggaaacagcagtggcgatgggatatgttctccagaacaaatcaggatgccatgccaccggcccaaacccgcccacccagtgctagggggtggctattcagtctagaccaagatttcggtccaggtaatctcgtctttttaaaatgacaaccgagccttgcacaagatatttagcaagcgacaaactaggtaaacgatatttcattctcggtctttggtcacaatgaagtgaccacgttggatggcgagcatggcacctagagcgcatgggatggggatggctggataggagaggtgctaggtggggagttctctatgggacactcttaggttgtgttcttcgcccttctttctcaaatcatctctctcgttttccatgcacacgcttttaaaattgctaaacagtgtgttttttttcaaaaaagtttatataggaaagtttatttaaaaaaaatcatattaatctatttttcattattttaggttaatacttaattaatctcactctaatcgtttgctttgttttccgtatcaggaggcgaacacagccgactgagttcttttccaagctttcccagctcatctcactcttttttcgcgcgcacgttttttaaactactaaatggtgtattttttttaaaaaaatattagaatgtttctttaaaaatcatattaatccatttttttaaaaaaaatagctactccctccgtcctagaatataagaagttttagggttggatacggttattaagaaagtaggtagaagtgagtggtggagggttgtgattggatgaatagtggaggtaggtgggaaaagtgaatggtggagggttgtgattggttggaaagagaatttggtggagaagttattatattttaggacaaatcctaatggctaaaatttgttactccttccattccaaattaatctacatatagtttttttaggttattcttaaatgatctacatatttgtgttcattcattaagtctattcgttatttgtgcattggagtaaatggacattgatgcatacatccatgcacacaagtatttataacccacatgcaatattttgatttgctattggctaggaaatagtggggatggtgcatgcatcaattctgttgctagagtaaatataatataagagagttattagattttcttggtcttgttgtacctatataaaatatgtagatcaatttggaatagagggagtatattttgggacagagagagtaatactgaattaatcatatgctattcgaccgctccgttttacgtgcgtatgagatttgttcccaactaccaggaacgaacaagcttcacatgaattttttatacgatctacaatcttgataatacaattggctataatcagctgccgcattgtgttggttagcttgagagcatccatagaatatcaaagttgtgttaataggagatttgctccggtccaacaaaaaaatatcttgagctaccggtaactcacgataccaaatcgttggatctaacaacgtccatcctgcccagctaaatcctcgatcggaaacaatttagtaccgtgaggtaccggtacctcgaaatatttttttgctggaccagagcaaatctcaaaatagttactccctccgtttctaaatatttgacgccgttaacttttttttatatgtttgacagttcattttattcaaaaaaattcaagtaattattaattttttttcatatcatttgattaattgttaaatatacttataggtatacatatagttttacatatttcataaaagtttttaaataagacgaacagtcaaacatatgttaaaaagtcaacggtgtcaaatatttagaaacggatggagtaataaagttgggggctactataccacatcatcccatccgaacgtgatgatacctggtatcacaatctttagtttggaataacaatggcaaaatcacaaagctgaaaaatgcaagggtagcaaaatcacaatactaatggggacaaaaacgtaatttgtcccatcatctgttttcaaaacattggtccaaaccaatgtgcatatcattaggtaccccacttcgtaaatcgatcttgtactcgtactacgaatgaagtacaagcacagtacttcttgcagtagtttcttgccggtctccttccccgacatggcattgggattttctcgtgaaacgggacggacgagagttaattaactactccagttgcccttgaccgtagcactacatagatacgactcgtagctagtaagatatactcctatatcagtaaaaatcgaatcattttaattaactactagtaagttgaccagatcatcatctatttcgagttttgttttcacgtgacctgataataacaatgtgggtacaagctgatcaagtcgtctgtcaggacgatctgttattaatgatgttcagaaggagatcgatctggttccttgtgccactttggggagtgatcaccgaaatctcatatcgttaattatgacattttcccatgtattattatccaattccttaagaatagatctcgtccaactgttcacaatcaattttgttgagaaaaaacttagtttgatgtactaaattcgatcatatatacttatatatattctcgaaatatgttccctcagtattatgattttcgttgagttttgcagatatatcaaaatagttattcttgaaagaagatgcctgatatgaccaaaaagaaaattgcagggagtacgttgacatagattagttagttagtttttcttaagcacgaatggattcttttcgattgtgggatttgactgattcaacagcaaagctagcaaaatattagtggcatatcctaatgtctttctcgatatgcatgagaaacgacggctcaagctattgtattaggaaccaattgtaaattataatactcctacggtttttaatacatgatgacgatattgatttttttatgtttaactattcatcttactaaaaatatgtgtaattagcatttgttttttctctgctactctcaataacatttatttaattaacatttattttatcattagatatacttatgcatgatttatatttttaaattttaaaaaataataagatgatatcttaaaaattaatggcgttataaattaaaatcagaggatgtagtaattttttacctgattggtacgaagttgtcggatcctctctagattggaggggcgatctacgatccgtggacaagcagttcagaagattgaaagttcgtctattttaataccataaaaatgtacgagggaggtgaactaaattgagtctcatgggcaagtatatattgtacaaaagattacaagacttgtgtttaaggaatcttagagaagtaagatgaaaactatatctatatattaccataacaacttgaatcctccctgtaatccttcctattcctatccctatactacctatactcttaacaatgattatatgattccctcccttccatttgtagtgctggggtcttttaaaaattaacctccatcaacctcttcattgttttttttcatagaagaaccttcttctctaataatgaaagctgtccatttgtgtcaacgctcatggctttgttaaatgttaataaactttggtcgactgtacttcagctgtcccggccatgcatcagagctcatgaccaaacagccatgccgcaaatgcagatctcccattacagacgacgggttccaatggcgctcactaccaaataaaatcgattccccacattattatctttatctatatactgcaaatgccttccttttctagtgtgatttgcttccactcgtggtattcaaaagcctagttttgatgctagacttctcccaggtatggagtcaacggtattgagaaacccgaacgattaatagtgtttttcggtagtagaccaatttttttttacgttgatggttatatcctgagaggctgccggacctgcccggagatggctctggcactgccttctccatccaagaactaaaatcgtcagtttttttttttgccaataatatattatggtcatgcattgtaacaaaaacatcatatatttgattttttcccccaaaaaatctcagttgtcacgtgtttaggctagtggatcaaaatccaaccatcgctggtcctttttcttctactccaattgaagagcaaattaaggcctggcaaccgagctgtcatcctccccttctagcgatgacggtggtgacaagcccgtcaagttaggatgttcacgctgttggaattgtgtgtgaacaaaagaccccatgtgaagaataattcttagaaaattctcaaaagacccacaatatga

SEQ ID NO: 1719 - DNA, 8007 bp, Oryza sativa
tctatccaacaaaatccatcaaccccttctctctcaaaaacgaaaaaaaaaaatcaaattccttccccctttcaaattcgaaatttcgaatcaaacacgcgcacgctcctctctcctctcccctctcgatcgaggcacgcttctccgcggcggcggcgcgcgaccggatcacggcggcgggggaggggaggggaggggaggatgcagcagaagcccgcggcggaggccatggaggaggagttgaagggggaggccgtggggccccgccgccccgggctagggttatggttggcggcgcggcggcggctggcccccgacgaccccttcttcgccgccggggacatggagcgcgagctcctcgccaagcaagtgcgttctcttcccctttcacctcccttccttctgctcgcttaatttgggcgctttagcttcttcgattttacggggattttttttgttagctgtattgagctggaacccgtggaaaagatgaaatagagatagtaaaatcagccatgataacctttgattttgcagaaattcagctgtactgtacataagaggaaaagcttttgcccttctttgaaaaaaaaaagagagaagaaattcagctgcacttagcatcagttaggtgggaattccttaatgctctgcaatacttgtttctttgatttcttgaacggatcatggccgattagctcagataccctgccctgatgtgaaaagtgtagatgaactgtgcttttactcaacaagtcccctatactccactgtttttttaggtgtctgatgttttcttgtttaggttgctctggatctctccgaagatgaacggtaccagcttgagaggatggaagtggcgagtgccaagtaagagattgatctttacttatgcttactctttggattgatgattatttatcctttccgtttcacgccgaattaggggggggggggggttagtccctgtcacatcagatgtttggacactaatttgaagtattaaacgtagactattgacaaaacccactccataaccttggactaattcgcgagacgaatctattgagccaaattaatccatgattagcctatgtgatgctacagtcaacatgtgctaattatggattaattaggcttaaaaaaaatttcacgtgaattagctctcatttatgtaattagttttgtaagtagtctatgtttaatactctaagggcccctttgaatcgtagaaatgaaaaaacggaggaataggaaaaacataggattcgacaggaatataagtgtaaaacagaggattgcaaaacacagggaaaacacatgaatgatcgtttgattggaccagaggaaaaacacaagaatcggatgagagagatagactcaaaggattttttccaagaggttggacctcttgctaagtttcctccaaaacctatatgccataagccattccataggaattttgtaggatttggaaaacttcaatcctttcaatcaaagagctatataggaaaatttcctacaggatttcaattctatgaaattccttcataatttcatttgattcaaaggggcccttaattagtgtctaaacatccgatgtgccagggactacagtttagtccctagatccaaacaccccctaacataccctctctacagatttaaaacagcatgttaatgtactgtttttctgcatccccataacaccataaatttcttcgctgtagctaaggaagtccctgaaccagtggtccacaccccacagtgactaaagtctgagaaaatgacaactggatgtcttgaactaaattattgtacgagttctctagaacctataattcaaaatgattggcgagtattccatcctgacacctgctaaatcatgtcaccttttgcagttgtatgttctctgtgttgtgttagtactgcaagttttggtctcattctgtttatttgatcatatatactactgcaagtttatgtcaccttttgcagttgtatgttctttgtgttgtgttagtactgcaagttttggtctcattctgtttatttgatcatatatactactgcaagttttggtcttatctgttcgatttatttgatcatatgtcttaagctcttgcagtgcccttttatgcccaatttctggctgtggtgctcatctagattgcctggagaactttgaggaccactatcgcacccgtcatactgcttcatgctctgtatgttggagagtgtatccaacttcaaggctgctgagtattcatatttctgaggcacatgattccttttttcaagcaaaagttgcccgtggttttccaatggtaataaattcataatctatccatgcccccagttctttaattggtttaattttgtggcatcatgcacactagccaattttatgcaaacccagaacttccagtggactgtgcctgctggccagtttaaaattactactcaatgtcttagcattagttagcattacatggttttctggtcccgctaatgaagctttccaatttccacatgtcacctttactggcatctgattcttgtataaatttacatagtagtaagtgatacttttatattccctcaactttctatagcaattcacattgtgtatgctatttttgaaacagtatgagtgtttggtggagggttgtggggtgaagttgaagagctacaaaagtcggcagcagcatcttcttgataagcaccagtttcccaagtcatttgaattcttcaaaaaagcacgcccttcgcaacgccagcggaacaagaaccagaagcaacggcaaacagttcacaagggagacgagacaagcgaaacactaatggatgttgatgggaagaagagctcaaggtacatgaattccagatatcggccaaagcaacatgatggaaaagagtcaaaagaaaatgagcatagtagctgtaaggaggccaagaacaacgaaatggaggttgacaagcaggttgatgagcttgcttcggccgtatcaagactgagcacagcggattcaactccttctagcataagctttggtcatcgtcgctctcgcggtcttgcttttgtccctaggtcgattcggcaaaacaagcaggtttctcagacagaaccaaaatgacagcatttgataccatctttctcttcattgctgatctcggatgcatcaacaatcctgaatgtgctgtttcctgtacctggacattcaccgaatccactaatatacattcttgtagttgtatcacgagatatgtcttctagctggttatccttgcttatggatgtactgagcttcctgttactgccatgtagtagaacaatttttctgaagcggcaaatatgaagtgcaaaatacaagacagttcttgtggttgatcgatttaccagcttgttctttctttcctgcaggtgaaagttaatgacactgaatgaaggatcctgttagggttagctacttagcttgctcttctcttcgatggatagaacataccaactccttcgtcaactgcagtgtagttttgctcggtccttttcacacctctggatatctgaagtagatgtaatctgaatttctgattgatacccggcatgtaatcgacatggccagtttgtgagtttagtttgcttcgtaattctgataaaaattaactatctgaagctatgataaaaatcaactgtatacggactagtgtatggaattcaaattcgaaagatatctccatgggtacaaatcatccaggatttccactaacattcctcgtaaagttgtctccatttgggtccaataggaacaatttgggctggctggcctagatattgtacacttgctagcccaacaaatatggataggcatgtacttatacaaagtaggaataagtccactattcatcccatatctttttgccgagtttaatttgcatcactaaactgcaaaccggtgcaaaagagattataagacagtacggagggcgatgctaatgggcgcccccatccccctatacgtcctctcccccttctccccttcttctcttcctactacaccataaattttaaaataataaaaaaacaaagttagaaaattttatgtataaaaatactatatataaaaaatatttgaattcaaatttaaatttgaatcggatatataaactttttacttataaactttgggtctataaactttaggtgtatagaaatactatatataaaaaaaattgaattcaaattcgaattaatatttgaatttaaattcaaatttgaatcgggtatataaacgtttgacttataaactttgggtctataaactttagatgtatagaaatactatatataaaaaatatttgaattcaaatttaaatttgaatcggatatataaacttttgacttataaactttgggtctgtaatctttaagtgtataaactttagaggtgtaaactttaggtgtataaattttaggtgcataaattttctaaaataggaaagtaatgcggtgccaaaaaaggaaagtggagggaggggggattgatcgcccggagcgattgatcgctcgttaggattctcgcaatatggaggctggttttggctgacataaatagtgaattaaacagcgctggtgtctcctgtagcctatgtggctgcatgctgttcctcccaatgctctacttcccgcggcaccttttgacacggcagatggtggaggccacgctggaggagcttgtcatctactatcccttctccgccatgtgcctgccgctctggctggtgttgccaagcgcctcgctgcgggggctcgtgccgagggtggacttcgacatgtcctcggtggcgtctagcgggtggatccgggtacctagactagatcggcgtcgtgccaaaccttgaggatatgaggctgtggggcttcagtactagggctgaatatgggccggtacggttggatcatgacattcccatatcctagacaatattttcctttaaattcggaaccggatataggtagtgccgaataacatatcattcatcctgtatcatttcccatattatttccttatgaatcggattcaggaatggatacctatttgttctctaattcatatctattaaatataagaaggtgattaaaatgctaaaagatatatacgaaggcaaaattatacaatattacatgtgagctcgtaaaatagtgattaaccaatcttttaccatgtttatatatggatctataatagattttcatatatattttataatatgggacatacgggtggatacaagttttcttgtatcctaacccttgccttttttacggatttagattcgaactatccaagtttttcccgcaagcctcaggttggatgagcgagcgattgggaaatatcgccccattttcacccctaggcctcacgatggcacgcgccctagcggggagggggggcagttggctttagcgggctagagttggcacggtgctacgggatgtctggagagaatagagggaagagaggcgggagagaaaagaggggaggagtgaaatgtggggcccactttttttccctcatgaacgtctagtcagtacgagtggatcggatcagcataacacgttagcgaaaccagctatctatgttgctggaggacctaatctaactcagaaaagttagggaatagacagtgaacttatttcatatgaagagtagacgggctttgtgggctcggcccgttggatccaacggcaagcgccgcgtgcaggagggggccgccgcagctgcagccggccacggacgcgacgtgtgcggatctgcacgcgcgcggcggccgacctgacgcgctctctttaacgtggccggccgccccgtttctccgtgctttgtgcctaccaacatcatgctgtgacatgtgagctatacatgtatgatcatgtgacaacgtggccggcaggcatgatgatggattgcagggttgcagcacactcggaggaggtaccatctatatcaaaatgtagcatcgtacaattagattagacacattctaataaaacgaatctgagaatgtggacctgtctaatttaatcttaggttgtatattttaggatagcgaaaatataccattcgctaaaaaatttgatttttctatgacggagaaagcagtagtgtaagcagagcgcccgtaaacatatcctcacttttggttcatctcatatttttgtaagatggaggaaacatgagtgaaattagagcaccctgtaaacatatcctcattttggttcgtctatcagtcacgtaactttgttatttctgtcggttacctagtactaatacctaagatgataatccactgtaatgggaagatgagcacggttttatatctgaaactgaaaatgggtctgttggtcataaaacttactacctccgtttcgaaatatatcaaactagcttgtattagattagacacgatctattattcaatttggacagagtccatatagctatgatatgcttactatttcatattgctttcatgaacttaacttaaagttttggaccacaatgaaagtttcagttcatatcatatggcatactacttctattcttttttttttgttaaaaaaaaactggagctctcaatttttttaaagtttgtcctgttacaattttaatcagttctttattattcctctccacatcaacaatttttcctcgatgatccggttcccttttgacctcactgcactgtcccagatctctcattaatccaacccagaaaaaaaaaacagtacaaaataaaatacacaagattcaacaaagcaacctgacctggtcggtgctgtaccacgtggcatctcccctccatgtcccaatcacttcgagagacaaaagaaacactcctccagtggcatcctgccatgtgtcctccattcttgtacttaatctcttcttatttaaggcctcataatctcttgctttcccttccctagtaaatcaaagaacacaaagcatccaaaacaacaccaggaaacttcttttcaatcgatcactccactggtgagtagtgagtggctagtgactggtcagttcatcacttgtgaaggttttgcaatcaggaaaagttcagaagatcatgggcaagctctggacaatcctcactcacgttcattcccttgcagggtacatatggtttctattcttgtaatgttaatatgcacttagctgcagttaaatttaagcttaaacagttaaaactgattcctgtgaattttctttctgctgccctttgtggttggttggttgcaggcctaccgtcatgctcctgtaccccttgtaagttcagagattttctctctattagcttttcttcttcttctttttataagttcatgtgattgaatgtttaattttgagatgattttggttggtgcaggtatgcgtcggtgcaggccatggagagcccatcgaagcttgacgacgagcagtggctggcctactggatcctctactccttcatcaccctcgtggagatgcttctcgagtccctcatctactggttgaattcgattaacccatctcatcttgatcttgatcgagcagatatggattaatttcagaaagaactcattcataaaagtactatgattttgttcgatcaggataccgatctggtacgagctgaagctgctgttcatcgcgtggctggcgctgcccaacttcaggggagccgcgttcatctacaacaggttcgtcagggagcagctcaggaagcatggcctcgccggcgccggcgccggcgccgccgccagcgtcggcaagaaggacaagtcgtcgccgtcgtcgtcacccaaggacaaggagaagaccaagagcaagttcctctccttcgtcactcccaagaaggtgagttcttaaacctcgagcagcatcagtctcttttttttttcttgattaatcttggctgaaatttgatccatgttctttgtgtgttcgttatgtcaggatcatg

SEQ ID NO: 1720 - DNA, 9949 bp, Oryza sativa
atcccgtcagaagtgtgaggatctggcgtagtgtattaattaggctcaatagattcgtctcgcgaattaatccagggttatggaatatgttttgtcattagtccgcgtttaatacttgtcattagtatcacaacatttgatgtgacggggactaaaatttaaatccctggatccaaacaggtagtattgggcctagagtggttcatgacgaaaaaaaatggaaggatggcccttacatattgctactagctccgtccagaaaacatatgtacataaacagttcaaatgaagtagcccgagcctggagataaagcatattttaaggtctgttcggtaaaactctaactcttaaatttagatttaggagttgggtttggaatggagttgtggggcagactaaactcaactctatccctctagtttattttgtgagaacgctccacacagatccgctcctattttaggtggagctgaaactgtttggctagtctccaactctaggagaggtagagctggagtttagacggagatattagtactataaggacgtataagttgtagtttagttcttggagaaattcacatctattcaaggtattttatttcatggaatagaggaatttcagtgactatgaattaatttttgtgaaattttccaaagagaatcaccgatctatttacccaattatatggcttttataaacagaagaaatacgatgtactggcacaaaggataacccttttttagtggaaggataaccggaattttgggtaagatttttatactactgctctggatggtgtgcaagtatatatattggcacgtgacagtgatagggcgccctcagtttcaaattacggcatgtactttactctaacatctaaaatttgtgacaaaaaacttgtagtactactacataatggctaatcggtgccggttttcctaaccgccaccacggaggtagcactgatgacatgtttaaggatagctagtgtattttactctaatataaaacaaagataaaacaaagagaataataatttatcgtttactattacaaaccgtgcggaaaaaaaatgaggatgcacattggaataaatacaataaggaccattctacccctaagataaaattgatatttttttggcacaaacccatggcacattaaatatttctactttttatcaatgcgaaaaaattatcaaatcatgccatgagtacacatttaatttcttccatagtggtaaaattaatggcatagatggaagaaaacattaattcaaagttagcatggcatttgagaaatctaaacataaaaagaattatccctaaaacaactcataattgttttgtaacacatagtaatacaaattgacaagcaaaattgaatcggggtgagaaataatgaatatttactttctaagcttcaatcttcaaaaaaaaaaaggagcaaaactgccccctcctcgagctgatcgggcaagaacgagaggcgccgctctattcttgctcgatcagatcaagtgggatggttgcttatatgtgctcggctaataggtgccggttgtggacaaaacaaagacataggtaccggttttttgtgtgggctccatcaactcctagttatatgaaaggtgccggttttgaatgagaaccagcacatatttttttccacaaagatgccggttctagggttggctccgcgccaactactccgttgggataggtatataatctcttacaggggtaattaaaaggtgtcggtttttaaacaaatgataaaggtgctggttcttgcggtttgggcaggctaacggcgcgtgggcaggaaaggcactataggtgccagttttaccacttccggcacatatagtgccgacttatattagctactatgtagtagtgagtcagtggcgcaggattttgagactaggtatttacttggaatttgctaagtatattgtcctttatgtttggtgaaataggatttaatgctctaatcctattccaccaagtcatattaatctattttttaagtttttatatctagtacttaattaatcatttgttaatctatcactttgttttgcatatgaaggtgaggagttcccaacccctctaaaacaacacagtctaaaacgggtagagtttcacaatgagctgcagtttatgttgtgtatcctctaatctacttcggatgatgaaaaataatctagtacgatgaatttgataggtgtagattatgagagataatctagtacgatgaatttgatagacatagattatattttatcacattttagagagtgttattatgggacgaatgaaagaagatgtactactacacacgcgtacttacgtttcactccgacgagacggggggcaggagccaaagggttggatttcagggggagattcgtcccctgaaaatgggggcgtgtcacgcactgtgtcagcaacggcatcatgggaccatggaaaccacatccatcgaccgatgcagcagcgcgctgccatccatatgatccacgacgcagctgcctgttttctggttccatatgcattccgtgcgggctgtgtatctcatggaaggacggcacgatcgatctagggcaggtcgacgcagacgtcggcagtagaagagcctctggcagtctgcctctgcctctggccggcgaagtgacacatcgcgtcagttcaatcgtcgtctccgccccctgctcagcgcagcagcagcagctttctcgatgggtcgcagctctctctctctctctctgcctgcaatggatgactaccgagggatgcagtactccttttgtttgtcactcgtgcggtgtgcacaaaataaatttcttggccagctgccgcagtagagcaagttttactgtgaacaagttactgccgcaggtggtgtttggttcaatgactaaatcctatcaaatcggatgtttaaacattaattagaactattaaatgtaaattaataataaaactaattgtataaatgagagttaatttattagacaattttttttaaacctaattaatccataattagtatatgtttactatagcatcacataggctaatcatggaccgctcgtgatgctactgttggaattaatagatgggctaaggcccattcgaagattaattctttggaaaatcacaaaagcccaactcatgggatggcatgcatgtggagtttagtaccaccttacttattctaggagagggagacctccttaaaagggaggatgtcctcctagccacttgaagcatgtggggtggagagaagagggggaacacatgcttgcgcagatgcagtctccttttgcagttttgttttgctgcaggaaaattcggatttgttttgttgttggaaacattccgaaaaatccggtgcgtgaaaacggcgtggagtccggataagttacgcacgacttatccggatcggttacgcagagtgatgatcgtgcgagcgccctgatcaagcgacctatctctatataaaccgtgcctccgccttcacgcaacacacgcgaaatcaatctagggtttgcctcctcctctgtgttgcgctgtcgctcgtggactactccatcccgctcgccagcgtgcaccggcgatcggaagagcaggtctccggaacctctgccttcgacgtcctgcactgggagaaggcggcaataaggtttttgggaagcgcttcgcgcgactgctccctgttcgtccgcgacggctcgccttcctctccactcgcgtgctgcgcgccttcgtcgacgctcgcaaccgcgagtagttcttgctgagcaaccggtctttccgccacctcggtacttgttcgacatgttgcgcatatttgatctggtcatgttttactgtttagtttacatgtgtagatctaataatgcgttaatactagtatacatctgtaatgtcatgatttatttatggaatatattaaatcattatatgcctatattctcaacaatccaaaaaccttattataggcgctgtgattttactatggctggttttgccgatacactgaggccagataaattcaccggtgtgcactttaagagatggcagatcagggtcactctgtggctgacagctatgaaatgcttctgggtgagtactcgcaaacctgaaggaattcttactgctcctcagcagaagcaattcgaggaagccactactctctttgtgggatgcattcttagcgttcttggcgatcgtctggtcgaggtgtatatgcatatgaccgatgctaaggagttgtgggatgcactgaatactaaattcggtgctactgacgctagcaatgatctgtatatcatggagcagtttcatgactacaagatggctgaaaccgttctgtagtcgaacaggctcatgagatataaaccatggctaagaaactcgaactccttaagtgtgtcttacccgacaaatttgtggccgggtgcattattgcgaaactacctccatcatggagaagtttcggtactgcactcaaacacaagagataggaatactccgttgaggggttgatagcgtctctttatgttgaggagaaagctcgggaaaaagacgccgcgtctaagggcgatggtgggcagtccagtgccaatgttgtgcacaaggcctataacaagagcaagggaaaatacaaagctcaacagaccaccaacttcaagaaacagaagaagaacaacaacaatcctaatcaggatgagaggacttgctttgtgtgtgggcaacctggtcatctggctaagaagtgtccacagcgcaaggggatgaaggcacctgcagggcagacttctaagtctgctaatgtgaccattagcaacactggagatggaagcgggtatggtaatttacctactgttttttcagttaatcagtctactaattggtgggttgatactggggccaatgtacatgtttgtgctgacatctcattgttttcttcttatcaggtcgcatggggttccaccgtcctaatggggaatgggtcacatgcttctgttcatggtgttggcacggtagatctgaagtttactttgggaaagatcatgtaggtgaagaacgtgcagcatgtcccttctatcgacaggaatcttgttagtggctcctgtctgactagagacggatttaagttggtttttgagtctaataaagtagtcgtgtctaaacatggatattttattggtaaagattatgagtgcggaggcctgttccgcttttccctttctgatttctgcaataagcctgtgaaccatatttgtggcagtgtggatgatgaggctaatgtttggcactcacgtttatgtcatattaattttggcttgatgtctcggctttccagcatgcgtttaattcctaagttttccattgtcaaatgttctaagtgccatagttgtgtgcaaccgaagcaacctcgcaagcctcacaaggctgccgaggagagaaacttggcacaactagaactcctacattcagatctttgtgaaatgaatggggtattgacgaagggtggaaaacgatatttcatgacgttgattgatgatgctactagattttgctatgtgtacttgttgaaaacgaaagacgaggctctagactattttaaaatttataaggcagaagatgaaaatcaacttgacagaaagataaaaagacttaggtctgatcgtggtggagagttcttctcaaacgagtttgacttattctgtgaggaacatggcatcatacatgagaggacgcctccctattctcccgaatctaatgggattgctgaaaagaagaaccgcacactgactgacttggtgaatgccatgttggacaccgcgggactacctaaggcatggtggggggaggcattgttgatctcgaatcatgtgttaaacagagttcctaacagaaataaggacaaaacaccatatgagatatggattgggagaaaaccatcactttcttatttgcgcacatgggggtgcttggcgaaagtcaatgtaccaataacgaagaagcgtaaacttggacctaagactgtggaccgtgtctttctgggatatgctcatcacagcattgcctatagatttttaatagttaaatccgaggtacctgacatgcatattggtacaattatggagtctcgtgatgctacctactttgaaagctttttcccaatgaaggatacatatagtggttcgagccaaccctctgaaataattcccagttcaatcacaccaccagaacaaactgaacatttatatgaacatgtcactaaggaggatgtcagtgaagctcctcgaaggagtaagagacaaaggacggctaagtcctttggtgatgattttactgtgtacctcgtggatgacactcctaagtcaatttcagaagcatatgcatctcctgatgcagactactggaaggaggttgtccgtagtgaaatggattccattatcgctaacaggacttgggaggtgacagagcgaccctatgggtgtaaacctgtggagtgcaagtgggtgttcaagaagaagtttaggcctgacggtactattgaaaagtacaaggctcagcttgttgctaagggatatactcagaaagaaggcgaagatttctttgacacttactcacctattgctagattgaccacaattcgtgtgctactttccctagcagcctcaaatggtcttctcgttcatcaaatggacgttaagacaacgtttcttaatagagagttggatgaggagatctatatggatcaacctgatgggtttgtagttgaaggtcaagaaggcaaagtgtgcaaattgttgaagtctttgtatggtctgaaacaagcttctaagcaatggcatgagaaatttgacaaaacattgacatctgcaggctttgcagtaaatgaggcagataaatgtgtgcactatcgccatggtgggggtgagggagttattctgtgcttgtatgttgatgacatactgatatttgggacaaaccttgaggtgataaatgaggttaaatcattcttgtctcaaaattttgatatgaaggatttgggagtagctgatgttatcttaaacattaagctaattaaaggtgagaatgggattacacttttgcagtcccattatatggagaagatcttgaatagctttggctacattgatagtaaggcttctccaacaccttatgatactagcttgttgcttcgcaagaacaagagaattgctaggaataaactggaatactcccaaatcattggctcgctgatttacctggctagtgcaactaggcctgatatctcctttgctgtcagcatggtgagccggtttacctctaatccgggagatgatcactggcgtgcgcttgagcgagtaatgcgctatctgaaaggtactatggaattagggcttcactattctgggtatcctgcggtactggagggatatagtgattctaactggatctctgatgtggatgagatcaaagccactagtggatatgtcttcacactgggtggtggtgctgtttcgtggaggtcttgcaaacagactattttgacgaggtcaaccatggaagcagaactgacggcactggatactgctactattgaggcagaatggctgcgtgatctattaatggatctacctattgttgaaaaaccggtgccggctatccttatgaactgtgacaatcaaacggtaattgtcaaagtggatagttctaaggataatatgaaatcgtctagacatgtgaaaaaacgattgaagtctgtcaggaaattgagaaactccggagttataacgttggattacatccaaacagctagaaacctggcagatcccttcacgaagggactatcacgaaatgtgatagataatgcatcgaaggagatgggtttgagtcccatgtgagttatactacggtggtaacccagtctatatgatcggagatcccgtgaattagaacctgggaagaacaaaccattagtaaactagaggagagtaccaatctataccctctctaagtgaagatgcatgtactctcgtgagctgcaaggcaggttggctatgccttaatgagttctgttggttttaattagcaaagatgctgtcctgcagagcattcttgaaagaactcacctttgtaagcttgactgttggtcacaatctatgaagattttgggtgaatcttctaggaagcttactaaagacctaggagtatgacttatacgctccacccgaggggtagtgtacagacggtctagtaccagataagactctgagtgaaacttgttggcacaagacttgcaattcaaggcgtagtccattgttcaagttgtgagtaagtgtagcttggagttctaggtggatgttcaaccttaatcggtctccatcgaaccgctggtatataaacagtacattgaaaaaggcaaatcacagtgggaattttgagatttggtgggggattgttggaattaatagatgggctaaggcccattcgaagattaattctttggaaaatcacaaaagcccaccccataggatggcatgcatgtggagtttagtaccaccttgcttattttaggagagggggacctccttaaaagggagtatgccctcctagctacttgaagcatgtgtggtggagagaagagggggaacactcgctcgcctcgcctggcagggcagggcaggcggcgcgcgtgcacgacatacgcgtcgaatggtccgaaaaattagctcctcacccttgcacagatgcagcctctttttgcagttttgttttgctgcaagaaaattcggatttgttttgttgttggaaacattccaaaaaatccggtgcgtgaaaacggcgtggagtccggataagttacgcgcgacttatccggctcggttacgcagagtggagatcgtgcaggcgccctgatcacggtgtggagtccggataagttacgcgcgacttatctggctcggttacgcagagtggagatcgtgcgggcgccctgatcaagcgacttatctctataaaaaccgtgccgccgccttcacgcaacacacgtgaaatcaatctagggtttgcctcctcctctgtgttgcgccgtcgctcgtggactactccatcccgctcgccagcgtgcaccggcgatcgggagagcaggtctccggaatctctgccttcgacgtcctacagcgggagaaggcggcaataaggtttttgggaagcgcttcgcgcgactgctccctattcgtccgcgacggttcgccttccactccgctcgcatgctgcgcgccttcgtcgacgctcacaaccgcggtagttcctgccgagcaaccagcctttccgccacctcggtacgtgttcgacatgttacgcatatttgatctgttcatgttttactgcttagtttgtgtagatctaatgatgcgttaatactagtatacatctgtaatgtcatgatttatttatggaatatattaaatcattatatgcctatattctcaacagctatgacaacgagccgcgactccgacgatgatagcctcggtgggatccccatccgtactcctccttcgtgatgctgacacccacatcatgtggtcttatgcaccacacacaacgtctgctcctgcatcaccgacgcattccatggacgaatttcgaactcgacgtcaagatgggggaaggattgatttgttttgaagccaaaacttgccataccaaaatattgacattttgagcagtatttttggcaatgtttggtttaataccaatactcgccaaaaccacatgaatattaccaaaatattagcattggcaaaaacttgcccataatttagcatttccaatttttttttggcatggttgcaaaccaaataagccattcttttttttgtgcacgcgggggggggggggggggggggg

SEQ ID NO: 1721 - DNA, 709 bp, Oryza sativa
  unsure (1)..(709): unsure at all n locations
tagttctgaatcttaactcttgaacggtgatcatgtaccagtcctggttgctgtatattctgtaccactctagtggcaatatattttgcatgttatttctttgattggtaaataagcaaatcctgttcttcccatgttcaggcatagctaacttcccgttcactatatccagcattacatgtctgttttctgcagcatgacctgcatcgaagatcaagagacatttgtttaacaaaataatgatcaggtctcaagatacttgtgataaggagctagcaatttactgcctaacctttttttcctattgaattcattataatcatattngtggctagcaacttcactctcacttatctgaaactgatttctgacaatgctagttaaggctgtgggcatatcttgctctgtgagtttcacgcatcatcaattgttctattgataacaaattcttcaggtggaggcagaaaatcctgttgaattggttcttgttatgacagttgaacctggctttggtggtcagaagtttatgccagaaatgatggaaaaggtattattactgcatcaagtgccatttagtattcctgattgtttatagtttatactgtatttttgtgtatctatgttttacaactattctgatcattttgaaacatgggcgttaggtgcgtgccctgagaaagaagtacccatcccttgacatcgaggtaca

SEQ ID NO: 1722 - DNA, 2950 bp, Oryza sativa
ctctcccaccagcatggatagaggaggacagaataggaaaggtgcaagccacgtacgaaggggatatggcagttttggacctggataacagcttttaacaagatctgaagcttggatctatattttgtaagtttgggagagaggcggggggtggggggaggggggtggggacgataagtttagggaccgcttgtgcacttcactcaaagatatgaataacaaaatttgtctactctatgaatttgatgtctgatgaaaagagttatatacaggggttcgaaagaacgcgtaccattagtcaaacgaaatgctttgtcctgacatcatactaacgtcaacttgtaacctagttaatactacacatgatatccagatgtataaggttctgataaataagataccacgctaaggtcaacacaataccttagatattagcactaggaaaaagtatgaattaccctccgaactatcgcggttgaccgaattactcccctgaactacaaagccagacattactcaccctggactttcaataccggatgaattatccccttgacctaattcagagcggttttgtcctacgtggcgtacgcgtggcaatccagtcagcattttctttttaaaaaatagtgggacccacatgtcatacctacccttcccctcttcccctctctctctctcttcactcactctctctcacggagtcacggggcagcgtagggggcaggcgcgagaagcggctgggtggcgagcggcggcgcgaggcgaggcggctgcgcaaaacgaggaggcagtggcgctaggtggcgattcgttccccctccaccgtgcccacgaacccattccattccattctccatcccccacccatgtcacttccgcgctcctcggctttcatctctcttacttcccggtctccctctcctcggtcgctctctctctctctcccatgcatgtgctcgggcaggcggatgcggacgggcggtgggcagcggcgcgggggacgcgcggtgggcagagtcgcagggggacgggcggggagatgggcgcccgccggtacccgggcatcctccacgccacccgctgctgactgggggttccaccgtcgtcggcgcccacactggagctcctccccgccgctcgtgccctccagggactcctccatggatgccatccagtcgcgcccgctgctgtcgctcgccacccagtcgttgcttgcgctgccgcccacctcccgcccctgtaacaccccgtgagacacataagagagaatagagagagaggaagagggaataggaggtatggcaggtgggtcccacaattttttaaataagaaaatgctgactggtttgccacgcgtacactacgtaggataaacccgctctagattgagtccagggaggtaatttgtccggtattgaaagtttagggtgagcaatgtctggttttcgggttcagggggtaattcggtcgatcgtgattgttcatggggtattttgtacttatagtactattacccgagtcttacacgacacccataagtatcagagtctagtacctagctatcatgttgatgttaggcatataattaaacaattccattccaagtatatatatgttaactgtaatatttctgtatacttatgactacacaccataccatctgtacatatgcctgagtactacaaaacttctgcacatgacacgcgcacggtgatacactatcagtacggatacataagagtagacactaactgaaatacttagcatggcatttgtctattctttctaagtcacaactcaaatgttactacacgtagtacgctagcacgtctacagggtgcaagcaatcaccttatatactgctgcctgcgtcctcatcaaagctcgccattatcagctagcttagctcaaacacttgtagcttaactaaccatcaagaatccaagctcgatcaatggcggccaccatgcgtggtggcaacgtagcactcgcgatcatcttcctgtgcttcacctgtagcaacaatgtcttcctcctccgttcgtcgtcggcgtcgtcccccatcgacgacttcctccggtgcctctccgcaagattcccgcggagcaagtgttcacgcagagctcgagcgggttcatggcggagctcacctcgtccgtgcagaaccccagttcgtgacgaacgccacggtgcggcccgcctgcatcgtggcggcgtccgacgcgtcccacgtccaggccgccgtgcggtgcggccaccggagcggcgtccgcctccgcgtgcgcagcggcgggcacgactacgagggcctctcgtaccgcgccgtgcgcgccgagacgttcgccgtgctcgacctcgccgggctccgcgccgtgcgcgtccgcgccggcgacgctacggcgtgggtggactccggcgccacgctcggggagctctactacgccgtcgggacggccaaccccgggttcgcgttccccggcggggcctgctcgacggtcggcgtcggcggctacctcagcggcggcgggatcgggctcatgatgcgcaagttcgggatcggcgccgacaacgtgctcgacgccatgatcgtgaacgccgacggcgagctcctcgacaggggacgcatgggggaggacctcttctgggcgatccgcggcggcggcggcgagagcttcggggtggtggtgtcgtggcggctgaagctctcgatggtcccgcccacggtggcggtgttcaccatcgccaagaccgccggcgacggcggcgtcggcgacgccgccgccctgctcgccaagtgggagacactcatcctccagccgttcctcccggatctcaccatccgcgtcgtcctccagggccggacggcgctgttccagtgcctctacctcggcagcggcggctgcgcccgcctcgccgccaccatgcgcgcctacttcccggagctcgg

SEQ ID NO: 1723 - DNA, 8903 bp, Oryza sativa
aaccgggactaaaggtcatcaggacggttagtctcagttgattccatgtcaggccgtgtcagggccctaggatctttagtcccggttagtaacaccaaccgggactaaaaacctaaatttagtcctggttgatgttactaaccgggaataaaaatcaaaactcactatataatccatagtacttatcctcttttcctatccacacaacaaactcctccctctatctctttttttctctctaactccttacctctttccttcctctaagccttctctttcctttttttccttcacagtgaagaagaagcggtggagcggcacgaggaggaggccgggcggcggccggcgcggggggccacgcggcggcgggtggtagtgcggagggccgcgtggcggcggccggccggcacggaggggaggaggggaggcggcagtggccggctgacaattttttttttagattttgtgatttattgcatgatcctgtgatgtatttgatttgcatgtgctatgaatatgtgatgtatttgtgatgaattttttagaaattgtgatgtaatttttttaagagtttgtgatgtatttggagatggtctatttgaggatttggagatattctgtgatctgtgatgatttggatttgggatttcttgagtatgatttggagatggggtgaaatcaatattcaatgttaaaaacaatgaaaaagagaaaaaaagaaaaaagatctttagtcccggatggtaacatcaaccgggacaaaagatggctccatctttaatccaggttggtgttatcaacagggactaaagatcgatctttagtcccggatatttgaaccgggagtaaagatcgttatctttagtgatctttagtcccagattcgtagtcccggttggaaaaccgggtctataggggattaccaaccgggactacaaagcatttctccaccagtggcaccttcggtgggtcgaggaacaccagtgtgttgaggcagcataggaagactggcggtgacggtaggcagcaccacacgacgcagaggaggtcgtcgaggatgaagaaccatggccaatctaaggatgcttggtgccacctcgccacttgccgccgcccgccgcaactactgcctcccctcccgccgaacagggccggtcctgggtttttgggccccagggcaaaaacttatatggaggcccctatatatatatatatatacataaactaatatatatatttatatagtcatataaacccacaacatttaatattcgatgtgataaaattatctatatataacattttaaaacttcaaagagaaataaatagcagtagcgagcagagaaggtgatcgacggacgatcgacatgagcgtggctactggcgagccatgatttgccgacttgctgtttccgtttgcgagaagtcaagaagtcgctgagagcgcaggagcagtgagcgacgtgacgtgatcgaggcggcatgacacgagtggcgtgatgtgatcgaggcgaagcgaagggatgtagtcagatgaagatcgcttcggcttcgttgaaacaggcctgacgatggactaaaaattcattttctatattggactatttagctgtctaacttaatatagacccatggcacatgaactaaaattatacaatacgtagtatatatactatatgtgtatatagggggcccctagattttgggggcctcgggtagccgcacggcctgaccccccctagggctggccctgccgccggatctagtgaaggggaaggcgctgccgttgccgccaccgcctccctcccgtagacgcacaccgctaccaccgcctcccctcctgtcggaggggagggctctgccgctatgccgtcgatgccgagtcagggggtgagagaaccgagagagagagagaggagagtgcagtggaggagaaaggaggagaggataaggagagagattaggaggagaggataaggacaagaggccaccggttcggctcaactcgattttaggggtgcccttttttttgaaaaaaccaacacctatagtatattgtaggtgctagtttttcattaactgattcctataagaggagtaaagtacaccgtggatccttaaacttgtttgatcttctcatccctgtccctaatctctgaaactgcagatttggatccttaaacttgctaaatgtatcacacaaggtccaaatttgacacggctgcaaaaaggatccgacttgtcttccacgtgtacggccacatttcaggggctccttggccaggcgctctatacaatttgcagaaaaaccctcagacttaactaatatttattccattcaggccaccacgttatcgtctccaatcttctccactcaactgtttgctctgccaccgcgccgcgccgttgcctggcattctccgcaggtgtcggcactgttcctagccattctccacggtagccaccgaaccatcgtcgtcgtcggcaccgtttcctgccgttctcgaagatgccaccacaccagttgccgctgtccccgtcccccaaatatagcgtgggaaaataccccgctgtcagcacaattggcagaattggtgaatggcgattatgaaaaaacggacagatacttgattaataggcttttttttgtttatgatgtgcagccttagggatgtagcttggatggtgaagttaatggcagaagtagttctggtggttgcggcctaaactagttgagaagcagtgtgttgattctgtactttcaatgtttcagagttaatttgcgtgtagctttggattgcgaaaaattgtgcaatgatgatcatcagaatatgcagtatatagatatgtacaggtgttgttcatcagaatttatgcaatcacaacaattcagcaaactcttcatgttctgcagaatttagtcagatcatcgaatttatacagtggcaataatgttcatcagaatatgcagtacatagaaattatgttttgttgcatcagaattaccaacggcagaaccttgtcatgctaaaaaataaaggaacatctgcacatttccaaacgtcatacgatgggtttaaaatataatcagatcattgtccatgcattgccaaagcaaaatataatgagattgccaaatgttttgggggaaaaaaagcagagtaaacacaggttcattacaaaagggtgctttaactgatgcttgatggcatgaaaccgacctaatagcactgtttatacatgaaatcatctaataattaagcatcactagtttttctttgctgcagccttctttctagaagacttatttccatcaggcttctttgcaccaagagatgagccagcagccttctttgcaccaaagccacctttcttcccagtaccaccactagcagctgtagctcttccttccttggttgctgtggttagtggggctagtctagctgaaggttggttggacaagatatatgcactatcaggtaaaggttctgcctgcaaagctcttttactaggttgtgatgattctacagccatttgtgatagcattgtattggttggataaggctgaatacttggacatggctgcatcacatcctgtattaatagaacaagattatttgtgacgaacagaattaatatatataattgatgtttgtagaacctatattctgtacatacctgagtaacaacaggctctagatcagcttctgcttcatcatcaaccagtggcgtgatctttctctttggttgttgtttaggccttaatcctgtctttctcaattgacgccccttcttgttatggccaagttgttgacaatcggagcaatgcatctcaactccatgcttagacatttttggtccatttttgccctgaacttcttgtggctgctttctcctacatttctttggcctgccaactttcttatcataaactggaggttttacttcaagtccatctacttccactttgttttgtttgaacatggccaaatatggtagccataagcattcaggtaagcctctgttgtgtaacaagcagctaaaactgactcagcagggatcctttcattcctcaagcatgaaattgcatggcaacatggtattcctgtcagatcccatcttctgcagtcataatgcctagtttgaatgtccacaatgtaactaaaatgcttgtgttgcacataaaaaattcctttaccagctgggagtatgaaacaattgttggccatatctgcattctttgaaacttttttcctaatcttgggacatattggtccttgccacttctcctccatctccttctgcttattgtagtacctagtcattagccgccccttgatcctctccaacatacttaacacaggtaactctctagcttctaaaatgtacttgttaaatacttcacagttgttgttcaacaggatgtcacacttggggaagtcactaaagaaagctctaatccatgtattaggcgacatgttactcaaccaatcatatgcctcctggtttaaattcctcatttcttccatgttgacattccactcatctatacaactagacctagcacatgctcatagccggttcttcaaattctcacctttgaaatggacttgaaagttagaataaagatgcctaacacaaaatctatgttcagaatcagggaaaacctgttggactgctagtataaggccctacacaagtaaaatagcagaattaacagttgtcataagaatttacatgttaaattgaacaattcaaaagaatacaacttgcacttataccttctgcatgtctgtcattacagtccatggatatgtattgtcaatgccaagatctcaagaaaccacctccatgaagacaatgactccacctccaccacagccattgcaattggatatatgcagtcattaggatcaattccaacagcagttaatagttggccaccaaatttagtcttgatatgacatccatccaagcaaatcagtggtctacacccactaagaaaaccccttttacatgcatcaagggacatgtacagagtgttgaaacaaccatcattcaaattcaaataaaaggtactcccaggattggacctccttaactctgaaccataatcccatagttggttgtactgctcaacctcatcaccatatatagccctcaatgccaaccttctagctctagaaagtttgctcctagaaggtgtcaagttccactctctctatactgtccttgcaaagctgccaagagtcatcttctcatctgttctgaatgtatcaacatatatctctgcaagccactttcaagtgcatcttttaagaatccattccttttggcattcatgctctccaacataagaatccattccttttggcattcatgctctccaacataggtcttcaccatgaaagtttttgtccttctatcaaatgaagcatatagattccaaggacatccctctgcacaatgtgccctgatccttgtcctatcatttcttggcatcttgatctccactctttgtttcagactatattcagttattgcttttctcaatacctcaactgattggaataccatgccaactttgaaaattggattgctcgtgtcctatgacctaaacgatttgaacttcaatctcactagaccatcttcatcgccatcatagtctggaagttgtagttgttcctcatcaaaacctacatcatcagcagactgaacatccatggtttttgccttattttcactgattgttcccttcttcccttcttactcttctttttcactataccattaggtgatacatcatcatctacattatcctcaaataagtcatcatccccatcatctatttcatagtcactatccataaagtcactatcatcactatcactttcactatctctgtccccctcaaccaattctatggaattggctttgtttgaataaaactcaggaagcctttcaccctctttgttctcaacatctgttacctttcttgggctaagtaccttaggcaaaatctccaaagtgtcatcccagttattgttcccatatgtctccccatgatcaaagtacacaacaaaattcttcacagtattcacaaatgacttcattgcagcagtatctatctctcgtgtaatcaacctcagtctatctgcaagtctctttcctcgtagcaaccaataagtcttcacgctatcttcatagccaagcattgcaatgaattcacctatcgaaagcatattccaactttgggcctcacagtgatcaaaccaggtcaccttctcatctacgtaagaccgattctggccatgcccgagaaaaaaaccaccatgatgcacctcaagagtaaatgtatctgaatcagttcctacattgcacaatccatcaaccaaaaataagaaaacccgacaaaacctccactaaatttcaccaagcaaaaccctaaatttcactcaaccaaaaattgaacatttactaaaccaaaccacaaggacatcgatcaccaagtaccatgcaccaatcagtttacagattataggagaattaaaagagctcaccatagtagggcattggttccacttcttcgcgcaactgaagaaccatcgttggacttttttgtggatgcaatcaaatccacaagctagacatgcaggggatcaatcctctcatttgccggtttcaacatgaggaaaccgtcgccgatcagcaccggccactgccctagcaagccctggtcgctgccgcctctgtacgtgggatgaaaacatgaacagatggtatggtattgaaaggatacaatttggaggggtcttttgtaagttgtatagagcacatggggaacccatgcaaatgtggctgtacacatagaagacacgttggatctgctttgcagccgtgtcaaatttggaccttatgtgatacatttagcaagtttaaggatccaaatctgtagtttcagagattagggaccgggatgagaagatcaaacaagtttaaggacccacagtgtactttactcttcctataatatatttaaacgtttcggttttttaataaaatcgacatctatactatacatgtaggtttttctttagaactggctcttatagttgcttataggtgtcggtttttgtgtttttagcccacagagatggtaaatatgtactggttttagcacttctgacacctatagtgccgaccactatgtgcctttttgtagtagtgtacaaaatttcttgcctctatcacggtaaaaagtttacgtcctgttctctccatctccacctagtgattcagtcaactagtaatgtttctaccattatatatttttcatgatgttctctccatctccacctagttattcagtcaagtagtaatgtttgtaccatttaatattttcatggttgtcgtgatgttcaacggcgacggtggcctacgcccctcagcaccgcaggctccggcagcatggcggtgctcgccccacggcagcatggatccggcgatggggccgctggttgttggtgcgacgtggatcaggaggcacagcaaggatcgctagggtggaggtggggtcgccggctggaggtgcgacggcgtcgactgtttttcttgattgttgatgtttattgatgtttgattgtctcggatttgatctagatgtgttgtttttcttgggattattgattatagttatgtgttcatggatttgaggcatcattttgggatcatgtgcgcctcaaaggtgctggttctggaatcggtaattttgactagggtcatcagtgccgccttcttggttctagttggaaaatctggcacctatggcggtttcccaaccaacactaacgatgttttctgtagtagtggttactagcgagtgtgcgatggagaaggggtattctagcatccatatcattggtacagagttgccaaagaggctagattcgatgccttccagggtcatgtggctagatatggtagtacctggcttggcatgatcaagtttggtctctagggcattggtgacttggtgaattatgggtttcaagcaaagaggtagcgagctggagttgacataggttcctggctagggaagtcgacaaaagtggaggaggtaaggacgcatcattgttggagacaggccatggctagcatcggcaacccaaatctgggggtggtgatgaccatgaaaaaataggagcgatgaagccaacaactatatggaggagtgtccagagccgagtcttgtgggtgttgacatgcccgacgaggcggttggatcaagtggccaccaagtaagattgaaaagatcccacaaggagattctctggcagtgacacatggagagctcagagctatgttggtgcatcagaaccaatgccctccctattcacatcgctagatccagttggccaaagacacatagtgttatcgtgaacgaggtgggccctaggggtggtaacagatggaccagctagcgacacggcctgtacatatccgctccaaaggggtggtaaggaggaatggcacaatgtaggtgtctagtggtggtgactgaaggcctggccggcggcatggcttgtctcatgatgtgcttcggagaacatatcctatagccagcgctgcttcacctattcgatctatagatttgaataaacatgactggatgatgtggatgaatggagatggttggttacgttggtagataacacaaatgagcggattgatttagtttacaagaatttaccacatttgtgtagaagagttggtggacgcgtgtgagtgctgggtatgggtgggcaaaaaaaaaatcgagaccgaaaatttccacgtttggttaggaaagctggggtatgcatgggagcattgggtagggagtggcaaaagaaacccaaaccaga

SEQ ID NO: 1724 - DNA, 6174 bp, Oryza sativa
catatggtatattttccggttggtgtgtgcatggaaagatgccatgcccaacatgtatggaggcactccaaggaaaaatgttgaagtttggtggaaagtactcattctttgattgtcatcgccagttcctcccaattgatcatagttttagaagtgattcacattcttttctatcaaacactacagttagcaatgaaccacctcttcgtctcttaggtcaagagatccgtgcccggttagataaccttgtccctgctgctaatggagataagtttgtaggctatggcaaggatcaccattggacacatatatctagtttgtggagactcccgtactttcataaactagtacttcctcataacatcaatgtcatgcacaatgagaagaatgttgctgaggcaattttcaatacttgctttgacattccagaccaaacgaaggacaatatcaaggctcgccttgatcaagcagcactttgtaacagacctgaattgaacctcatccaaaaacatgcatctagtcagtgggtaaagccaagagctgacttttgcttgaatagagctcagaagaaggaagtattagaatggtttcaaacattgaaattccttgatggctatgggtcgaacctaaggagaggagtgaatttgaaaaccatgcggatcaatgggttaaaaagccatgattaccacgtaatgatggaacgtatctttccagtcaagttccgtggatacttgccaactcatgtgtgggaagtgctagcagaggtgagcttcttttatcgcaaactttgcgcaaaacagtttgatcctatagagatggcaaacatgcagtctcaagtaattgttttggtttgcaaattagaaaagatctttccacctggattttttaatccaatgcaacacttaatgattcacttaccatatgaagctagcatgggtggacctgtgcaatttagatggaattaccccgttgaaagaggccaaaagtatcttaagagcaaggttagaaaccgagcacgtgttgaagcttccatagcagaggcttacatactagatgaaatctcaaacttcacatccatatactttgctgatcaagtgcagacaattcacaatcctgttcctcgatacaatgttgctactcagtctactgattgttccctaagtctattctctattaggggggattctactagccgtggagtccctcgacacctaactcgtgaagagtggaatgctgccatattgtatgtgcttacaaaccttactgaagtggatgactacattgggtattaactatgaaattgatatgagttacttctagttcatagctgcatataattttactttaaatcattgtgtgcatttttatcttgcaggaaattcatagatgaggaatggactagatgaggtgtcccaacaaggcaacaacaagagaatatcttacggaatggtgatgggagagatcgtcctaatttcgtatcttggttctatcaacaagtaatttctttagcccagactttacttatattatacgcgtagcaatgcatatcctttcagatcagattaggaaatctagctagcttacttcgatgtaatatcttgcatgtgtatacatactttcctaactgttgaacattaagttctttcatgaatgttcctgcaactaacctaggtaatccccatcaaaccaataaagtattactgctaaaactctaaatttggtgacttcttatatcaatgctataaatttggtcctacaatagtaaagcacatttggattagtgcaagttcctagtatgcatatggctttttcatagtacaatctgagttaattttttttcatgcattatgaaaatagtattgaacatgtatgtacatgtcattaatatggagacacttctcaattgatcatctgttaggtcggaaatctggaaagaataaaatccttgccaatttctaataacaaaaagaacctagccaattaataacttgataacttcagttttgcaattcaagacctcaataattaatagtgccttcttccattttctttctgttttcattagtttgcagtttaacgcctcttaattgcatttgtgtcaataacctaataatacttatgtttttctataacataaccttcaatattgccataatagaacattatgccacaatttattgacacattatttcctttcatttcactgctagagtatgttagacgaaactatgagtgatgatttgaggcaagtagctaaaggatgccacactcgagtcttgctatataatatgtatgatgtgaatgggtatcgattccgaacacacaaatatgaacatgagaggccaaatgcaactacaataaatagtggtttggtgactataggacagggagaaaatagtgacacaactgagtattatggttacatcaaagaaatagtagaaatcagctttgatggcagaaaacctctcacacttgtgctcttcaattgccattggtttgacccaagcaaagtgaggtatacaccaagatatggtctggttgaggttgctcatgcgtcaatccttccaaaattcgaaccatttgttttgtctcatcaagcgacacaggtgtattacatgccgtacccatgtaaatcgtgcaagacctcactaattggtgggttgtgtataaggtgcagccaattggtagactacaagtacccaatgatcaagattacaattatgttcctaatagcaatgttgtccactatttccaagaagatggtctatccggcagttttgtaatcgatcttggtcaagaactcaataatgatcctgagcaagttgccattagcagggatactgaagatatttgcaatgacaaggacttgaagcttctcaatggatcatctattcaagatgaagatgatgatgacgaggatgatgaatcttattgcacttcctcatctgctgaagatgatgaggttcccactagtagggatatcttatttgacgagtatttctaaggtacattgttcatttttttgatggagactataatgccaattttttatatcctgtgcctccccaaatgaatatttcctttgtcaactatgcacaagaattaacctttcataaactggttgcgtgctgtaataatatttggcagtcatcttactttcgtaaaatttcaggcatacaattggatcattgcaaaggattgcagttgattggtgctgtcaatacacaaatttggagttggttactcactagcctctaacatttctctattgcctccctgggagaggttctaagaactcagactcaccttgttactattgcattatagccacttcagacagccatttatattgtgttcttgtatcattgtattaaaaaaatcatactgggataatatacagctaatgttcacctgacatttgtgtggttccatatgtgatgcttgtctgtcatgtttggatgatatgtatatgcatacatgttagttgcctgcctactgtatcagtgcagtacaatcgtgaatgtgtgaaaccctgtacaatgagctacataatcttaccgtgtattcatctcaaatgtcaccgtgtgctaaatcttacgggaagaatttcaaccttcccgggtcactaaaaactctcggtaaggtgtttcatgttcccgtgttttatggatttcttcccgtgagttccaaccaccccgtttcactccgttccgtgcatgacatgccgttaactggaaagttaccggcagggtgttttcacatggtaagctttcagcacatcctgagttcgcaagcagtttctcacgggaagagtgacacggtaaaggtgaaaggctgccgagtacaccttcccgagagtttgctcacaggaacgacgttaccgtgagttttagccctgttaccgagttgtttaggcacacggtagacttccattccctggtagtgagtatttattataccaactaggaagctagctcgcgcgaatacgcaggcatgtattttagggttgttttttttacacacgtttgatcattcatcttatttaacatttttatataaaactgtgaaaatataagatatgtgcaaattacctttaatgataaacctagtcacaacaaaataaataattattattacctttttaatagaactaaatggtcgaatgttcgtaaagaattgaacaacgtcatctattaaggatattataatttcttcaaaattattctttagtgtcattgcttatttttaaatctatttgttagatatgcatgtttatagatcaatcctcactctgtcccaaaacataggtatctttggattttgggacggtctttaggatgctactttgacaaataatatgtatatttataaaaataaattattatatataaaagagttacttgtatttaatatcaattttacgggattgatattttatttattttcagtataaatagtaaaagtaaaatgtttgacttggcagtattctgaatatgcttatattttaggatggagtaaatgtatggtaccgtaatcaacatgttaattgtttgtagcttgcaatggtaaagaaatacatgtgccatatatttcttacaatataactcttatttttgggcttgattaataataataataataaatattttttatatatttagttgttagctagaaaataggagatgagatgggaggggagagttggagagggcgggagtatacatacgtgcgctaattaggaggaagggcagtacgctactttttttttctaagaaacagttcgctacatttttccccactaaaacataatagatctaataactaatttaattagtgggtccatctttaagtgccacgtggcattttaagaacatttataggagttctatgtggcggcttgagagcgtttataggaagtttaatttaatggacttttagtatataatagatggagtagatagatagatagatagatagatagatagagtactagttggatgtacttatattataaagagggtcccatgtcgactagaatgacgtgaccgtggacgtcgttgattaggccagttgtattatgacaattgtagattatattacaaatctatatatgctatatagttagcaccaaaagtttaatatgtattgggccacatcacttacaaaattagagtcattggattatttcattcttcatcacaatcatccaatatatatttaaatatttacatttattcctcgttagttcctagataacttaatattcattaatccacttagtatagttattattactcaaaagaaggcatccaaatggtcatgccatttgtcatcttatcgtttgatggtgtttttacggttcagatcaactaacaatctattttataatatattgcatacatcactattgcaccacaacttgtggagtttcatctagtttatattaaataacatatgccattgttgccgctgccttgcgcctctctccccctatactcatacttgcttcatggtaccgctactatataaatcttaatcttaattggtgatggttggaaaccccacaaagttgtcagatttcccaaccagcaactataaggccaaggcggcactgatatagaggggaaataggtgctggtttagaactaacacctttaatttgaggttccacaaataaaaaaagcggctcgatgcaccggctcgaatcaagcagctccccttcacccgatcaatcaaagaacatccaagaacactaagaacactaagaatggcccgacatcgtggagggcaccactgccgcagccatcgggggtcggtagcctgccaccgcacgccgccgccgctgcctcccttcctgtcggatctggcggaggggaggtcgccgctgccacgaaaggcatgttcttgttgtgcaccatctcccacaggtcagtgtccatgtcgaaggcgcaggtgcccttgtcttcttgctactgctgcggctgcaccgatgccaacaagaggatgtaggagctgacaagggcatacggcgtgacgtgcacactattggagaaaccatctttggtcgatcgacccaaatccacaatagtcccggttccattaaaaactgagactaaaaacgatttttactaccgatttataagaggaacaagactagttgatttttagtcccgg

SEQ ID NO: 1725 - DNA, 5440 bp, Oryza sativa
cggtaaaaatatatttgatttttataatagtagagatagagatatctcactaaatttaaattgaaaataagtacgtttaatattagttggcaacttggcatcaaaatacgaagtaaacttaccttggtaaagataaagaaagaaaaaatcttagccgttattcctttcgcgaggcggcaacagggagcacgcactctaccgtcgatcttgactggtcagcggaagcgaaccgacctatccaacggtcggtgggagatgtagccgccagtttgaccggtcgctgaccccggccaaactcacacgcaaccttcgcgccaaattttcttgccctccaagaacttttcgcgccataataagtacctcctcaagctgcttccatccattaacctccgtacaagtaatggcaatggcgaagcaccaggccgacctcgtgaggtgctcgcggcagccgggcgccgccgtcggccgcgtctgcgcggcgcacgacggccgctgcgtcgcctgcgactccatggtgcggcccgccgcgccggcccgcgtctgcgacggctgcagcggcggcggcggcgggcacggctcccgcagcgagaggtgcctggtgtgcggcgccggcgccggagaaggaggtgcggcggcggtggcggatgcgtactactgcaggtcgtgcgtgcagatggagaaggatcgcgacggctgccccgccgtcgtcaacgccggcacggccaggagggacgccgccgccttcttcttctccgcgaggagcaagcgtggtggcttcagatcaacaatggcgtgatcttgctctgccatggacgcacgtcttcccgactccacgaactcaaacagtttacggctggtgattttcatgtaacaattgaattatatttctgcaatatagcatatctccattaaatcgatcgacggttttactgggagtaatatgtattgacccagaaattattgggtcctatagtaacaattaattgcaagagtgagacacatgaatggaaatgatcagcagaatagctgctgaggaactcgtgtaacatctcacagaatataatagaaatccctagtgaacgtgtattttcatccctcgaggagatgcccctggttgcttctatgtcatccaaatagttattaaattttttttaaaaaaatgaaaacgtagattaatataaaatatatcactccacaaacatgtaagaccaaattcgatttctacaagtttcaacaaacttatgaaaaacaaatatattatcaaaatatatccaatattaaatttaatgaaactaatttgatgtttcagatataaatttgatcaaacataacataacaaagtttcactaataaaaaagtcttaaaacggagggagtcactaccagagagtgggagactaccgtgtacctcagttggttaccgagagtgttatatggaacacggtaacgtttaaagcataccgtgtgtgaacaaggaaaaactcgggaagtggctaaaaattccgtgtgacgaatcgagaaacacggtaagtgtgggacccacagtttctgccgttaagcgcgcggaatatttggtctgcgcgcgggatcgccgttggtgcaggcggatggcgcgccaagatttccgttggcgcggctggctggcgcgcctgattttcgttgccgcgcgagtaacaggagaatcccgcgcgagttacagccgaaggcccatatgtcagcccaaaatagagaccaacaaaaccctagcccttttaatcgatcccctcacttccccaccccctgccgcctcattctcctcgccacttttcccctttctgatttttcccctctcttcttcgcacatggcaggatagctgtgcgccccagcgtcagtccgccgcacggccaccgagcaacgctgtgcattcctggccgtacgcactccctgcatgtccacatccatctgctaggctctccttcgttgtccagcttgagcacacctcatcttccatccagctggtggtatgtatatgttgagtttttttcttgaatcgtatgtaaagttgggtcttggttctagaaaacccatccattttctcccaggaactagaaatagttcggtgtatgatttctaggaactgtatctcattttaatttcttgtaataccacaagtaccatatgaataagttgttgtgctttgtaaataaaaacaatattagactacagaatggtgtgggtgagagttcttgcactgtcagaataatgtgttttcatatttgtgtacttgttgatggatacatattggttaggcaaaacttgccctcttttcagaaaacataatggttagtatgagtgtttgccacggccctacttgtttagatcgatgttgaatggttgaattgggttggaatgacagcaccatgttgtgtgatgatctgcaatgctatggtgtactacatctttgtatcgacattttataataggcattattataccatgttgctactatgtagtttttgacctgtttaatataatactgcatatcttaattttgtagcaatatgtggcgattgagcttgggctgcagggaggattccaatccttcagatcaggctgtcagcgctgctaccttgccgagatgtagaacaaggtcctcaggttcccaacaacctgataattcttctaatttggatgagatattggctggcgaagaaacagatgaggaaatgttttttcgtggtcccacacggatgccaccgcgacctacccgagatgaggacaaacctgtgatgactccaaaaggagataggtaaataggctaattttggtatgtttcattagttgaaatatgaaggcttgatctgtttgttcattgatttgcacaggcaatggcaggctaatgattttgggggcaacattagggtccccactggcatcctgactgtgcttattaagcattttttccctggcattgtcaattttaaaggaagagatgagccagcatggagttggaaacattacaggattgcaccggatgatccagaaagcgctatactgaatcgcttgccaagccgtctccatcgtgttgaggaagatttctggatttgttttagagcattaccttctccaatatgaagtacactatgcattttattgtgtcttcagttttcatagtttatggccaatttgtactgtacaatagtaaagtatcttagtaccacacttttcaatgtcaagcaggctaactttctgtagttgcagctttacttcaggtgggcagagcgaacggaacaagctgctagaaaggttgtccgcaattgaatcaagcgccttttttcggacctgatttatgaaactcgtatcctggccgtgctcaattaccaaaggaagattttaaaggtagaaacttctcgggatattgcttgcaggacatacctaacagaggaagagtacctacaggtgctatggttgttcattgataatttgttgtgatctactgatcagattagtaattaataaatctgtgcttctcctataggtagaaccatggtggttcctaaaggcaaaaaatgcgtggcgggagttgatacgattgaagtggtgtaatcctgaatggcaggctagctcacatgctcataggatacggagggagaaaatgacatggccatctcaccgccaaggcagtgctaacttgagtcgtttccaaaaaaatttggtatgtgcatctatgttgaaacatgtagcagatcatggtataatatatatggtacccatgttctgttttgggagaagaagaaaaagcgggtagtgtcggtcgagtaccccatccaaacccacgacgtcgccccgcgcccatccatctagtgtcggtcgagtacgagaccccagcccgcacgtgcaccgccgtgctgacaccagtcgccacgcacggaagaggattggctgctcgtccagcaaccctccctaggactgattcgtctcaggtgttgttgtcttgctcctggaatcctcattcggccttcatgtttcatcatctttttgattagtgaccagttctagaatttactagtcaggttgcggttgtactaagggattgcagaactaggttgttatgccatgtgaaagtttgtgtgattgatgatctgaactaatgtttgatattttatttctcagtcatacaaactaaactaggcctttcttattcttgaacctttcatgaatagaaggacatttcctaacataattttattctatcactttgtcataactaggtacaatggaaactgatcgcagttggatgtacaagggccgtcgaaagcgtggcgaagttactgctgagtggatatcgaagactacagaatttcttgacaaggcattcagcagggagacaggacgtgctggtgtgttgtgtccttgtaactactgcaacaacacacgtcctcaaacaagagatatgatgatgaaacacctttgcaaatttggtttcagggcagcatatactgtgtgggtttatcatggtgagacatatcctgcacgtgaaagcgatatatgccaaagcattgaagatgaagatagggtggcagagattgatcggatggatgagatgatagatgatgtccatgatgcttatgtctcagttgaggaggaagatccggagcctacagcgcaagctttctttcaaatgctgtctgcagcaactcaacctctccacgaacacacacaggtatcacaacttgatgctatcacacgactactagctgtcaagtctcagtatgctatatcaattgctggatttgatgcacttttaaatgtgatatgtgctctcctcccacaaaggcacaaactaccagcaaacttgtatgaggcaaagaaagttcttagtgcattgaacatgccatatgagaagatagatgcatgccctaaaaattgcatgctctttaggaaagagaatgcgcagaagacgcactgtgataagtgtggagagagtatgtatgtggaggttgaagacagaaatggtcacaagaaacaattaactgttgtcaggaaggtacttcgttatcttccattcatcccaagaattcagcggctatacatgtctgaatcgcaggccaagcaaatgacatggcacaagaatggtcatcggtaccatcctgacaagattgtacacccagttgatggtgaggcctggaagaaatttgatagaaacttcacaggcttttcaatggaagcccgcaatgttagaatagcaatagcaacagatgggttctgtccatttggtatgggttcttcttcgtacacttgctggcctatgtttgtcattcctctaaaccttccacctggtgtttgcatgcggcagcacaacatgttccttaccttgataattcctgggccaaattatcctggcaaacacattagtgtattcatggtacccttagttgatgaacttatacatgcttggcag

SEQ ID NO: 1726 - DNA, 2901 bp, Oryza sativa
gtcaagagcaagtccgactaggtccgccgccccatgggcgccgccgcgtggtccgcccttttcgcggaccacctcgccagcaacaacgccggcgtcctcatcctcgagccccacggcggcgtggtcggcgccgtgatccctgacatggccacgccctacccgcaccgcgccggcgtgctgtacaacatccagtacggcgtgttctggtggggcgacgacgagggggagagctcagcggcggcgaggcggtggctggacgcgctgtacgcggcgatggaggcggcggtgagcggcaaccccagggaggcgttcgtgaactaccgtgaccttgacatcggcgagaacgcggtggtcggcggcgtgacggagtacgagagcgcgaggaggtggggggagagatatttcatggggaatttccggcggctggcggcggtgaaggggagggtggatcccggcgactacttccgcaacgagcagagcatcccgccacttctccagccctattaggcttagtagcctttttatttgtttgcacagtgcacgtgtgcattgcactgcaatttgagtccatgcaaaagttgcatatcgtcatcactcgatcgctatgtggagctgcacaaatgtatgcctagccaagaataaagacttgagtgacctctttgttttcttactagttaggccatgtacaatgtaccacagtggacagtggtctcaaccctccacgtcagatctgagcacccgtggcagtgtggagtgtggttccatgaactcttgccgtgcctgcagaggtcacagttgcctcgccgcggttcggcttgggaggtgcgaaatcactgctcagggctatgcgtttgggaaaaccgtagcctcgtgaagcgcttggggaaaaagagaggtcgaagagaacttgccgtggtggtcatcgccgctcgccgccgccactgaggtcgcgttgccgctccacgttgccaatgaggtcgcgtcaccgctccaagccgccgctgccaaggtctctgacgttcactggtgtcgtagatccaatgaggtcaagcatggattcagccagctcgtggctggatccgctactgccggtggcccctcgaccgccacgagaaggggatgggaggggagaagtcgacagacgcggccagatctgccgccgtcgcccaaagagaaggagagggggagagcagcgtggcggtggacagggagaagaggagagggggagagccaccctcgaagtttgatgtggtgaatggggaggaggagaatggtggtgggaaagtgcgacatggcagtggaatgggaggaggagaatggggagggggagaaatggggagaataatggcgcagtggtggatggggaggaggggggagagtcagcactgtgagcgtcagaagaagaggcagcgatttggtggcgaaagaggaggcggcaacggcgagatgtcgtggattagttttggtggccagtggggaatcgagagaagagagagagtggggtaggtgagaaaaaaagaaaaggtggagaggctgacagtggatccatgtgaagtttagtggtatctatctatttctttttgttattataaggtccaaaatataaaatttctaattgattcaataacttggtattgacacataaataaccaagggctgaaacaaaaactatactcaacggtggtcttcgtttgtagataaacggaaaatatactcaacggtgatctccgttgtagattgtgtgaattttatgtggtcttatcctatttagcatgttgagactactggtaccagtggcctcaattgtacacacccttaggtgtctgtgcgttgcaatgggaaaattgatatgtgttctagcacatcaacaatggaaattcgtaaaataaaaacatccacatatctgctttataatgtaattatgattttacccttttttttggaagggttttaatttactcctagtttggacatatgttatatgagcccaaaactaatgagttaaagaaaataagatatcattctaccttgggtaggtcaaccaactattccctgtgtggctatccactcgtgttccccgttccaaacccacttcttttgatttaatagcaagaatatactacacaagcagcaagtgtttggggaaaaaaaaagagaaaacaaaactattgaatagagtattccgggagcttctaaaactaagagagaatgctggaggtaggaggagagatagggaagagaaatcgacaagggtgccccacttgcctcctaggctgccgcatccccacagagagcttcagcccgcttcaattccctgcaacgttgttgctgcttttgttgcctctccaattaggttggcttgggccaatgcttgcgtgagaactggcccattatgaggcccatttgagttcctaacacgggtgttgcgcaggtccgaaccgcgagccgtgaatcatcagtacgtgttgtgcctattttgaggtttatgtttagtatatgattcgttggttgcattggtttgattttcgtcaatgtgaggtgaacttgctagtcccaatttcttgttgctatgagtaacaacatggtaactacctttgtattgctgcgcaaatgtgtgtggaagggagagatgaaatggggaggagctgatttatttcagtgcatcacctgagctacatgttctgtgtgtttgcttctggtggctgccagggcatatttgttttgttaccataggtttagcagagaaattacttaaaaatcctgattttatcaaagaaggactaaacaaagtataagaaaagcaatcaagtcattcttatatattactagaaaaaatgcccatatgctgcaacgggtgaagcttattttaaacttattatttttatatggtttagttaatat

SEQ ID NO: 1727 - DNA, 646 bp, Oryza sativa
aagtagtttaacttctgtaccaatcaataactataaaggattatcaaggaaaaaaagagcaaaatttctgtatgtaaaaagttctaccttgtcaaaaatgataaggtgatacctgaagttatgtgcatatattatcttacttcgtcgatgcagtaataatctcaaggtaacaaaagaagttacctccaggctccagcttactgaaagtttcagtaaaatatgtaatttcaggcctatgtgacccaagatgacaacttgatcggcacattgacggtgagggagaccatctcatactcggcgcggcttcgccttcccgacaagatgcccatggaagagaagcgcgcccttgtcgagggcacaatcgtcgagatggggctgcaggactgcgccgacacggtggtcggcaattggcacctgaggggaatcagtggtggtgagaagaggagggtcagcattgcccttgagatactgatgaggcccaggctgctcttcctggatgaaccaaccagtggccttgacaggtaggtactgctattatatttatggcaaatcatttgttattacattaattaatggatcatgcaagcatgccgggtcggccaaaggctggccgaccaatttcattaagattgggagaaaataaagt

SEQ ID NO: 1728 - DNA, 592 bp, Oryza sativa
aggctttcacactcacgaagcgatcgttcatcaacatgtcgcgggacttcgggtactactggctgaggcttatcatctacattgttgtgacagtctgcatcgggacaatctacctcaatgttggcaccagatacagctcaattctggtaaaaatttccttcttcagttgtcacttctatttggatgcaaacttacactgaaaagtatctagctaccctgaactgaatacttgatgttaagcttggtgatctgataaaactgtgaaaacaattaggcaagaggtgcatgtgcttctttcgtcttcggctttgtcacgttcatgtcgattggaggattcccgtcttttgtggaagacatgaaggtttgtgtcaccactgaatcaacaaatgggttagaaaagttcttcagattacagcaaaccatgctcacagaatcttttttatgctctttcaggtgtttcagagagagaggctcaatgggcactatggcgtgctggcattcgtgataagcaacacgatctcggcaatgccattcttgatttgatcaccttcatctccgggacaatgtgctacttcatggtgcgcctccaccc

SEQ ID NO: 1729 - DNA, 517 bp, Oryza sativa
gtatattaaaaaacaaaggtagttcttttcttatcgccagcacatctataaataacaggtctcccctccttgaaagtactcatcgggtcatcaccttctcctgattcctaaaccctacacacttgagtaacttgctttgaagtaaaaaaaaatggtgtccttctacctcgactccaccttcctgcctctcctcgccaccaccatggccagcccactccacgcctgcctcctcctcgccctcctcttcctcgcgctcgccttcttccaccccggcggcgtcgcgtgggcgctgtcgtcgtccggcggccacggcgccgccgccatccctggcccgcggggagtcctgctcgcgttcgccggcccgaacccgcaccgcgcgctggccagcctcgccgcgtcgacgcgcggggccacgcgcctcatggcgttctccgtcgggctcacccagttcgtggtggcgagccacccggacacggcgcgggagatcctcgccggcgccgcgttcgccgaccgcccc

SEQ ID NO: 1730 - DNA, 719 bp, Oryza sativa
ttagtctgcccttttttaacaaggtgaatagggatatccacacattattgccgaagataaatttcatccagcacaggatactggaggtggccatggcctcaccttttgtagacgatccttaaaatttgtcccattgacagcaacataatcaatagctgcaggttctgagcccttcagtttgataggccttactgtaccagtgagattgttacagacgctgtagtactgctcatttggaaatatgttctgtttcatacacatacatttgagtacggggaatatcgtcaagaagaaattacactgctaccacttctccacatggtaaaaaattaacttagtacgagcacataactacctctccaatccgaggaaggccatctgattcgattgcagcggtagtgtccctcgaaagattactcttgcaaaagaactccgtaacattatctctactttttgctgataaatcaatgcactcagtctgcagaaagagtacaaaggataaaagaaactaattttaggttttgtcaaacttaaggttcaatctataccaagttagatcatccaatcaagatttttccaaaggtactctctgttggtggatactaaacgtgcatactgagatggcattccgaattgaagaatccaaatctaatgctcaggattattcaaatataaaatatagataggtaaactaattttgatatttggatgcctaggca

SEQ ID NO: 1731 - DNA, 572 bp, Oryza sativa
taactaattatatagattgcgtgtaaattgcgagatgaattttttaagcctaattgcaccatgatttgataatatggtgctacagtaaacatttgataatgatgaattaattaagcttaataatttcatatcgcggtttacagtcggattctgtaatttgtttcatgattaaactatgtttaatacttcaaatgtgtgtccgtatatctgatgtgacacgccaaaactttacacccctagatctaaacacaacctaaagtttagataggatcggtttcccgttccatgggcagtactgcccatactgtgcagccggccggcacagctaacctatccagctgcctgaatcacctggtcaaaaatcatcaactgcttgttattgttagctgggagtctgggacagcttctgcttctccctttccatgtatctagtgtgccatgcttgcaagtaattgtaaatatgcaaattgcaatatatgcagtgtgtgtgttgatcttgatctagctgaccttttctttgtcaaacccgcagcaatagctagctagcccatgtgattggtcctgactaatta

SEQ ID NO: 1732 - DNA, 2583 bp, Oryza sativa
tgtgaggtcttgctcttctgcttgttctcctcttgttatcagggcctagatcaatcctactgctgcttgtgcctccatagctactgtccgtttcatggccaactgcatactcatcttttctgatgggcagtagaactttggacttctttcgtgcctctgcagcaactcttgaaacttcctccgcgttaagacgagcgagtgcccatgggctaatttttataccacctgaacccttcttcctccttacttcatcttctttcctcttggaagtagaattatgcgatgaaccagcctctgacggaataacatcgaactgaaaagaagttgagtagcacaagatcagctagtggcaaatgccaaatcgaaaaaaaaaaagccatacagtagtatcttttatgatcatgtatacgactcatgatgaaacataaatatgcatttgttgtaatataggactgcaattttacaaacataagaggaagttccaaagacgacaagtctaatatagactaaaaattagcaaggctagctaaacaatcaaatcacttaacttcaattcgcatcagcacatcgcacagctacaaaggctagcagtaagatttttctgtacagacataccgtcacttcgaaaggtatgcagccatttatcatttatcataagattcttcaaggttgttacctgatcttcaagaaataatcttggaggagtacaccatgaaccacgacgtcgtccaccaaaggaacttgtactgctaagtccagtgtaggagcttacacgagacatctgtggactctgctgcccaccaacctcttcttgttcttgctctcttatggcgatgatgtagtcatatgtactaattccctgtatgaagttgagaacatgatggttagattcaacatcgcatcacctcagaatgcaacaatatgacacacactggaaagttaacatttcattgtggatgtccttttaataaattttttctaattcaatacataaatattttttaagtgttcaaagggtatgactgtatgagaatctggtgtacaagctgctctaaaaaattatcaggaatagcaacgtagtacctaatcaatccgtggcattacataaaacgggaatgggttaggagttaccttcttgattagaagaatgtgaaaaaagagaagttgcgcaattggcagcaaagcaactatggctagaatggtacaagatgcctgtatgaacaaagatcaacattttgagcgttcaagaaaaaatgtgaacagagtcaactggttctccaaaggaaaggtgaaatagctagaatttgaaagtagaacagccaaacgcaccaccacaataacataaggcaccacagagaagctgcttccaagctttgacacaatttgaatggagaattcctttcgctcaacaaagcagaacactagcaccaatactccaactgctgattgtaggataagctggcccaaagtgcacaaatcatgtagacctgtcaatggtcaactaggatgaaaaggaccaggaataaaatgctctatgcggtaaccatgaccaaatttatatgcatgcaaaagactttaagtgtagctgatgctgggactatggtaaacattatagactaatgacaacaagattagagcactatgcagcactcctatccatacaatcttataagagtaattgtagctgattgaacatgagcttaccaagaatagggaagaagtcatcagaataaaaaacctcatatagtttctttttccaatgcaattgttgagccactgttgagattgaggagaaaaggagagttactaaatactcgctaatggatgaataagaaatgatctgtttcaggataaccttaccctgcagtgatgatcaaaaccatcaacacatttgtcacaaactctgcagtgcttactgtacttcaatacctataaaaaattagcagcatattaaagagttgagttgacagaagaaaagcataactcaagtactcaacagctagaaatacaagaagcatacctcaacttcacagaggctgcagaaaaacattccttcctcactggcttgctgctcagaccattcccgtggttggcagcaggaaaaaacaagatagagagggtagaaaataatgagaaaaacagaggaagttgaactgcagcaagatgggttattgtctttgtagcgagttgttgacttttcactagcagctgcaaactcatgttcttgcttttctccagttccctctacttgcaaccctgaatctgaaatgccatgtctgaattccttcggatgcttgtgtttgccgcttccatacaatcttaggtacttctttgatttcaagacacctgggtcagctgggtctgttgcagcacaccagatgtacatgaagaagacaaatgaaacctgaaaggagccaaaatacacatttctatcataaaggtgttaagtaaatgcatacattgaccataatggaataaagtaaattcatgcagggttttgcacttttgctaagtgtcattattttcttttaaaagggcatacgtgctcaagctcgccatttggccacaacagagtgcctgtca

SEQ ID NO: 1733 - DNA, 3819 bp, Oryza sativa
aaaaccttgacttcaattctgttatgcgttgcaagtgaagttgtcttcctcttttgcttttaattggcaaaacagcatgcttactgaagagttctatggcctatgggcgcatttttctaaaaaaatcatatctgatttctgaacttatctgaagcattgtctctttttgtctcttcaggctcaagcgtagacgcctcacgttttctaattaaaacgagtactactaaagataagcctacatcatcagtggctttcagatgacttcaggtgagtgcagctgccactagtcctcctcctgtaacctgttagccataatgccattagcattggaccaaattgctgagcccaaaacagaaaggttaattactgctcagaaattaaaccgattaaagtggatgatgcactcacagccacaatgattgtgcttatttttatgcagtgatttggaggcctcttttggttgtctgtacgtgaagctcacttcagagtgagacaactggaaactatgtgttcccctcgcgagccctacaacgaagtcgaccgcatcagagagggggaaaaataatggaaattctgatgctgattgtgccttagtggattggtgactcgtatactctggcagcctgatccggaaatggagccacagcattgaagcgacaacccgtcaacttttttcgtttcatcgactctgaatttcttaaacgtccgttcgtctaaaagtctctaaccccaggtaggcaaggcaggtgatcacggctatcaaatcggcgttgttatacgtagctttcgtccctgttcgctcgttttttttgcctctactgcagttcagcagtggccttggtctcatcatctttgtgcaagttggcatgtatcggaccaggaattttcagttcagcagtgttcccacagaatacgtcttggtgcgttcttcttccaaggaactaattcttatcacgtcgtaggcttttgccatttcggcatatcgtcagctgtctcgaccaatcaatcgatctgacccatttgtgctgcaaaattcctgctgtggactctatatgactcattgagtccatattgaatacgatcatattgtttccttcgtcatattggatcagtattagttattacagagatgatgcatggtcgatgacttcatctcaaacggaaaatggacaataactgataaaagatgatggctgatgactgtatatggtttcctcgatgaaaattcaaatctacctgtattctgaaactttatccacttcagtgccgcctcaaaaaggctaactaaaaaacgttcgcgtgcggtaaactcgtgcgaacgcccgtgcattttaaccgggtggtctgctttttctgtaagtttatatatacttaagaaaattgtattggtggtataaaaacttgttaggtgggtacaatttagtatataaacttgtaaaacgctcatttcagtatatgaatttgtctacttcatgtgaacaaggaccaaaataacttgtgaatgttaattttacgaagttgatgttaattaggatgtgacgtgtatatatgtagtaaaaattcataagagcatctccaacaaactctctattagcctatccaagccaaattttagctattcaagacaaaaaaggagctccaacaaactggccaacaggatggccaagccatctggctggccaaactcgctcgctggctggctagatttggccagccaaaacgcctctccaaacggtgggcccacgtgctattcctttggcgcagtcgtcgtcgccgggtcgtcgtcgaggtcatcgtcgcgagccgccgccgccgtcgccatccccgccccgagctccgccgtcgcctcgtcgagcagaggttggcaaggcaagcggccgcctctagatccggcggggagagggagcacaggcgccgccgccttctgcctccccgcgccgcgccgccgcctgccgcctcccctccccgcgccgccgcctgccatctcccctccccgcaccgcgccgccgcttgccgcctccccaacgatgggaaggaaagaaagggaaaagaaagaaagagaaggaagaagggggtagagataaagaggaagaagagtagtagaggctgacatgtgggtccgttgttattttggagaggattaatagagagtctgttggagtgacgatttagtttgattagccaaatcagatggagagttggctatataggggtgtttggagagtacgatttagagaggctgttggatatgctcacatgcaatgtttataaatttgatctctgctttatccttcattatagaaatgatggttttcatatatttctaacatttatatcattgctccttttttaaaatttttctactatcactttatcatattctattttttattgaagaggtgtatatctaatagtaaccttctcatatatatgtttacacagtatcctaattagccactaaatcaataagattagccatgtagtgtcctttttaccttcctccacacgcaccagacaagttcatgcaccaaaaaagcgttttacaatttcgtgcactagattgtacccacctgacaagttcgtgttccggcgatgcaatttactctatacttaattaaagtttatatgcatcgacagcttatacagcgaaagtttatatgtccgatttggattcaaatatttttacatagaactcccatataaagaatttctataagttattatgtacattggtcaggccgatacatgttcacgtgtctagccaacatgcgaacattatgtctattattagaccaacccgtattggtatcacatgctaccggtcgtgttggccgtctctatagaaccacttgtgtcactaactcgctaccactattaactattggtttgcctttgtcttggagtatttttgattgatcggttatatagtcctaagtcagattattatccataggatatcttatatgtatcaaaattaaaaggatgtacaatgcattttttattcaatagaagtccaaagagttttgataaggggatttattcatttcataaaggcttcgacgatgggggtttttcattttttgagcaaaaagataaaagaccagatatatacgaactacaattacaaatgtaataactactataccaacccaaatcatgatcttaaccaatttgaatttggttttctcgtgaaaatcaccacttgcaaagttgagaaccataaaaagcaatattgtaataagaagaggaaaaaaaaggaaccacaagagattaatacacaaattgttgaagcggccctcccgctacctggcatcttgttgtaatttattcaaaacagtccttgttgttctataaaatacaatgtgaagaagacaaaaatttgtttttagggtttgcgctataaacataatgagtacaagggtgcttttgcaaagcattattatctaaccgaaccatcagatcccccttcctggcctcccccctcggccgcaaggtcaccgcctccgtcccgccctcctcagccctcgcatcacggtggcgtcagagccgacgctgacgctagtatcctccttcccccttcttcttcgcctcaccctattcctcctttgggttgatggtctagcaagcaatcctcctgctcgatcattagatatggggtagtaccagtggtggtaggctagtagcagtagaaagtatgggtccaaaggagggagcggcagccaagacgaggcggtggcgagggtggtgctgcggtgatggtgacccttccctccccaaccttggtgatggggacaaccctaggcgacgacagctgtcggg

SEQ ID NO: 1734 - DNA, 21246 bp, Oryza sativa
ccatcgttaggtagagagtagtagaggagacctctctttacgtcggactagtgaatatgggcgcgcagaaaggtgcgtcgtcgcatgtgcccgtgtctcttatccacggccctctttacgcatgcatgcacactctggtcgtgtcggcctctgtacatgtcgccgcccccctgctgtgctaaactccactctgatccacgcaatgcaaaacgcaagtgcatgcatggtactacttggtaccaactccctcctttagtttcttctcgccttttgattttctgcatggactgcagagctagtagaagatgatgatcattgccggggatggtcactgactgactgtgtcgattgatagatcgatcgatcgatctcattgcgtgtgtgtgtgtgtgtggatcgagttttatctgcgcatgcaatcatctactactaataataggctagacgtacaccttcgacagtgagagtagatctccggttcacctcatcctcaatcaaatccaaaaagggagatctagtcgtaagacatgccgggcctcaccaccaaatcgtgcattggatagcacaaatgctttgtgtcgacgcattcggtggcaagcagaacattccagggagggttttgccgcgtgcgcttactgtttgggtgcgccccggcccacaggttaactcaccgagacaaccacaagtactctccatttcgcccatacgtatatgcttcaagcatggtgtacattttcttggtctctctttgttctttcaacttaatttggacatatatatgtatactcatttggactagtgcagtagttagtactactattttactagtatattgtactgtgcagtgtgaacagtgacagcaagtagattatccagtacggcaaggtcgtctaaagacgactgaataagtatctttcagtggaattgaacaggataccctcaaggatttatgcttagctagctgccaaggaatgaacaagcgtgctaattaattagtcacaggagtctgacgatgcttccactgtacacagtctacagaaaaagttgtccgacgtcgtacatttgtaccatgtaactagccaggcaatttctatcgctttctagctaggtttcaaaaatttctatcgctttctgacgacgaattttccccatggttaaccagcggcacgacgacaagtgtctgatgaagcaatgtcgacgaacgacgcatcgttcgtcaaattcgaattaactacatgctagtgtggagggagcgtgcggtgctgtctttttctatttctgcatgcatatatatggtcgcgatcgataatgacatcgttaagcgtattatatggggttagatagttactatttggtccaaaatctcgcttcgaaaacaaagttatcttggttgtcaatttgtcattgtgtaattgttcgtgccaaaccatatgatcagtcaaagtggacttcaccaatcaccggcttggttggtaagcctgattactctgaactactcgcatggttacctcgctatttctaacttgggattgccgtcgagtcaatcacgaaatgcgcatatcgctaagcatgcgagatgtgcagttagacatgaagtgctagtggtatgcattttcaatctgcataggttttcctcgagatgtttggattagatttgtaatcttcttcagaataatctttctgaagagaaggatctacatacagaatttcccgtgttattccttattcgttatcaggatgactttgacacgccgataaaaaaaatcgcactcatctcagtcatgggagaggaggaattacggttagacatttctagagtctagactcagctttcggtgcagactaacctttttttgtcaaatataacgctcgatctagcaaccataccaacagcaaatatattccattgtaacaggaaatggtagcttaatagaaaggctagctcaagctgcttgacatggaaaacgggaagtaacttcgtacgagaacttttgctgtcaagtccaaattaattccttccccgggttaatgatgctccaattaaacaatttccacatgctcaggacatatggatcgaatcatcaccacggatcacaaccgaggcttcgtttgctgatgcgggggtagataatgttcttttctttttgacggtcccaaatgattctacctgtaacaaaaggttaacaagtctgcacacgaccaaagtccaaagcggcagcaggagcagcggtacctaacaccatgcaaaacacaacacacggcctcccttttcttttctccactttgcagtatatttttttgacagcaaacgacgctttacagtcttacagaggccagtggcaggggcaaagcaaaggaggagctgccaaaacgaccgtcatgatcacgagctagagggtcaccgggtcgtcgtcccccgagaaattccggggcatcggcagcacgggcgtgcgtggacaaaaagggtctaacaaacgtctgttctctcccccttctggttcacgtgacagaaaccaacccccgctttgcgcccgtctcggcgtctcccctgtccagccaaaggggaagcttcccggcacttgctccgtctccggccggcacgcagccgcaacacgcaccaccagcgtcgccacagctctagctcctccccttccactgccaaccccgcacgccgcacggtcagaaacaggctaaccctctcgtctcggtgtgtggtggtgtacgtacgcgatcggttgcacgcgcgcgcgcgcgcggaggcggacgcggtgcagccaacccaacgacgagatcggcggtctcgcgcgcgcgcggcgcaccacgccacgctcacgcaacgcactctgcattattcgacccggcccgtaatcaatcatgcagaagcgagggcggcaaccgcgcgggagtggcggtgcacgtcaaaaccacctgctgcttgcgcgcacgagccgcgtgcgcggggggcgccggccggcaggcaggcaggcgggggcctgatcagccgacggggtatcttctcgaacgacagggcggcgagaggcgggagccatgccatattccattgcgcagttgcgaataaaaatgtgcgggcagggcggtgattcgaagtttcctttaacgcgaaccggatcccggccggatcatgcagcacacacacacaacctcgcgcggcgagtgagcgagtgattggcacaaagaatatctgactgactgccatcccatcccatcccacccatccaggcaggcaggcagggatggccagtcccgtcgacctatcatctcctctccccccctgaccatgttacaacttgcgacggcttcacgtggccgccagcccgtaacctgaggtgaactctagtctaatccctctcccagcacacggccggcggtcgctctctcactagctagctaaccttccccaaccacaaagattcattgaatgcggctgcctcgctcgctcgctcgctctcgccgcccgccggccaggttagccgcgcacgcgcgccatcagcggctggcgcgcggccgttccgtgattccgtcgcgatcggttgggtgcgcgcgcccgtcgcgtcccaagggaaagtttggtatcgcctttcccgaatcagccgagctcgtggcccgcttacgtacgtgcgcctgtgacctgtctgcccgcgccgtgtgcgctgcatctatccatcggtcggctcgatccgtcctccgtttcgcgtggtagtatgcccgtggcgcacggaattccgtgtcgagctaaaagcggctcgacaaaggcttgcgcgcgagaaagtcggggataaggcctggctttcactcgctcgctcggccagtattagctggctgcctaagctcctccctctccccttgcaaacgaaacggacaggccatgttcgagaagaggcaggcaaagaggcgacagggattttgccttcgattcagcagttcgcagaggcgcgggctctgctaaattcgggcagcgtttctgccgtgctcgcctctgcctctctctctctcatcagagaatctatcgccgatagcaacgcgaaacagatcaagcccgatactagtaatttgttaatcgcgtccgttagtctacgcttccggccgaccttacaccaacccgacgaccaagttgcacgagacatacaccgtccacgcatctgtcaatgaactactactagtaactactaccgcgtggtgaagtgaaagggtgaaactgctcgggtcggcttggcttggcttcggccagctagccgccacgtctccgccggttttaagtgtgagatccgacgtggaggccccggccgcccccaccgtgccggccgttgtccacctcccgacgggacaccgggccccgccgttgccgcgccgtggaccgacagccactgacgtcaccccatgtccttcttctcggctagctcttctcctcctcgcccgtgaccagcagctcgcctcgccctctataaatacccggccattcgaaggcgttccgactcaggccacacaccaccaacacaaaacatttccttgtccctcgccttcctcgcctcgcctcggctctcacacgacgcctcttcctctcgctactactagctcaagctaagctagcaagagcattccttgggctttttttcttgttcggggttgagaggcaatggcggtgatgactgatgtgtcgaccaccgggacggcactccggaccccggcggcgggggcggtgaaggagggcgacgtcgagaagctccggttcatcgacgagatgaccaccaacgtcgacgccgtgcaggagcgcgtcctgggggagatcctcggccgcaacgccggcacggagtacctgaccaagtgcggcctcgacggcgccaccgaccgcgccgccttccgggccaaggttccggtggtgtcgtacgacgacctgcagccgtacatccagcgcattgcgaacggggaccgctcgccgatcctgtccacccaccccgtctccgagttcctcaccagctccggcacgtcggccggcgagcgcaagctgatgcccaccatcatggacgagctcggccgccgtcagctgctctacagcctcctcatgccggtcatgaacttgtaagttgatactactcctatcattgtctcattctgatagcacacacacgtacaagaagcagatgatgattaatggccatgaatcattgcataggtatgtgcctgggcttgacaaggggaaggggctctacttcctgttcgtcaagtcggagacgaagacgccgggaggcctgacggcgaggcccgtgctgacgagctactacaagagcgaccacttcaagaaccggccgtacgacccgtaccacaactacacgagcccgacggcggccatcctctgcgccgacgcgttccagagcatgtacgcgcagatggtgtgcggcctgtgccagcgcaacgacgtgctgcgcctcggcgccgtgttcgcctccggcctcctccgggccatccgcttcctccagctcaactgggagcagctcgccgacgacatcgagtccggcgagctcacccctcgcgtcaccgacccgtcggtgcgcgaggctgtcgccgccatcctcctcccggaccccgagctcgccaagctcatccgcgccgagtgctccaagggcgactgggccggcatcatcacccgcgtgtggccgaacaccaagtacctcgacgtcatcgtcaccggcgcgatggcgcagtacatcccgaccctggagttctacagcggcgggcttcccatggcgtgcaccatgtacgcgtcatccgagtgctacttcggcctcaacctccgccccatgtgcgacccctccgaggtgtcctacaccatcatgcctaacatgggctacttcgagttcctccccgtggacgagaccggcgcggcttcgggcgacgccacccagctcgtggacctcgcccgcgtggaggtggggcgcgagtacgagctggtgatcaccacctacgccgggctgaaccggtaccgcgtcggcgacgtcgctccgcgtgacggggttccacaacgcggcgccgcagttcaggttcgtgcgccgcaagaacgtgctcctctccatcgagtccgacaagaccgacgaggccgagctgcagcgcgccgtggagcgcgcgtcggcgctgctccgcccgcacggcgcgtccgtggtggagtacaccagccaagcgtgcaccaagcgcatcccgggccactacgtcatctactgggagctcctgaccaagggcgccggcgccacggtggtggacgcggacacgctgggcaggtgctgcctcgagatggaggaggcgctgaacacggtgtacaggcagagccgcgtcgcggacggctcgattgggccgctcgagatccgggtcgtccgcccgggcacattcgaggagctcatggactacgccatctcccgcggcgcgtccatcaaccagtacaaggtgccacgctgcgtcacgttcccgcccatcgtcgagctgctcgactcgcgcgtcgtgtccagccacttcagcccggcgctcccacactggactccggcgcgacggtccgaatagtcggtcaaatccccacctcgtcgttggaccgtgtccaagaatctgaagtagtagaagccggatgcctccacctaaaaacacttatctgttatttttggaattaattttgatggttgctgtcaactctgtcagttagtggcaagagggtacctctgatgtgagggagagaactgcagaacgaacggaagaaagtgttgatgtaagaggttaccactagtagtactgtttgtctgtatcaggaatgtgattataatttaacctgtcctccaaaaccgtacgagtcctgcgcaagatcttgttccaattattggccagacctggacagcttttaggctgtgttcggcacagcactttcagtgggcgctacagtgttttgcccccgcgcacgcttttcaaactactacacggtgtactttttttcaaaaagtttctatacaaaagttgcttaaaaaaatcaaattaatccatttttgaaaaaaaaattaactaatacttaattaatcatgtgttaatgaaccgttccgttttccgtgttactgtagcgcggtgggaaaacgtccaaacgaacgcagcctaagcgtagcgatcagttgcatttcctgattctcctgcctgtagcctttccatttttgctgaaccatttcattgaaggttttcatgggagtttgttgtagcttctatgttgggagattcaagcaaaggagggtaaatttgccgcattattagctcatgaccgtataaggatgagactggattgctttcggcttctcgccatctctcaacaactactgctttcaccttaaaaaattcttgaagtgcatttgattatagtcttttaaattattagcgcaagtgtcgagtagataatcttttctctgagatgttgacacttgattaaactaaccaggctagcttaaaaaaagtgaactgctgaataatgccagaccgaagcacgatcctgcacacggctcggtcgtcaggtctttgctgagtgctgcaaacggaccaacatactttcctgactgtaccatcatgcttttgcgtgtgttcttctttctcttgctttcctgttttccacaagtccaaaagcaaaacagtttcgcctctcttatgtcaaaagcgagggcgttattcgcaatgtagtttgcaagtcgtgtgcagtatcgcgtagaggcttcaaattctgctattggttcaaagtttgcggatgggtcatgaccgagaaaaatagacgcatcccattctttgtttgccatatcgccagcgtctaacttcttgccgtctttgttggagcaatgcagacatgcacctgcatgtaacaaggcctaaatgacgagttgttttttagagagagcccaaatgtcgagttgacaactagtgctggtctgaaaaaagggcgtagcgctgatatactgaacagacaatttgacttgtaaactgaacttccgtgcgatagggccgtaagcctacctgcaaatcttatcgcaaaaaagatcactatccattccatcgcacaggaggaagcagaacaagagtacaggactgcaagtgtatgttgcgtccacttgtaacgtgcccgagtattttttgactctccaagaacaaaacacaaagtcaaagctttagactcctctccgaatccggtgcgtcccgctcgttcatccacacgtatcacggccgctgttacgagatctttgaccccgccacgctgcgcaccagacgatccggtaagatctgctcgtgatttggtgggcggaagacgcctacagtaaaaaagcgctcgcgattcggcagtacaacgtctcctgcccacccgagccgcactgtcccgtcccgtccccgggtcaaccacctcccccgcgcgcaccacgacgttggaccttgcgtgttggtgttggcggtggtggtggattgggctggttggcttccacgatggcggcacgcggtgcaggtcaaggaggccggggtccgaggattcaacggctgctcgcccgtctcgcgcctcacacgcacgcgcgcccgtgcgctgcgtcggaaacgtggccgtgtggccgagacacagccacacagggggcgggttcccttgccggagtcccgcgcgcgcgccgctcgggctacctacctaggcgggggcggcaacgagcgattgcgtgcgggccgcggcgaggttttgcaggagggcgggcgggggcgcggggcgacgtgccgtggtacggccgtgcccgtgcgtgctggcggccgctgcgcctttgaccgttggtctgtgccgcgccgcgccagcttggtcgctggggcctgcacagctgcactgtcactcatgcgagcggcatgcgatggttgactagcacgaatcgtgcgggtgttgcaatcggagaagcagacaagaaccggcgctttgcgtgggaaattcgtccccagggattcatggacacgtcgaagatgtatagtaggtcggccgtcaaccgaggcacggcttgatgacaaactagagacaagttgcttgctcaggtgagagtgtgataaacaataaggtcgtcgctgactgcactttgtatgcgtgtactaggggttcagcctctcagaatgttttgctacaacacgtgattgccccttacagttagggtaaagcgttgagttcgttctaatcaatctgcatgcctctatgtgcacttgtgcattggtgaaagtgataaactgagctggatactaggaactccgggagagtttgccagggtgttggacaggaacgcgtgcaaggaggtgccgctgttcccgaggagcaaaagaaaggctcacattgctgctggtgcccgcttggcaagcaaagtagagagcgaggcacacacgcacgcacgacggcgcgagacggtccggaaacgctgcgggggcgcgtggttcatgtgggctcggccggtcaagggagagccgaggcaatccagctcgtcgcgctgcctgcctgactcctcgtcatgaggtcgcctcctcccgtgtttccctcgtacgggaaactcgatccggtggtcgccagcggtggcttccatgaatccatgctcctgtcttcgtggcggcccgcggttttccgatattgcagcaattgaaatgcctcgtgcagcgagggcccgagcgtaactacagggtatcagcaatagggaacggccgaacggggaggcaggggccgagcaaaaattcaaagtccacactccactacgggcccaattcaagaaggccaccactgttttaggtcgactgagccacctagttgccactcgactcatgggctagagccctaaagaaaacgggaacatcgtctacgtcgcaaaaaaaagtacaccaaatgtcccttatcttctcactaaattacaaaatcgtctctcaaccgaaaaactagatatatgacatccttaaacttacaaaaccggatcactttaggtccttaggtggttttaaacccggttttatccaacgtgagccccacatatcagcgactatttcccctccccctctctcttcctctttcactctcctctatctctctttctctctctctctccctctccactctttctcctcgccgcaaagcttgtggcgaagacaggtggcaatggcgctcggtggccaacgttgcggagacggtgtgcggcagccgccggtgagcgccgtggccgcctttccaccacgaacccgctgctgtagccttttcaccgactagcgggggcgtgggcaactgcggtgtcaccgacgcagcagggaggagggccggcggagaccgttggcggcaagtgaagaggagctgagcgacggcggcgtggcatcaacaacgcaacaaggaggaggggctgacggagagaagcctaccggcggcggcggtggcgtctctgacatggcggggaggatcactagtgaggcaggcgcaactggctccctgccactcctatccccgcttccccgccaaccggctctcgagctcccaattcacaggctcggtgccgctgccgctgacgtcgagctcatctctgtcggccgccattcttccacaatgccatgttgtcgccgcgcaggtgctgagcttcctctagtcttctctcccctcaaactgtccgcactaccgccgccaccggcgttcttgggagccacccgccgccggcccacagccgccagagtcgcgcgcccttctctgcccttcctccccgcacacaagaatgagaggaagaagagagaaaagaaataagaagtgatctgacaagtgggtcccacctttttgttattttattttttttggatcgaataaccacataagcgctaggtcaatacacgtgggatgaagacttaatcaaaggaggcgccacgtcaattaaaacaggcgacaatatcactgagggacctcgtttgcactggttttgtaagttgagggatatgttgtatctggttttttattgagagacgattttgtaattcggtggcaagatgggacctccggtatactttttcctctacgtcgcatcatgacatgtcgcaacgtggtgtgaaccggtgagcgtgcgtcctgtggcgaccgccgatccgtgagaatgcgcatcgcggggtcacgcctcgcgggcttttccttggcggctacaggctactgctgcgtaaacacgataggtggctccaggtctatttggtttccacacatcgaatgtttggatactaatttaaagtattaaacatacactaattacaaaacccatttcataaccttggactaattcgcgagacgaatcttttgagtctaattacgctatgattttgacaatgcgatgctacagtaaacttttgataattatggattaagtaggcttaaaaaattcgtttcgcggattagctctcatttatgaaattagtttttttattagtctatatttaatactccaaattagcgtccaaacatccgatgtgacatgggctaaaaagtttttgccccatctaaggccctgtttagatgggactaaaacttttaagtccctatcacatcggatgtttgaaaattaattataaatattaaacgtagactattaataaaacccatccataatcttggactaatttgcgagacgaatctaatgagcctaattaatccatgattagcctatgtgatgctacagtaaacattctctaattatagattaattaggcttaaaaaatttgtctcgtgaattagcttttatttatgtaattagttttgtaagtagtctatatttaatactctaaattagtgtctaaagacagggactaaagttaagtccctggatctaaacaccacctaaactctcaatgttcatcgactcatgcacacaattgtagactgtagtacatgtttcaggcatttttcggatgacatttttcacaggccctatgacgaaaatgctaatgcgcgactgaccgcgcgcgcgccctcccgcgcggcgaggcacgtggcgcgcgtggagagggccgcggtggcggcagcgcgcagggtggggcccgcgcgattttttttcctttttcctgtttcgttttttctttctcgttttttgcagttttcctttttttttccttttcggtttttcataacatatacgtatacaaacttttatacaaacgtctacaaagtttgtatacatacgtataaaaactttgtatacgctatatataaagtttgtatacacgtatgtatataaagtttgtatacttgtatatgtatacacatgatgtgttttatggttttttcaattttttaatatgtacgtatacaaagtttgcacatgttgtatacaaagtttgtatatgtgtatattttttatacataaaaaatatatacatataaaaaccaaaaaacacagtagtactaatagtagtataacagtagtactagtagtattattatagcagtagtagtagtactgtagtactactagtactagggggcaccgcgcgggggcagcggcacgcggtcagtcgcgcattagcgctccccgccctatgatgttgcttcctgtgctggcccatgctgcatagcatttttaggctttacttgggccgaaacaaatcacagtccatattaagatggaaaaggcccagtttcactcccctcaactataggtcaaatattgttcagattcctcaatgataaaaccgtgtataacgtgtccttcaactattaaaatccgtgaaaaatgactccctccgttgtattaatatggttttcgatgacgtgatatctacatggtgcattgacctagttttcattttacatgactcttgtatcttgtatggataatggtcaaagttgatgaagacatcatgctcgccccaacgcgaccccatcgagtttgagctccatgaaaagagaggcagcggaggtggcgatcgatgagccatatcgagatcaaactcacctacccatccacatggaggcaacgccctgggtcgttgccaccatccatctttgtctttacctattggaccactagaacatgtcgtccttcaggccaactttgtcttcctttgtttcgactggtccagtttcgtcctctctctaaatcgacaaggagatgaagagcagaagaggcattctgtcggtcgttgctcctctaccatggatggaaagggagtaaggaggaggaagaaatggatgataacaatgcttgccaacagggaattggagtccaccttaacatccgatttgtgtgtgcccgccactgccctgctgcctcacctcaacctctcattgccgttctgccgtcaagaaaataagggatagcggaaggggtagggaaggaaggagagaggaggacatgtgggctccactccatttcttaatttatgtgatgattgacatttcatgtggatgctatgtctgcgagaaacaccatcaatattaccgaccaagtcgttcttcactgatattaatagtttgagaagtgttatatcggttccagggatacaatcagattcaacgttgaggcaggcgcattaaaccttttcccattaagatggcgctgcctacgcagctgggcttctgcgtggtgtaaggcgtgtaggccttgattgggccgaagcaaatctcaccgtaacatgttagccacagaatgcatccccatcccaagcctctcagggcgcaggctccggcgaacccaaccctagtccggtagcccccgacgccgccccaccgcgccgacgccgcgcatcctccccgcggccctcggaggcatctcctcgcccgtcgtccctcggcgcctcgccatcgccggcggtctgcctccgctgctcggcggctcgcccgacgcacccacgagtatcttccccttccctggcgtaaaagaaaatctcccgtctcgtctcctccgctctttgcgccgtctcgctgctgaacaggggaggggcggcgatctccatctgccgagcagagcaggagaggggatcctggtgagcatccacatcctctatctgattcatctctctctctcccagcgggactacttttgtctggaatttgcttgcgtgcgttcgttaaccctagcttctcttctagatctggaagaggctcttctcttaatttcagagccttaaccttaatacaagtaacagtttatttgttccccgaaaagtttgcgattcaactgaaccccatgtcccaagttggttcgcccctgacaaaaaactgtacacagaagaatgtaaaaaataggtcgcagctatgattatatggcaatgttgacatgatttctcagaatccttcaacagtggaattgttagattagttttgatgaattcccgcagaaataacgccataaacagtaaggcacgcactggcaatgagagctttggttcccacgttttgaaatcgtctactagatgcggacacttgattgcgttgtgtaaaaaacctcttttcccttctaatatatttacgtgcaatccttttgcgtgttcgcgaaaaaaaaattaatactagatgcggacacaacaatgtccacttcaatgtcgtgctttcttcttcagggatcatcatatttaatgtgaaacagtatgtacagtggtggaaactgtcaatgctgaaatgattgtcctcatgatctaatgtttagccagccagtacaaggattggatttgcactttctgttaaaagcttctagcattaattttgttaaaagctttaaccacaatattctgatttttctacaaatttggttttagttatactttggtcggttgcaagtaccaaacaggattatatgaaaaatatattgaaaatcgttgtacagaaactgatttcatagtccaggaaacaaccaaacaacgtttatgactaggcactgttttccttccttgctaaaacatgcttctcatttgtaaagttagaatatattgtattgattttgcctcaatgttttaaatagtggtaagcggtgcaatgtggtcattccaccttgtagagcttatgcggaaagtggccttttaagcggttttaaagtcgtataccaagacagattattgacatctgatccatctttatttatttatggataatgaacgtaggcttaaaggatcagtaaagaggaaagactcatgaagaaccaactaccaaagaggacccaaggatgaccaaaatttaagtcactgactcaatgtaatgaagcaaaaacataaatgcagtaaattagcaataaagatgttgtgattcacacattatatatattataggttccaaacttctgatcacaccatcatagttcatagaggatagagcaaatagcaaatactaatggcactatggcagaacacaaaagggtacctaagccataaggccaaattgcctacacggtaagcaggccacatatccgaatatgtggcccgcttaaccttgtaaatgcaccgtacagcaataatcggcaaggtctgatgacctgttacgcttatacggccgcataagcggtctgtgtggctgctttttaaaacattgttttgccttcatatttttacgagttactgcaattacttagaacttgcagaccattttttttaccaattgattcatattatctcagagaagctaaatactcctaggacttatatattctcaacttttccgatcttcacttgaccttttggctttgggctgtacttttgtaatgtgctattgccgtattatggtattagtttatttctttatttgtccatgctttctattttggaaacaatggtacatcaataaattccatagacatgctagttataacgtgatctgtacctctatatataaaacataatacttagctccttttaactttggttctaatcctacatttctccaggtcatcatttgttgaaaaatggccacagaagatacttctcacatttctggtagttctgagtcaacaattccattgctagaacagcttgctgaagtatttggcaagctgaaatctcacacagaaacatccttgcaattgcaaaacggcatcaattgggaagatatcaaagcacatttcctgaaccttgagaagtcgtacaaaagtaagtgcgatgaacttgcagagaagcagaaggcattagaagaaaagaaagctgaatcctgtaggcttattgcagagaaggaagctaatgtttctgcaaaagagcgtgctttcctgaaccagtttcaggagctaagggatacagctgtctctgccctttcagaggtgcgacaaaaatataaggtggagcttgctggtatacttgatgccaatggaagcaaagataaaaaggtaagaacctcaaccaatgacatgaatgcgttgtgtgcttcagaggagaatacaactgctagtgggctgggtgaaccatctgaagcttcacctgttgatgttaagccacgtcctgtattgaagcaactatgtgagcagatggatacagcaggccttctgaaatttctttcagaaaattggaaaaaactttctagccttcgtgatgaactttctgctgcactaagatgtgctactgaccctgcacgctttgtgcttggttccttggagggtttcttcccatctgaccatactagttcacctgggaataaacagattattctccaaggccagcgtagaagctgcattattttgatggaagctataacacctgcactagctacgaaggagccaggtgacaaccacccttggagctctgaaattagggagctggccaaggcgattgcagaagagtggaagagtaagctagctgaggttgacctcgatgcttctgatggctactcattggaagcacaggcattcctgcagcttcttacaacatttaatgttgattcggtgcttgacgaggatgaactatgcaagcttgtagttgccgtctctcgtcgcaagcagactgctgagctttgtcgctccctttgtcttaatgagagaataccaggttggtatcccctcagaatgccacaaggcgttcacatcccttaaaccagaccacagccattcctgatttattactaagccacagagctttctagggaattgaaaccttcctgctttatgtgaaaacctggtaatttgcataagtttggaaatttattatccttctgttgacaatattttgcttatattatcaaggaattggttaatagacacaggcaaattgatgcagttcaatttatacatgcctttgggctttctgagagcttccctcctgcacctctgctgaagacatatgtggaggaattaaaagattcacttggcaataatggggatggcaacgcggcttctctgaaggtatggtctttccaccatgtttgagatggggataatttcccaatgtttaggtcacagttcatccactgtactgtttcaccaaggaagtatactattaagcgtagtgcaaatggaccagcaatttgtgagtagtcatacaaacaaaacaattgaagtcaggaatcattgttgcaaggttggttattgctgcgaggattattggattgaattcatcttgcttcgcagatggaaatttactttcaacatccactgtttagtgcttatgactgtaatgcagtgcggacttgtttggttgactgtcaactgcttttctacttgatagtactattgaacattgtagattattgtatattacttcgtacttgaatgatttcatatctgtttcccaatcttcttttctggttttacatttatgtttgtatcctttttcaggatgacccaaagactcgggaactacttgcattgagggctgtaataaaatgcattgaagagtataagcttcagaaggactatcctcttggacctctccagaagcgtgttgctgagctaaaatctaagggtgagaaaaggccattggaagctgggcgccataatgcaaagaagcctcgcactttcggcaattcagctgctcgcaggccaccaaatcctgttggttcagctggtcgcagaccttcaggcccggctggtacttggcagcggccccctccaccaatgccttcctatcctgatcgatatggacatgcagatcggtaccattacactgcaccctctgcaacatatgatcctcctgcttatgcttcttacagcgaaccatacagtgcctcaaagccataccagtacacaccaggctcagtagctcctgcatcatacaactcgaatcagttcaaagtagcttatggtggacctggtgccccgccaacagcaggcggctacggaagctacaacgatgcagcagggcagtctacttcgagtagctattcgggttattctggttaccacccttcactaccaaggttataacttgcatttgctatgctacgctggttatgataaagcacaatctggctatcaatctcgttcagagttcagaccccagatgtaacctttagatatactctagtggattttgtagctgtaactggtgtagatcttgatcttccaaggctggtcgtgtgagaagccggtcgattttagagactttttttttgtcctgctacatgtatccagttgaatactgttgcgtgtacctaacctgttttgaatattctccatgttcagtcttctgtgactaactactaagattggctccattttaattcgccctctgggctctggcgcttttgagtagtagaatatttttttccccttacctttctgaactaatctcttgctttgcaaactgcaatttccttgtacagcttaagatgcaagcctttctgattactttgcagagcctacaatcttgcacgatttaaggatgcaaagatatgagctagataagcatggaacgcatgagcagaagcacgttttttaggatgatgagacgaactctttcacaaatcgcatgtctggtggcctccatgtggggcccacacgcaccccgctcgtctcgtcaacgccactctcctcttccactccaatctcactaggaaaacaaaaaaccgccacttgcgcaaaaaggaatacagctatacgcatcgggatgatctgagccaccgacaggtgggacccacgcgaggccgcccccacctgtcagccggtgccacgcccccgaggcatctcccacacagtgacaaaaaatatactaatcccggacctgcgtgaaccggccggcgacgcgagaattaccggattacccctcgccttctcctccaacaagtcgtcgccctctcgggctcgctcagctctcttccccttccttcctcctcctcggctcggcgcgacgagtcctcgccatggcgagtcgccggtcgcgtcggctcggctcgctcgtgcccttcgccgccgcggtggtcctcctcctcctcatcgcttccgccgccgccgccgccgcgggatcccccgatcgggccggccccgcgcggccgccgctggtgctcccgctcacgctcgcctaccccaacgccacccgcctccccgcctcctcggccaggcgcggcctcggcgatggacacaaccccaacgcccgcatgcgcctccacgatgatctcctcaccaacgggtcggtacagttcgttttttgccctccgctctctctctctcgataatttcccccaaatttttttttcttgggggggttgcgtggttggatctgaggctggatgtcgccgcgtgttgttcgtgctggtttaggtattacacgacgaggctgtacatcgggacgccttcgcaggagttcgcgctgatcgtggactccgggagcaccgtcacctacgttccctgcgccacctgcgagcagtgcggcaaccaccaggtcggcctggattcgtcaaattctctgcttacctgtttgaattgtgtgtgacgatcggtttaattaggattggtgatggtcgcgtgtatggatattggattcccatatgtcaaactgtcgcttgaccattcaggttggacaattgactccagtgcaaatgatacatttttgtcgggcttgggtgtgtgcatagacatttattgttccaaaattcaaagtcttggaaaatacacgtttccatttggataggttcggaagttccagctatacgatgtggataaagtgtatggtacgcaaagagcacctccacaacctgcagggtatattaaaactaaccgagcgacgatgatgtagcttctttttttctcaattgtgaatgcctcagaatttaatagaggtcaacatccaacaaagcccatgccaatcttggtcacaaccaacaagaattactatttgtttgatagccatcattttagccaaattttgcaccattttgttttcaaaccattggcgttcctggttgtcaacagttagtcgattcttctttgttttttctccatgccaaatgagtcccatgtctttcctgagtgctgacaattatcaggcaatagatttgggaagtgtattggattgtttatggcaaagcagtggaaacaatttgtattaacaccaattttcctaccaagtaaacccactgccatgtccagaatacacatctggtattgctatgcaatttgatgtttgttgctcccttatcgttctctgaattttgggctttagattcaaacgtcacatagaaaacatatccatatgaaaaggcaaatatgttactgtatttttcacttctttctgctacatacccagccttttcttgggcaactgtttgcatggttagtcaggccactgttctcttgtagtcctgtataatctgagtagtttggaaatcttccatcagttgtagattgctactattgctgataagtaatagaggagtccacaactaatgggaagcccataacctgattctaaaaagaactgttcttgtcacttgcatagttgcatctttttgacacaattgtatcattcttatcataacttgtgatttttctagattctagatggcaccattgttgtaccatcctcttattctatgtcatgtttgcagagtgaatcacctaacatcattgaggcacatgtaaaagtttaagcatttatactatttaatttatattaatgtgtgtacaaacagtgtgacaatattttggcatgatttctccaatgcgatgtatatcttacgtgataaaaaaagttaagatgtgtatttgatcatacccattgagaaaatcacctttttcccacttgaagtttcctttttaactatctagaaatcaactttctctagtatacactaaagtttggcatgttgtaggatcc

SEQ ID NO: 1735 - DNA, 1718 bp, Oryza sativa
ttactcctactttgcaacacctggttttgcatgtgtacgagccaatctgtttggcaccttttctgctatcttggttgtcgcattgcagattcttttcattttgtttttattcagctcttcattgtcattcctgaaaatggaaatctttaaaatggacactcctggaaaagtatgctggaataattatgtttttaatggataggtgacaaataaagtaaattctctgaagaaaatccgtggcccagatccaaattataaagacatctgctttgcaggtgctggaaggtaactcttgcaccatgataacaatttctaccccctttgttttcatcatcaatgttcttatcttatcactttaccttcaggaacgtctcccaattatcagaggtatttccagatgttgacatggtatttggaaatgggcagaagctttcgctttcacctgaaaactatttgttccgggtatgagaaattccaagcttagacctgttctgatgaattatgacaccccattacttttttgctttgcctgttgttgagttcatgttttgtcttctcttctttccggtttcaaaataaagcattcgaaggttgaaggggcttattgcttgggtgtgtttcagaatggaaaagatccgacaacactattagggggtaagatcttcaactcttggtctcttacgaggaacttcaagaaaatttccattggacttcttttatttatatcatctgactacactatctctactttattcgcatataacttgttactagtgtatgctgaataacatttgcacctgtactatgagtctttgaccagcttatacactcgcgtctgctggaaacttgagtagaaaaccaagtaactctctttgtagaaaatactactatataacaatggtctccttatctttttcagcataaccagctgatgcacttttcaatattttttagatataatctgaggtaacttttgtgtcagtgtagcttgttccttcatcactatggcaatttcttggctgcacttattcaatttcgtaatccaatagtttacgtgtgcaagtatgcaatgattggtgtgtaatccgaaaaccatggctgtgaaataccaacattgtttatcattttatgaatataagaatgcataaaccctctatttttttcatagataacaaacatgcaattatctgtgaacaatccaaaaacaagcatccttaagagttattcctgatttcagaaaatttgaggttagaagcaaagtgttcatggaattatcagttaaaactctaaaagtggttgagcctacaaaggaggcattctctttattaattgccggttgcaagccaacatacggtattgtaccaagaaattttttttctgccaacagtataatagaccttggctgcttgttgtatttatgcactcttttgtctctaaaaggaaagtatggtgtttttgttctcttctctatcccttaaagagtcaagcagatcaatctttagagagatttatacttttcttatattaattttgaccttttatttgatttatagacagtctacatgaatgttctaatagtttgcatggctctatgtactttgaaaccttgcccgctttgagtgtctaaagaataatgatcttactggcaggaattgttgtccgtaatactcttgtaacctatgaccgtcacaatgagaagattggcttttggaaaacta

SEQ ID NO: 1736 - DNA, 1473 bp, Oryza sativa
cggtcgaaagaatagggatgtaaaatagacttattttacctatatatatgtcagcccaaagaggagggacggaaaatagacttattttcactatatatatgtcacagcccaaagtggagggacggaaaatagacttattttcgatatattatgtcacagcccaaagaggagggacgaaaaatagacttatttaaaaaaaggcacgatgggctacctgcgccttcgggccggtccggcacagcccgacggttggtgggccgtgcctaggcgggaggcgcatcccatgggccgtgccggcccggcacgaagtgccgatcgggccgtgccggcccgatggctggtgggccgtgcctggctgtgcttgggcgcaggccgtgccgggcgggccttttggccatctatacacactatttctagctttattttatgcgctgatgaataaggtttttctcctgcttgcagaatttgatgttggcctaatcactgttgatatgtccataaatgttacttatccaaacctgaaacctcacctccatgagctggctgagcttatagctaaagagctggacattgactcccgtcaggtaagggtgacccatagtctgtgctgttgtggtttttctagttttgtttggaggtgatgcgtgagggacactatccttgctattgtttacagctttgcaccatcctatcttgatagcactagcattcttttgaagtgatttgttaaagttgcctcttgagtttgacaggttcgagttatgaatgttacaagccaaggaaactctactctaatcagatgggggatttttccagctggaccttctaattctatgactaatacaacagcaatggtagcatccactcttgcacatatgaggactactttaatctatctgttataaagataattgatttgctgcattgatgtatgattagggtatcatttatcggttgacccaacatcacgtccagttgcctgaaaatcttggcagttatcagttacttgaatggaatgtgcagcctttatccaagaggtaagcaaacaccattataactgccaagattatattgccattaaaagcttgtacagtccatattatcataataagctctgtctttatcattggaattcaactctttcttttcattgaagccctgctttcatcctgatctaaaatgacaaggcaacatcccttcgacatcctttttgcagggaaaaagtagatacatgtcactctacactagcctgtttagagatataccattataaactataaagttctctctcccaaacactattcttatactgatcagtggctttagcgtgtagttgtagtatgcaatggggctgcctggcaaacatggaaaacctgaatatctgtcaaagtgcttaagcaagattctcacatctattaggaaaaatcattttcaccaattcccttgaatatttcttgtgcggcatcgatgcat

SEQ ID NO: 1737 - DNA, 10085 bp, Oryza sativa
  unsure (1)..(10085): unsure at all n locations
ctgcagcccatactgcttggaattttgctagttgttttgctgactttatcggcccttttagtactgattgtctggagaaagaaatttagaggtcaagcggcatatagacctgtggattcagcagttcctgagcaagagctccaaccgctataatttggagtggttcaacggagtaaacatataggcgattctttggtagaaataccgttgtgcgggctgccatgttgcagcgggttcacatccgctgctgggagttgccctttttctttgtatgtaacacaagctacaagcttacagaagaagcacaagattacataacttctcgattcagcacttagagcctctgttcataaactgtctagcgattcagatcaagagcttcctcttgtagcttacagtagaagaaggttttgttcgtgtaatgtagattaagtagaatagagcaaggcacaaaagcacagcagccatggacggaatgttgtattatctagtatctgataagtgctgaggatattcggcttctacagtgttttcacgtttcatttccatgctccttggtaaaaacgtgttctaacttttgttctagctcataactggcaaagagcttttgctttatacccatagaatgcagaaattattattgatctgttgctggaggcatttgcagcccaacatctctggctcgtcaacgtggaacccgcatgtccatcggcttcccgaccgtgaacccgccgtcgatgacgtggttctgcccggtgacgaacttggcctcgtcggacgccaggtagacggccgccctcgccacgtcctccagctccagcaccgcgccatggagctcgctcatccccctctccaccatctccttcagctgctcgtcgctgacccccgggttcatcctcgccagcgaccggaccagcagcggcgtcgcgatggcgtgcggcgagatggcgttcacgcgcacgccggagcgcgccagctcggccgccgccagccgcaccacgcccaccaccgccgccttcgagaggctgtacggcagcgccgcgagcccgccgagcatgcccgtggtgctccccgtgcagaggacgcagccgccgcgccggggcaccatgacgcgcgcggcgtgcttgacggccgccaccgcggaccgcgcgttggccgccatgacgcggtcgaagtccgcgaggtcgagcgacgcgagcggcgcgggcgccgaggagcccgagatgccggcgttgctgtagaggatgtcgaggcggccgtgccgcgccacggcgaggtccaccgccgcggcgatctgcgcctcgtcggtgacgtcgcagcgggtgtacgcggcgtccgggcccagctcggccgcgacggcgcggccgaggtcgtcctgtatatcggccaggatgaccttggcgccgttgcggatgaactcggcggccgtcgccttgccgatgccgctggccgcgccggtgatcaccgcgaccttgccgggtaacctctggcaactcgaggcagtcgagaagtggctgcccaaaccacacagagctcccatagctccgctcttctccctcctgcattgatccatccacatgaccatacatcgaacaagcagcaagggaaactgatcagcttcttgttctttccaagaaacaatcagattcatcgcacgcaggcatcagaagaacgtgctccgtacaagaaacaatctccatggaagctgaacaaggtagaaaatgatatttgataaaaaacaggagagtagaaaatgatcagaaatgagagacctgacaacgagttgcgttgctctcaacatccttcacccacagtgctcttcagtgttcaccttgagaaaacttcagtttctgtggtgcttgcgaccgagctaggtgatgaaatgcaggttgtagtagatcttggcacggttggatcactactgatggatcttggcatatatcggaacgttttcttgtcgacaaaaaaatgctcgtgaaacacctgtatttgaagtccaaaacggagcctagctgctacacgtcagtacaccattgtcagctttcgtctgaactgatgcggcacgtgtaccccacattctatccgatgagatggtggcacgccacctatggcgcgtcgtcgtctgcgctgcttgaggtgtgatcaaattcatttacacacaaacaaaatcagcttctgccggaacgagtcgtcgaaggtttggatcggagctaatcgttattcttttagaatttcaccttcatatatacctcatgtaagctgttgttcggtgttggaaccttgtggagatattttattggttggtggccgtggttttttctcttctgctttgaagagtttttcacgttaaatcttgtgtcttctgtcatttattgttttttatcgtttgtttgactattattttctaacatcggaaactgcttgctccaaattccaaactgtttgtgtacaatttcaggcagtggttgggttgggcgtcgaattggacagcgtccagattggtccagtttgtggaggtggatctgacgaatggttcccgtgggtggtcaacgcaagttttcgtcgcgagacaaatgatcatttttcaagcaatcagctagcattggttcatctgactagctagtcttaagttccgtaattttcattttaatcgcactaactgcgagcagtactccattgaaccagtagaaacttggatgaagcaagttctccaaaagaaaagcatactcgagcccagggcgaagctagaaggaaatagatggtggtgtcacttgtttaatttactctactttagatcaagtttaagctgatgcggatgcctaagtttgtatttagagggtacatacatgatgaaaatagatgaggtatagctaaaaaattttcttgaccaggtttctgggcacccccctaatatatactagctccgcccctgctcgagccagatgatccaggtctggtttagttcccaactttttctttaaacctccaagttttccatcacatcagaactttaattttctatatacataaacttctaacttttccgttacatcgttccaatctcaataaaactttcaattttagcgtgaactaaacacaccctcattctcaattctgttgcttaaaaaaaataatcaaaagtaacttgtgtgtttagttttcaacgcctaaanaaaatttttggggggggcgatttggtgaattgaacgattaatggaaaaattagaaatttgtgttgtaggaaagttttgatgtgataaaaaagttgaaagtttgaagaaaaaatttggaactaaactcggcctagatatcagagcgatatcagagcatactctggacaaagcacaagacatatcttagacagacattcttgttttattccactaagcactaacacttctcaaagaaccgagatcgatcccaacgctatcaatcacactactaccacggatcggctacacatcgtcacagtgccagccatctctcgttgctcacgggcacttgggccgtcggctcttgggggagaccatgtcgcggtagcaggggcactcgtccttgctggcgtacggccccgacggcacgcagccgccgcagtcgtggcagcacatcttgcacagccccatgcaccgcccggccaccttcagcgagcaccgcttctggcacttggcgtcgcacacgctatccgggaccggaaccacgccgccgccgccgtctgcatccatccgcgaaatgttaacaattttagtactcatctcctgccaagatcgctggagatcagtgtgtgtgtgtgagtgaattggatggcaagtttacctgcagcgacggtgagatcctggaacgaggcggcgaccaggagggtggccaggagagccgtggtggcacgaagaggaggaaccctcatcttctcttgatccttttgagctctaacaaacacggtgaggagatgagtgttcaaagcaactgcagcactgctactacactggtgcagtgaatgggctgcagagagttgagagagatgaatgggtgtgatttatggctggtttcaaggaaggttctagctggctggtgaattcattcatcaatagtttcaattcaattcaattcaatggacacacctgccccagtagcttctttggtgtgtgagcaagtgagtgggggaatctcgcagggggagggacggccatgaatcatgaatgccatggcggacaggtggccttgtcgctatgccgcagtgttcacgcgcatcaccggcttgctttcccttttgtcggcctcgtacatgcatagtataccatgggcggttacttgcttttggatcttgtgcttatcagcgtgtgtgtgcccaatggtctatgcaatggactgtaacacagtaacacactactaatactcacgtgcaatgcacgttttttgacaaaatatatcgcccgagtacataattgcactaaaaattttagaaactacaccttctgaagcacaacctatttacccaaaatttataaaacatatcctcatgtaattggaatttgtaacaataaaaataaccattatcagtacatagttatttttagctaaatcaaaaatgcaaaaaaaaaggtatcaaagcaagatattgacttgtcattctcttaacagtcatcaatataaccactctcaggcatactaccagtatgcggaccaaaaccaaataagtaagatcatatagaccttgaaatggggaaacaaaaatattatatatactttggatttatttatgtggttatacgtcaataatatgtcctaacaaattcagatttgaattaagagcacagtcgtggcttcttgttgtgcatagtagaattcgtggcttcttgttgtgcatagtagaatttaatgggcaaatgtgtaatcagattttagatggataggtagtgagctgtccttgtgagactgagcaacaaaattatcccttgtatatgagccacaactatagaaacttcgaaaagataaattactgagtgctaagaagcctgcacaaacaattaattatgcacaaacaagaaggaattatccatgttttatttggcattgcatgtctgcaccagcataaaactatcactgatccttttcacttgttagtcatgatccagcattccagctgctaaggacttacaattagctgataagagaacgtaacaaagccatactattggatcacacgttcaacacataacccgtgttaaccaaacaaatcaagattggctcacttctatgaaaacattatattaacgtaaattatttcaaccaaaaagaaggaatagaaacaaccagtaatctctttaatgcatagtagacaacatcagatgccatggtgtcctcctgatggatttgcttcgacagcctacacgtttttcatgcattttttgtaacctgaaaagaaaagttagataagtttgctagatatgaaaaagtgatataaattgtgatagttaatctacatgttgactaagtttgctaaacatttcagaatctagaacacaccatgtatatttaaggtaacatagttgattaactatagaacatctacaaatagtgcaattcatgcaatagtgttctatgtaaaaatatatggaacatgatcctgacctcagattgtaagtccagaacctctatgctcttactcattgcaagtgcaagcagctaaccaacatattgccgttttttgctttgagtatcttgtaatgaacgtgtgatacaatgcaattaactgctgcaagttggaagtcatgatccaattttaaagaactgcaattgattgataaaatatgtgacaaacggaatacagaacaaatattgaggtgtaaaaaccaatttgagaagtagaccattagcaatatatggatttgagatctatcagacaaatatgaatgtggtacatgttcttattcagtttattacgactttgcaaatgaagggaaatatggtgtgtattacctgtctttgcatacgattatgatgtagagcatcctccgttgtctattgaagtaggccgaggcaagcagatgattgactcgaatacttctagccacacaagtcaaatagctcccacctgacaatatcggtggattatttggagcaacaaataacatcagttctaaaacctgaaaccaaaataaaaaaattctgctactgctgctaacatgtggcatttagtcaaaataaaaagattagccactaagtgtgattggaattttggtactacaaaatcaaacaatgattctttgacaacttattgcttgtattattaagaacctttgataccatcaattttcaatctgctgcagctcctgctacagtatgcaacaaagtttctccaagccaagagtttcagcctagtagaaatcatacatatatatcaatctgaccaggaaaacacatttttttattactgaaatgatttgccaggttggccaaaggattaggcccaccaaatttattaagatttagggagaaacaaagtacaaagtactatgctgtcgaacaaaggtatgaggcaaagcctcagaccacaataaacaactaacactaataaataatcactgcaggataaaaaatgctagccgacttccaaatcgtgatctccttgatgtctccaaataattgctctgtaggtctagacctctgctcaaataccctagcgttctgtctttccagattaaccaacagatcatcatgaacagaaagaatcgaaattatgcagttcaccatataaacatttggtctttgccatgaagaagaggttgtaagccgatgagaaagtaaactggccatcacctgttagctaccaccgaatggagtcgtggctattcctggttgaagctacaccatctgaatttcatcccacaactgaaagaactcaaccattgctctgttggacaaggaactctacaggtctctcacccatcagtgattcaccaaagcctgtgccagcatcaacttggatctgcctacatatgatagaaattagtgttagtgccattgccacgtgctgcaccgtggttggaaaaattgcttgacctttctattccaagcttggcatgccattttagccatagtgcttggccaaagaagtctaaatccagagttgatctgctatagagtgagcaataattaattgagcaagaaagagcctgcatagaatctactacagagttcatcagtgtatgcaaagaaattaacttctcagaaaactactgattgtggtgaaaggataacaataggattgtatccacttgaactgatagctagatcgaatagtgtaaatcaagccatagtgaaagaaaatgatgtacattcagattcagataatccacatagaggactattgggctgaagaagggaatcggaagactcactttcagctgaagcactctacactctgcactctcacctgcaaaagagaggatggcacacgtccgtgagaaccgagtgcgtggtgtgggcagactatgaaccttacaacggcggcaccactggaggcgcggcagagtgccgttggaaggcaggaccacagggccgtgacgggatggtgatacgagccgaaaggcatattcacgggggagtcgactgtgtgcggcagcggagacaggcttcatgacatacagatccacggcgccggcgagggcagggcgcggtggtgtgtggcggcggtagggaggagcggagcgaggagcgcgcggcggagtcagctccgttgggggcaggccacgatggagtgtgtcagcggcggggaggcgcggagcacgctggagtcagtggagcacgctggagcgtcgtgtagtcatcacgcgggggatggggccgaggtcggctccggtcgcggcggtggacctcagcgccggtgccggcggatggggccgaggtcagaaccggccgcggcggctccggctgcagggaagaagcagcggctctggcggtggggatgcggcggcagtccacacggggaagaatcagaggctccggcggcggcagtccatgcggggaggatatccagcgaggatgcggcggcgcagcggcagaacatccggggaggaggaggagctagcgaggaggaagagaagcgaagtcttcgcgtgtggagcgatgtcttcgcgagtggaggaggagtgaagtattcggcgtggcgtggatggatggatcatgcggtggtgaaatcaagcgcgcagatggacggtagagatcgattcgagtgatttggcctgtaggattggagggggacaactgcttctttttatattagtactagtgatcgtgcacgtgcaatgcacttatgatcaatatttgattgaaccatctacctacattgatgtgtagaatgtttaaaatgttttatgtctagttgcacacagttaatcaatgttttatgtctagttgcacacaatgttttaaaatgtttaaaatgttttattgaatcttgaacaacccaattaatcaactttgtataaataatattgtaactccatagtattacaaataagcaagtgctaactgctaaggatctaacaataagaaacaaaaactctaaatggtcatctcttaattcgtatgatccttgttttcaaccattttttatgaacatgaaaaatcctagaacaatactacatgagcaaccaaaactccatttagtgtccatagttctcacaagctccatttatcctttaaggagtgtatgcctgccattctgtcccaaaggaggcttaccttgctccaaaacagatttggtccaccaaattatagttttcacagcgttcagtgtcactgacttcaaataatagagcttcttctccttaatctctagtgatggacgacaacttgcctctcgatcactactattgttagtggacgctaccaattggacaataggactcccaatatcacttctgtcaagagtaccgatccaaccagtttattgcataaaccaacttcaaataccagaaatataatgaatattttcatgattagtttgatccggcacctcaaaaacttccttcataatctacagttaatttccatagtttagttatgagccttcatgttgtctatatcggggatggagattaaatttaagtcatctacattagaagctatgaaatttgataaaaaaaattaggattcctaaggatgatggtaactaaacttattcaagataaggtggcaactggagatttgattataaaatttatattcttgacgaaagctatatataacttaaaccaggtcacaaaaaatgattctttattagcaaaaaatctactcaataagacattagacatactttggcattccaaaatacttagtagtttcttccagattgctacatttatagctaataaggaagacataattcaatacaaatactgagagtgcacaaagtgaactggagaagtaaaatatcatctggtatgaaaacagagttcacattattccagtgctaaaaaatagttcacgcattgtgtgaaaaccataaggaaaagcatttagcaaagttgacaggaaaaaatgttttccccaaacaaaacagtatcaattggggatttaaatccaaagcgtgatcatttacttcgcttcagttattcactttgtttattaaactaatatgcatgaatcaatttcactctgtttgttaaactaatataaaggagtcaccttgcatattattattccttcaagcctcattactcctcattcctttctgttgactcttctcactgcatatgcacctgatctcccttgcacatgtaaaataaattgaccgagccaagtatcaatagcatgaatccaacaaattcttgctatagagctgtatataccgttttccacggctatggtgcaccatatattcagatggaaactaagatctgaactaaattaaaaaagtgtgaacttgcctgtgaacaaattgtacaggcacaatttaaatactttggaaacagaattgtgcaaaaggaaaaatataataacctctccattatggacacctgctctgcaacgggtaattgtctaaccagacagtaaatgcaaaaattggctgagaacatacaaatagt

SEQ ID NO: 1738 - DNA, 735 bp, Oryza sativa
  unsure (1)..(735): unsure at all n locations
ttagcctctgctccttccatctatctctgtagatgttccattcttctatggggcacctttatactctcgtgccagttatccttaaaccatgcccattcattttagaagtaagagctaaacaaagtttccccccaccctatttctacactcttaacaaaaatttagcctctgctcactatgccatctatatctgctgcgttcagcttttctctagctatagtgccatttttctcctatgccaaattgccagtttattatcgagccatatcatacggcctcttctacacagtatccaccctgttttgagttgatgttaaaaacagggatattagttatcaagcagaggaaccagaagactgttttatgtacatttaaactctgaccattgggttcattctaaaattgccaaaatctccaattaagacccaaaaaatgtgtttttatgtgtgctgacaggactaatatataataaagcacaatgggcaaatattctaattccagtaacaatgggcaaatattctaattccactagatgactagatggcaaataaccattacctgttcgcatttacccagatnttccttatctccagtgtaattctggaaaaaaacgagacagtaagccaacatagttttcagatgagatcacaacaaggccaaacattgtattaccttgagaagttccatttcttcttttgtaggacagaactttatgagattctccacttgatcaac

SEQ ID NO: 1739 - DNA, 1992 bp, Oryza sativa
cttagttttctttaaacgaggtcgctaactgccgtgtacggatgtcacactctgttgaattttgatatgttggaaaagataattcagcatcttcttgggagtgaaaaaacaaagatgaaattccgctataatttggcaccttcttgagagtaaaaaaaaataaagatgaaattccgcatagcaatttacgggaaagcaaaatcatgttacatattgatttgtgcatcatggagtcatttgaagtagccagtagccaagtattagttttttcagattatttaccggattagtgaaacgaattatttgctccacactttataaaatagattttattttttaaaatatatctactatatttcttaaacaatttattttaagttatttcgtaagtttatttattaaattatttaatttgtttctataatttattaaataattcacagcaacaacccgctcaattatctgtctcaaactgaccgctcagatcaaaaatagggagaaagtgagtgctaattttggctattgcatggtgcctttctttgccacattttgcagggtacattggagattaagtagttgcattgacttgcacactttatgaagatttgtatcttagtacactttgcagattgcatgtgtcttccttgctatcatagtttgagtatttcttcatatggttgagcattgatagtgatagagttataactcatgaaactgaatttggagctattattatgtacagtagcctttctttatttggtttggtggcttattgcaatttatcgtttcctcacttttgtacgcaagcaccacattatatcgctacatacaaactatacatcaccttatgatgaggacactaaagtaaggatacttaatacaaaatgttttgtagtctattcaaaccaatgctattattgcacatttattttccaactggcctctatgtttttttttttatgtcgaagatttaactcctacgaaataagtgcaacactttcatatacaattatatatatattttttaaaaaatacaatggtatgactctcaacatacggttaaaaaaaagtggcttatgccatattgagatagtcgaccacatgtataaagtgttagaaactaactccatgaattttttttccctcatgtagtagggcttaggactgaatttacatgtacttggactaaatttgaactgtttgtcaaaatttgttaaattttcaccagtaatcagccgtatccaaacggtttacgtaaaaacttgaacgacctgtttggttggaaggagttggtgatggggaatgggagtttacgatacttgggagtttaagtctgtagtttggttggaagacttggaattcgaggggtttgggatagggaatttaggggtttaattcccaccaagacatgttaattcgtgagactggaagaggtttttccgaccggctgttgggttatgtttaaagctgtaaactctcttgtgtatagagaggagtccatggatgacaaagaggttaaaaccgggtcgcgccaccacatgagcccccaccgtgacaggctgcaggtccagcagcaacactgcacagtcacagtcactgtcctctcctccactccactcctcttctctcctcgcagcctcgcagtgtggaggaggagtagagcttcacgtgaagcgaaatcccccctcgctttgcttgcttccttccctcgctggctggctactggctactggcttctctccagtaaatctgagcagagctgcatttaatgcccccctcctcctttggtctctcctcttctcttcttccttcccttttttttttctcttcccctcctctcgtagcccacgacggatgcggttgcgggtagcaggggatggagggcagatgaaacccgcgagttcttgattcttgggagaatcaccccgtgctcctcctcgcattgatcgcgagaaaagttgttcttttcttggtttcttcgttctgtttggg

SEQ ID NO: 1740 - DNA, 7892 bp, Oryza sativa
aagaggaatgcatgctattaacccacattccttctggccttgattatttgttgcattattttgtcagggaaaaaaggctgatgcactgattaaatatttcggcgaagatcctgtacgctgcccttttgagcaaggtaagaatttttatgatcaatgtgacttatttctaaggttgtgcattcagcattttctttttccgagtacctgtcaaggatcaagatactgtcagtcgtgtgagcaccccccactataagcacaaacacattatcatgaaaatcattcttatttaaaatatttcaacccataaatatgtaataccttgcaaagaaacaatttaggataaatcattttctgtagtttgcagctgattgagcatatcttatttctgcattttttatcatcaacatatgtgtttgcttgttttggtatgttgcttaactcttatgttgatcatgatgttgcagttatctccaccctcttaacatttgtaacaatgtttcggaaagcacatgaagagaaccgcaagcaagctgagctcgataagaaaagggctgaaaaagaggcagaagcagaaaagtctaaagcacagttggctagtaaaaatgtattgatccttgacctgtatctttggcaacttcagccaacctcttatatccatcgtatttataaaattcaaaatctgctcacaggactctaaaccatcaaatccaagccggcaagtgaaacaaacgccagatactaaaacaagagctgcaagcagacgaggaaaagatgtaggttgatctccacgaccaactctgttgttgcgcttatgatctgcatgctgggcgaatgcatgacctgctcgatgcacggggagggcaagaaaagttgtgtaaatgatgcagccatcaatggaaacagcatggctgcaccatagcaactgtacatgacgccctttacggtaatgccacatgtgtctgttgcttaacaatacattgataaatgaatcgtataattttctgacaagtttttttttttcttattgcagttcgcactagcgatggccggttttttctcttcggccagcagggccgcccagtggcaacttctgactgctgtaaagaactaacactaacagcaaagctaacatcattcgttttttcctttgttttttatgttacttgtccattctttctaaccccagtggccaagtgcagccaatgcttcaggagtagagcctcgtagtatcgtagtaggtaggtagaaattgtacaaataggaacagggaaagggtagggaaaccatgtggggcggagaaattgtagctgggatctatacgagatgtaaacatgcgtgtgcttcacgaatatttttttttgtagtgaatgtaccaaggttttcataattagtgaatgcagcagcttttccatgatcatagccttgtgtcgttgagttgtgactcgatgagctaaatttcacccttgctggcgcagtcacctcatctgtgctgcattagcttccctaattactgtgggcttgtttggcacagctctagctccacccctcatagagctcagctaaacagtttcagctccaccaaaactaagagtggagttgggtggagctttcttacaaaatgtattagagttgtggagctaggtttaggcagctctacaactccattccagactcaactccagttatatttaggcagctctacagctgggtttaggctggaagtagcatccccccaccaccgcgccttgcagcagctgcgggatgaagaaggcctggaacaaccgcatcgtcggtcgcaccctaatgaacatctcgcacaaatgcgcgaagatggccagcgtcatcacggcattgggtgcgagatgcaaggcatgaatttcgtagaaatccagaacctcatggaaaaatctggagaacggtggaatcaagcccgtcatggcgaaggacaagaggtgcacggatcgctccggatatcacggccgcggccgcgactctcccgcccgcatgacggcaccgtccgacatgatcttgcggggaaggctaaggtgcctgtctgttgtgatgcgggaggaagggagcactgcgtcaccggtgtcttgggccatggcaaccggcggagaggtggcggagagcatggggcgcgagacggaatggggtggcgagaatgttagggttcgagaagcgaaaggacgagtgggcggttggcgaagggaagggggcagagtctccgcctccgcccccttttatcctcgcctcatccgcgctcgcctcctcgtttcgcgctcccatacttgcccccacgattctcacgcccgcatttgtctcttcgcatcctgcgcccactcatcacatcgcctgttgtatccgctcccgcctttagtgcgtctgttagtggcacactcgaggtggagtgcgcaatggccatgagcgcaggttgagcaaaccgtcaccactaccgccgcaggagtagcgagcgagagaatcgaggcgtggtctgactgaccccccccggttatcgcgcctcaagcatcttcatcatgagggcggtcagtggcggtcaaaccgttgttatggttggcacgccaacctggccacgcggccatatccttttggattccctgccgggcccacaaccccagcttgagaagttgtgaggcgccatgtcagaacgatctcaggaaatcgatatccgatatagcgccgggggctactgtcggagatatggactcgggggtatgtgaagtagaggggaattactttccctccggccacgtgactctgcaagttagccccattcacgcttcacgtgagtcatggaagcggcggggggagggggggagggagggcctcggggcatggcgtcaccccctcggctatcccgcggcttcgccccgaggccctcacccggctgccacgcggcggagggagagagcgagaggggagcacaggctgaacagccataaatgtgcgacgccccaactgtctctcaccgcatttaatgcggtaagggcagacgtgcggcgcgcctagctaacctctgtccaacggatgtgaccggtctgtgaccggcctgtcaccgtcacatccgatggatagggcaaccatgtcctcacgtcccccttgttcccggtggagtgggggtgggtatgacccgtcacgtccgagcgtcactcgaggaagggctgtcgcaagtcatcgttcatttatgagggaatgacagggctgtcccccgtgtcaggcggggggcggcgtcgggttccactcgagaaccggttgttgcttagcttccgggagaaggcacggtttaaagcccaggaaaagtggagtaggatccccctccgagagagggtaggtagaggcggcgcatgtggtatccccttgagctataaaaggaggaccctgcccactgagacaaggggacgacgcccagaaaacctgaactccagaagagaggaagcgagcgcgctttctagagtgaagaaacctttgtaaaactcatccataatcccaaatacaggagtagggtgttacgctccatagcggctcgaacctgtataatccgactgcgtgcaagcttgccggtaatcttagggacgagcgagtgatttccgagagacgagcctccgcccccggccgaactcacaaatggggggtctcacgattccccgctattgaggatcttccctcgacagattcttaacatgatcttcaagctcttggaaattttcctttgtgtctatcttacttctaaatcatatgttttctttgtgctccatccaaacagtttcttgtgttttcatttcttaggattcgaggtgtgataacatttgaatcatgcgtatttcctatttgtgtgttttgagaattctgagttcgaaaggaactctaaataataattactaccgccttccaaaatacaagagattttgctcatgtaattatataggcaaaatccttaatattctcggacataggtagtatttacaaacagagcaatggtaatggtgcattaaactgtcagacaaacaaccatgtagaaatgaacaatacgcattagtacaacaagaagtggcgtgagagaagcaggggagctcatgctgaccagtgtggattgtctacagtattactgatgcagtagcagacattgacgtgtagccgggacctatatatcagccactgctactgcatcagccgtactgcagagtatatgtatctcgtgctgaccttcttcgccactggtgagggtttaccttacggcgcggttaccgggcttatcgcggggtacggtaatataaataccgcggtaacctccttaaattcaaataaatttaaaaataatttaaatttttgataaattttacatggttttatacggtttttcgcggttaccacggttactgcacggtaaccgtgcttaccgccggggcgcggtaaccccggccccggcggtttgggaaacctggacaggctgcagcaatgggaggacgatgcctgcaatcagaataacttgatgatcctattactgaaaactttatcggtaggtcggctcgccaccacttctagcgatcgtacaaggtccgtcttaagtacttattttgtagccacttttaaccctattaaaatttggtaatgccaaattttgacacattttagggttggtagcattgtatatgtctggtttgaagccttactaaattttggtagattttttaagtgtgaaaacttttaaaatcatcaaattttggtagggttggtaaaatatatgttcagtttgttagggttgtaagcggcaacaaaatgaataggcactttattaataaagagaaaatggcatatctaccatggcataagaggggattccctcaaataccatcgtttaattgcgcttcgctagaataccatcgtcaactaattcaccttagccaaaataccatcatggatagaaatacccttacctttacctcttccaactccggaacaagaaaacggcggcggcggcgtcaaggcgcggcgagcaactccggcagcgccgccacgtgagcacgcgggggaggatgaagtgaaggtgcaggcactcgtcagcgtggtcccagggcgacgaggacatccgcaccacctcccatctccagcaagctcgtcctaccacgatccccgccatccgctcgctccgcgcggcgacggtggtcgtgtctatgcctgcccacgccgtccatggccgtcgtcgctcacgtcgtctcggtcgccggtagctcgcgtcgggagagggggtagcacccaggatccgtctcgcgttgacgtcgcttgcgtcatctcgaccgccagcccaccccgactcactgccgacgatgatctcgccccgattcctcacctccgctggcgcgccggtgaaaccggcgatggccgccggcaaattcttcaagcacggaacgaaggaggaagaagaaattggggcatttttgtccggaatgctattttggcaaagatatcctgttaggggtggtattctagcgaagctcatctaagtgatggtagttgagcgaatcccctcttatgcgatggtagatatgcaattttctcgttaataaaagggttctttcagaaatgtgcaccatgttctcattgctccatctgagccgcctatgcgtgatccactgatcagggtgctgagttgctgacaaccgaggtgggaaccaggtactgagctgcacacgaacgacaataagatatagtaggagggccttttcgtaaaaagttagaagtagaaaaatttggaaatatacttttttttttaatattttacgtttatacagaaaaagatttacacaaatatacctccaccacataacaggggtatatgggaccgccttgggactgtttcggcccacgtgccacctcggtgccgctctctgggctgtaagagcgaggcggtgccgcacgtccatcctgcgtgaccgctggtcccgcggaatggaagtgtggtcccgcgcccccgttatagggtggaggtagttatgccaatctttttcacacatgtatataaacctaaatatatttttcgggattctccggcgtcctccccggccatgcggccaccatagccacccgctgcggcggcgacggagcattccggtgagccgcgccgacctcgcccgcatgcgccgccgcatcggcgacgacccacgccacccacctccaggtaattccacccgcattttacgattccccagatcgggctagggctagtgtatactactagtactactgaattaccgatcgctgatgattcgatgaactgcttgcgttaaacctaatctagattccattctcttaaatccccaaacaaagcgcggattagcggaagcggtagaaaggcgtcctcgggagatgagacgaacggccggtgtcagaacgggtccatggcggcatctgcattgctgctcatctccccctccactgaaacaagccgcaagaggacaatggatttaggtgaacccgtcatgcagacttgcagaggcaggtaggtcacaggtgagtacactccattgtctggggtaaatcggccaagcaaaccaatcagcaatgtagtatcagttattacattgttcccaattgccaaatcaaagtccaaccacatgtgctcaactctccattgaaaatctgaaatccatccaaacaaaagtaaaccaaaccaaagaagttgctcgccataaaaagtcacgagccaactttttttttaagctctttggatggatgtcacacagtggctgtctcacaacacaagtgatcactcacaaaggtttggtactatcttaccaaatgccaagccctaaagacaggtaaagaactgaagataccaggggggcagtaaagaacagagactagatgttgataatacatgtggccatgatacactatttccagttaattaatatggttaggttgatgcccagcctactagtgggaatgtggcattttgcttcagtttatcaggacactacaacagtagcacttttgtggataggatatgtgaggcacttcacatttttttctcttcctcctcaaatgattgagaggagtaggttgatattaaattgccacatgacacaagattcccaattgattaacggcaagggccctttgcaatagtatttatcaataactaatttaccttttcctttcacaatcaagtaggccctgcttgctgtatatgtttccaacctgtttggcttagctaagatcagtatgcttgcattgcattttctatttttccttcttgccatttctgatcctcaccatttctgcacggttgattgtgtcccctgaagcaaaagctgttcatcaatttcttgaagcaatgcaattgtatctcgtgctcgtgcagttcatggtcaggtccacaacttcacatgcgtggatgcttaatgctttgtgtgcacaacaaagtactagtagtatgttgttgattgaggatgcacgattcacgaggtacacaaaaagttatactactactccctctgtcatgtaatataagagattttggtgggatttaacatattctaatactataaatctggagtacattgtatgagcaatcatagcgaggatgattctttgcttaaggatcattcaactggttatggtgacttcatcatggggctatttgcatcctggctaaaagggcaggcaaaatgagtagctgaaatgaggcgatccatatgtaatgtcacgcgcagttttccaaagttttcctttgtaaattcagagttgattagcactgtttttcctctgtccttgtgatcattttggttcattatggttctaatcatgtaatcttgacattttgcaggagcattccttttatcacaattcacaagctcagattgcccccacaa

SEQ ID NO: 1741 - DNA, 7303 bp, Oryza sativa
aggaggtggtggagggggtggaggaggagggacaaaagttcgtgtttgtgctccaaaagacataagtggaggtggagggggaggaggaggaatgcttgacaagcctgatgaagctggaggaggtggcggtggcggcagtggtggtggtggtggcggcggcggtggctgctgctttgtagctgatcccatgtgcattgataaggaacttgaagaagcatagggtggaggtggtggaggtggaggtggaggtgcagcttgaatttttggcacagcttgtgcacctgatgatacaagaggtgcatctttgccaacattgaatttgttatttgtatgcatggaatggatagctagtgcagctggagaactatcatatctagatggaggatgagatggcctatgcacagaggtagtttcagattctttattgggtgaaatccatctgcgtactgtcttaggtttgactgcctttggttgttcttgcgattggtcactattgcctagcttttcttccaataaaactgcctcaggtgcatggtctactggcatcttctttgagggcacaactttatcaggtatttgccttctgtcactgcttatccgtgggctcttagccctagcttctattttactttgaggaagagatatgccaacatcccgtctgccaccagactcttctctcttggttttgatttttgttgctatttcagtggctgtaggacaacaatgctaccctgcacagtggttttctttagagatatggcatcttcaagcccagatttcaatttagtttgctccattttgctatcagttgtatcagcagctttagcgacctccatcttgtatttttgttatcttgtgagtccacactctcgataacagatctatctaatttaggtgtagtgctctcttcattgacaacatttttcacttcctgcggtaggttcgcattatcaactatagttttctcttcatagatcaccagctcattgtccacgattactgtactctcggtaataatcttgacatcagcattctgcagtgctacatttggtatagttcctaagcgggtatcctcatccacactggataaagttctaggagagctgaatccagtatagtccaaattagggtatttcaatatttttgcagattcgtctggttggcactgaacttcatcactgcaacttggatctattgcggtgactaaagtttgtgcaattacacctttcatgtcctccttctgacagatggatccaaatttgtgcccctctgaatctacagaggcagcaaccacttgtatgtcctgcacagcattgtcgtcctggtcacttctgttgcttaatttgggcatctcctcattctcacacgcctgctgcaaacctccagggtttcccaaaatttctgcaggtgcacttactggtctatcactcatgcaacctaaattctgggagataactatcttcacatcctcatcagccctgtgcttctctaggcttccactgtcttctcttgatactccaccatccagttctgcatcacctattgatgttctgccatcagtcgactgtgtttctggatctcttctagcatcatgccaatcctcctctgcttcataaaactcctctcctgtatctactgaagcaacatcagtctcatctccatcatcgtctacctcctccacggtagcagcggcaggcttgaaagaaccagggtctgaaaagactacctggtgcagaaaaggaattcattttagattcattgtccataggagacactaaagaaactaagtaaaaagagtagcgtacaggcagctgaatttattacctcagctcggaagtcccttgggaactgattattagaattccatgacacatcaatatcgtcacgattcaggccaaggatgttggattgaatgaacgcagtgttgaacatgaccctgaacattatctcctcatggtcaaggttatcaccaatatgaatgcactcaagaacaacatctccttgaacacggcaaaaagcaccaacttttactgggacttccgcctgcattgcaactattcatcagagatggttcagaataaggtaaattatttcataacttaggagttagcattacctgcccataacgctggagatgtttcttggtctttggcatctcataaagtactttggcgctcttgttactagaacttgaatcttgcccatgtacacgcaaatatggcctacagcccccttcggcatcaaacctcggaacaacgtggagaactattgaatccaagatgaggggtcggctaataggaggcttttctggaccacttccttgtcttgttatatagtgcaaatatctcatatgtgaagactgaggattcaaaggaaagaattgttgtataaagtccctacgggcctgtttataaaccatctctagagttttctgctcgccagtgtatgttttcctatatagcagcagtccagccaacatgaatgcaagcacgggccacccccctctttcacagtgcatcaaaagcatgttgtgctgcccttccactgataaccaattttcacaggatttcaagaaatgatggatcatctcaagctgaagcagtgggcatccttcatactgctgcgggtagtccatgacagtcatgtcatactcagacaggatatctgaaatccgctcctcttgtccccagaccagaaattggacaccatgaaagatgcatccggaaagtagtcctgcagctgcgcaacaatgccgctcaagtaatccctgtactcatcctcacccatggaatcagttgaaaagcagcagtcgaacactgaaacatgtgttaatagaaattagccagaactggtataagcaacttttcatctttcgactagaattaaagaaaaggaaagcacatctagcactaaaaggctaccagcatctgatttttcacactgcaagtgtgctaaaattcatatttccagttgaattcaagtatttgatccaagtggtttcaatataaaagtacaccattataaccaaacattagattcgcagcaagcagaaattaaccatatgaacatgcaagcaggatatggtgggtctacggccgatttaagccaaatgcagctgagcccaaagcttcccgcagagcaaaactccacaatcacacaagattcatagaaggaaacaaataaagaaaaaattaagccaaaatgcagctaaatctaaggcttattaaacacatgcaaacccagtatcagaccaaatgcatgacccaaaatctaactcagaaattactaaatatagcgcttacgccctgcgcatgccctaaattcccgcttaaatcaacaccccagtaagcaaaaccttcccaaaattcgagccccccaagcactccaaagccacaaatccccctcggaacaaaaggctcccccgcaaatctcacacccccacggtcccaattccacccagaggcgagggcattataccatagacgcgctcggagatctcgagcagccgatccggcgtcttcttcaggaagaatttgcggaagagcgccatccttcccctcctcctcctcccccttctcctccgccgccgccgccgcctccgcctctcctgcgcccccctcgccgggcgagctgctctgacgcctcacgcggccaccgatcggctccgatcggggcgccaaaggcatggggggccccacccgcccgccgcccgccggcgagctcagcggaggagggcccgcacccacctccccacccggggatctcgggatcgacgccctcccgccgcctagggttccccccgcgtcgggggcgcgcgctccccggcggcagcagcagcagcgagcgagggcgcggtggtggtggtggtgggcgtggagagagagggcaccgtgggattgggacttcgtttcctctctactgcctcctcctcctcctgctcgcttcgtttgaactccactttagtaaaatctttttttcccctttctttcagctccccccaagtttttactgctttttttttctttttctaatctgcttctcaattttttttcgctgccgcggtgaatgttttttcccccggataacagtgacagcggtgaagccgccgcgacgacggatactcttgtgccactgccatgcggggccacttaaagtggggcccagcgtcagtcacgtggggtaggggtgggttcgttgcgagggtagaggaaggctggacctcggcggctgtgtcggtacgtgcgtgtccgggttttcattttcttttctttctctttcgttttttttttacttgagggagacgggatctcatctggtgagatagattcttttaccgccacccccctaagttcgcgggaaatgcgactatttttgggattatcacgtgttgctggtcattttctttaccgttaatttgtactgggaaggaatttaagcgcagcgcatgtttgtccatgccagtgattagcattgacagatgttttctagtaatagatgatttgtgaaattgttggcattatgttattttcagtaggaaaaaatgatgatggtgacagctgtgtcctggatgaactgggctttattcattgtgctctcataaacgagtggaagtggaatttttatgaattcaagtgatctgctgtctataaggagaaaaaaaatagcatgcgcaaaatgcactcggactaattgctgttatatttgaagtaatcattaataccctctcctatctaaaatacataataatcttgtcctggatcacacacaaggtagtataaacttagctagagtgttttttttccttttacacgaactagctagagtgttgctacttgatctgcttgtatgtcaaaaaaaacaaaaacaaaataaagaaaaaaattaatgtagcagcatgcgaaggaaccaagaggacgaaaatgtacattggatcctatccaacacaaagaacccattccaaaatgggccgtacatccgttgcccttggcgtggtttgtgccgtttgttcgcctcacgagtgacctcaattcatttatgaatcccattgccaaatcaaacacaaccccggccacactcccttctctaacaatttcgtggacatcatcgagcatgtgagcggccgccatcacaaacgtgcacccaaattaaaccaattaacaaacaaacttaaggacccatacaaagaactccttcaccgaaaaaaaaaaaagaagaagaagagagagctgcgtaatccaaaccgacgaccacgatcaccatccagcaaaaaacggacggctctcgtagcggaggccttgccgagcgcttggggacaagccgtggtggaggcccccgaaagtgaccgcgcggcggtcgcgaaaagggcgcagcggcagcggatcagcacggtgcacgagaccgttgccgaggcgcgcgcggcagaaaacagtaaaagcgcacccgtgttttcttcgccttcgcttcgcttcaccgcgcgcgcgcgaggcgacgtgggtgggtggttgactggttgcgccgcgcgcgcgcgggtgtgggctcgagtcgagcgagctcgaccgctcgaggcgacgtgcagcgacgggcgcgcggcttggacgggagctgtgcgtggcgacggcaacggccgcgggggcctgtgtctgtctgcccgagcgtgttggacgcgtccgtccgggccgggccgggacggcgacggcgacggcgacgggttggttcgaccggtctccgtggatattgttgttgctggtcttttgttttgcttttctcctatccaaaatgtttggcgccgttgattttttaaaaaatatttgaccattcgttttattaaaaaaatttaattattaattctttttctatcatttgatttattgttaaatatacttttatgtatatatatagttttacacatttcacaaaaatttttgaataagacgaacgatcaaacatgtttaaaaaaattaacggtgtcaaatatttagggaatgagagagtataaattaaacatgcgacgctagctgtggatagcgagaaatgtggcgtgtggcgtgcatttcatcagggaaacaactgggatattttctatttttttcacttttacggaaaaggatgcgcctggagtgcaatgttgttggagttttcctccgggaaaagaaaagatattgttcatggtagccagctagttcgactataaggagatccaacggttagatatttctaactggctactccttctgagtttgttcttttctgtagaattttcactcgcgaagaatactcgtgtaaggttcccattgtttgctccatatagtatctatcgttgctaaaatttgaattttcaaactcaattttaaagttttttcattgtaatttattttccagcattaacatttaaatcactaaaaacacatataagaaaattttatatataaattgttattattttgctaatacgctgaataacgtaatattgtatttagcctaatgctgggagcctagagtatctgcatggacggatatatccacttggcagccgcccaccatcgtactatcccgtatgttcggtggcacggcgtcgcgacccacttggcaataaaaagcgcggaaaatacacgcacacgccgctcggcccatcgcatcgcgtatttcgcgatttcgccgtcccataaaagcagcgtcacgtatgcaatgaatcagcaacgccgtgatgtgagcctagcgcagtaacgctcgcagttaacggcgttcaattgtgaattatccgcggcagtaaaaaaatgaagtagtaaaaaactctggacttgtaccgctcgtactctgcttctgctgcctgcgtcgtttcaacggtgcggttaatgatcgcgataaaaaaaagggggggcttaattattcgctcatcagcacagcacctggactagctagaacgtgcaataataacgacgttattactaatttttacgtcaattagtagtagtaccactgattgatttatcgatcgcgaccgttagaaaaggtgaacagtgaagagtctaatctgatctaatctaatgcatggccctgaaacttccctttctctctctttctctctctcctatcaaatatcaacagtacaatggttatttcagttctccatcatgggatcgtactctgtttagcatgggattaagctagcgtacgtacgtgcatccgtgcgatggacacaactactacagctgcaagacagtcggcgaaggccagcgatacgtgaccgtattattaattcgagcccaatttatgattgatttatactagtattcgtgcgtatagg

SEQ ID NO: 1742 - DNA, 778 bp, Oryza sativa
gtaacatggtcatttacaaagtctaataaatacaggttcttgagactgtttgcatagttttgtgatatgataatgagatcatgtaacacatttgtcataacttaaatgtccaacaaatctagtgtctttctgaccttgatcactgatacaaattagaaaggaaattaaaattagcatgtacttactaggtgaactttttctggctttgaaccaagcgattttctacgtgaatcagatttagagctgtcattcggttttggaacagctgctggaaaaaggctttccagctctgacaaatcaaactccgaaacactgcagaaaagaaattgacaaacattaaggcaaaacctagtaaaaaagcatcacaaatattgagccagtctttgtggagtagattgtacgagatattagcaactgaattgtagaaaattcaatgctacaatcatgacaccaaattatttacaaatcctggatgaagccttacagcaatcagccaatcacatcattgaaatttatgtgcatatatcaataagcatggtcaaatggaggaagaattttaatcaaaaggatatacctctgtgagtcatcatttcgctgtaattcttcccatagacttccttgcaaagctctagtcaccttgatccaatgtaatggctttaaagttgatttacgtgcagctgcagccccaaaacctgatcctgaagcacgtaccaccccacgccctctacctattaaactactaggattgcctcctggagtggtggtgctcctggtcctc

SEQ ID NO: 1743 - DNA, 667 bp, Oryza sativa
ctgatattgatatgccattctctgctaatactgggatgaggccagatctcatcattaatccccatgcatttccttcacgaatgactatagcaatgctcttagagtcgatagcagcaaaggtacaaacttctttcataggttgaggaagcttgcatttttttcttcattttgaaagaaatatcatgattgttgcgagagagagacagagattccttgtttccaattcttctcatttaagtatgatagcgtcttggtactttctttactcactgaagtcttgtcttcacaggccggaagtctgaaagggaagttcattgatgcaacgccttttgcaagctcagttaaagagagatcaaattccattgtggatgaactgggacccatgcttgcttcttatggatttaattaccatggaacagaaattctatatagtggagtttttggcactgagatgaaatgtgagattttccttggacctgtatactatcaacgccttcgtcatatggtctcagacaaatttcaggtgggcaatcattatttgtgtaccatcttattatgtatagttaaagtcgttatctggcttatttttcctccttttctattcgatatcggattgaagatctctacaatgctatgcatcaaaagtattcattgctctatttatcta

SEQ ID NO: 1744 - DNA, 539 bp, Oryza sativa
ttgcattggaaaaagaaactatatgaggttttttattctgatgacttcttccctattcttggtaagctcatgttcaatcagctacaattactcttataagattgtatggataggagtgctgcatagtgctctaatcttgttgtcattagtctataatgtttaccatagtcccagcatactacacttaaagtcttttgcatgcatataaatttggtcatggttaccgcatagagcattttattcctggtccttttcatcctagttgaccattgacaggtctacatgatttgtgcactttgggccagcttatcctacaatcagcagttggagtattggtgctagtgttctgcttgttgagcgaaaggaattctccattcaaattgtgtcaaagctggaaagcagcttctctgtggtgccttatgttatgggggtggtgcgtttggctgttctactttcaaattctagctatttcacctttcctttggagaaccagttgactctgttcacattttttcttgaacgctcaaaatgttgatctt

SEQ ID NO: 1745 - DNA, 679 bp, Oryza sativa
atacgaggatgaactgggttcggaaatgatcaattaccgttccccggcaacatacatcatgaccatgttgagaccaaaagatctagtaatatgcatggctttctctggtttgatcaatacaactctatattgaggtttgtggacaacagttgtgtagggagttagtactgccgatttattatcttcaacacggtgcgaattttctaggccatagaagttccttctttagttaaagaaccaaagtatttgcttttatactgtaaaaaaagtgtcaaagtttaaagatatcaatgtaaaaaaagttgtgcacaagtagaaacaatgtacacaaggtaattccaataataatcatattgatcatcacctccaagaccaaggggaagaataatgcgttttacctggaagagatgtggacaagagttatacgccatcaactgaggaaagtagttaacaatttcacattagttaaacagaatgttgcaaagatcaacaatatatcacatgatagacatattgttcagttctattggagtttggagataattaagtctgatttgatctagttgcactctgtagaatatgtgtagacaaaaaaggatggaggcaaaaaaaaaacatagcatttcaagtcttaaagcttgtgaccctagtacaaaccaccttcatagggctcaggaat

SEQ ID NO: 1746 - DNA, 84349 bp, Oryza sativa
  unsure (1)..(84349): unsure at all n locations
tcttcgtccgctggttagcttattagtcgcaactaaaatttaatttttaaaacataacttttagttgattttaggggtttatttttattgtggtctatttttcagtattggttggatgacatataaattatttttattactctgttcaattttatagcacttattagccgttgcttaacccattagagccgaacacaactcttttgcttgcccggcactaaaaaattgtatttctaatttctacggtgcaaaatttgacgaggtcctatttatatgatgctctgggagatgaatagttatagtctgtgagattttttcatactgagtgaggagggcatggcattatcacaaagtagctcaatattcgtgtttggaacacccgagaaaattttgaatgctctctgttttcgtgtgaaatttctcaggcagggatcaattcaagtgtggttcaccttgtgctgcaaaagagagccacacaagaaaggctcccaaagattttgtaatttgtatgcatgcgtacatgtacgtgacaaggattggaaaaatcttctactgttgtggcaggtatgtacaagagctggtagaggctggggtgcagtttggctgttcgtccagccaaccattctgtccaacccaacatcgtcaggataatttggtaaggatacctgaaagttggtaaatgccaggatctttttgttatttatttgttagtattaggtaatgtattttgtcttgaattaatcttgatggatttaatcgtcgtaatacccaaagtaaatatctctctcgcagtaaataagtggaaacaacagtgtcaaataacccccgaattttgctctatgatgtaaccatggatcatgagtttgatgactcagacaaatggcacgctctaaacagttaatagaggtatgcactcccgtagtttacttttccgcttacaagtcactgttaaattttaaaatttaaagcttatttttggacttgatttttttctcaattatagtttgtttatttttcagtatttgcttttgaactgataaaaaaactcacataaaattttcatttataaactattttttggttgttatgatcagcataatcgaaacggtgactttcgatggattatttatgattttttttaaaaaagaactttctacttcagtattggcttagacaatttcccacgaaccatttgttagctcaattttcctcggtttcataatctatccaatccaaaatcacccagttagaaaacgtccaaaatgtctaaactgatgtccccaggcacaagaagaaatcagcacacatacttcatttggttatgtacacaaacaccacgtactatgcgtgtgtggtaaccgcagaggatataggacctcacatctcccaattcccaagaacagtaaaaaaaagattttatctatttatctatctatttatgcatggacaagggcacaagtctaacgagagaccacgcagggcgtttgtggagagagacgggcggcgctgccaagtagggcattcccgccaggtaaattcccgggctttttttcttttgcttgcttcctttgcttgtctcctttggttgcggcgggaacaaaaaaagaaaaaaaaaagaagcgcaccgcgcagccgcgcgccacctccacctccactcgtcctcctcctccactctcgcaatctcgcacatatgcgatgcccgccagaataaaaccctcctgccctctcgccaatggcggccgctgaagctacctcctgctcttcttcctcttcgtcttcggcgtagctccatccctgctgttgcatgtaggattcgatcgattcgtggtggaggtaagtaatatccaatctcttcttgagtcttaatttcttggtagatttatctcttctcgatctcctgttgttaatgatgatgagttgccggatgcctgccgggacttcgcttgcaagcagctgctgtgtgcgtttcttgcgtgggagtcttccttggctgccttcctctactacatctagcagattctttctaattaagtttcgatcaatatgtgcctttgtgatttgtgatatatatttgaatggtagattaattagttattcggttgattttgctggatgcatgcatgtagctaggtgagatggatgaacaattgaacccctgtcagtttgccaagtttaattagtcaccacctgcaaatcagattgaaatagaggcgaattaaggagatagtttcattctgctcaagttctagactagaacatgaggattaattagatttttacttaacctggatgaatccaacaagaaaagattctggtattcagaactgagttcggttcaccaacgtgtagtactctacaactatagtcaaaaaaggaggaggaatattgttatgcaacgaaatgaaatgacagccagaatactgtagatcagcatattccaatattttttttgaacgaacatgtgctaattttattgaatataggagaagtaaaagttacatgtataaaaaagaaagaaccgtacaaaaggacaaaggcctaaggaattaaaagcactaggtgttttgctcccgattccaatgttttgaaacaaatagattttaacaaattatgtttgaatatttaaactattccaaaccaggatcataaattcataacagatcggcaaatagcgtgcccgagatagcaggaagatactagcaccaacgcaatcaaatatctgaaaaaaaaaattctctgattcttagctcacacgtcacacaagtagtagtactatcaatctatcatttctcaggggaatttaacccaaccagacccttttgctttccacattccacaccatctcataatatgctttcatagctttactgctttactctttttctacatacatccaaggctgctgctggtcatcagaattcagaatgagaaacatgccaatgttgtgtccttctcattcttcagtgagtgcagtccatggagctatgctgatctctttttgtccatctttaatcgtcctaatcctgctttaaagccaaccatgtcatcaagaattgatcaatgttcttttgaaaacctctttttgtttagtatgtgttctttcatgtccctgtcaagacagataaattgcacagcacaacgtgtagccttctgcatgcagtccacaggccttggaagaaaaccctttgatgatgagtgatgttgattcttgagcagatttacacacaacccaaaaatactaatgatgaaaaggagtaagattaagtaatccgttacacggctttcttttattaaacacaagctttcttttcttgcaaacattgttctactagtgacataagttagttactaattactagttagttaatggttctagtacggatttgatgtttttatgtaatggtcaatgcgagtcaaagatgatgaaagctgcaggcatttgcagtgggcttgcctacaaagcaagacacggacaaacaaaaacaaacgctctcatttgggagttcatgtctttggtgcaaaggaaacacacgcatgtacgtcgcgatcatgcgtgctcgatcggcgagctatagcgcgctaacggacaatctcatggtcacggatcgagtgtgatcgatgcgaaaaagcagcttgcgggcgcgatttctttctttgtctgcctaattcagttgatgaatcttgcatatggtcttttgtgttgtgtactgcaggagttgagcttgtcaggtgttcgttcttggggatcgatgacgctgggcagcggcggcatggcggcggaggagggcggcggcaatggcgaggcggcggcgaggggggagaggtgcgtggtggtggcggtggaggagacgtgctgcgcgtgcgcgcagctcgtggtcgggccgccgaacccgatgatggcgaggtacgtgtacgccttcgtgttcctggcgaccaacctgctcgcctggacgctccgcgacttcggccaccccgtcctcgccgagctccggcgactccgcggcagctgccagggcgccggctactgcctcggcgccgagggcgtcctccgcgtcagcctcggctgcttcgtatcctctttgcaattcaattcagatttcagtctcagattcagcttgcattttgtgaggtggatttttgtccctggagggacatcccctcgttttatacatgtcatttaaaaagttatcaaaaaaaaatttaaaagcaattgtcaagataaattaatatatgatatattttttcacaaacatgcgagttaaaatttgaccaatacaattcgaaacaaaaataacaaatttgaccgtatattaagcgttctattcatacttaaatttgttatttttgtttctatttgtataagttgatttttgaatttacatgtttgtgaagtgacatcacatattgatttatcgtactaattttttttcaaattttcaatgactttttaagtgacatacaaaaatgaggagttatcatcttaagggatgaattgagttttcctgcattttgtgaatttgatgtccttgacgacggcgatcaccagctgttcttcttcgtgatgttcttgtcgacggtgaggacgaggaagacgcacgatcgccggaattcatggcactccgagtggtggccggcgaagatcgtgctgtggatgggcttcaccgtcgtccccttcttcctcccctcgcctctcatccagctctacggtcagtgttgccattgtcaccctcctcagctcctctcacccacccgttcttgattcctctttgctcatggtgttcgtctgaattttcatattttcagggaagatcgcgcatttcggagcagggtaagccccgcatgcacattttcttttttaatataaaatactataacttccggcctcttgcatcaactagagatgcatacacgcaaccaacacacgtttttcagcacgttcagctgaatcgggtctcgttatcgacgtaaaactgatggatcatatgatgcgcaattttgacagggcgtttctggtgatccagctcgtcagtgtcacccggttcatcacctggctgaacgactgctgccggtcagagaccaacctgaagagatggtacgtctactgatcaaagccgctgatttctgttccataaaaaagcaaatccagttccctccgtcctaaattataagacctatattttttttacacggtcttcaatgatatattttgatcgttagtttattccatgctatatatttccaataaatatgaaattagcatcacatgaaagtattttaaaatatgaatgtaatgatataatatgcataatacttagcatatatatatatggttagtataattattaatcaaaagttaccgagtttaattttccttaaaaaaaaggtgcccaaatacgaaggaagtactatgatatgtcacatcaaataccgagtacagctcacctgcaatggcggcgtacgtctgacatgggttgaggtggtggtggtgcagccatatgcaggtgcaggtggtgtcgatcgcggcgtacgtgggctccatcctgggcgtggtgctcatgtacgtgtggtacgcgccgcggccgtcctgcaagctcaacatcctcttcatcaccgtcaccctcgtcctcgtccagatcatgaccggcgtctcgctcagctccaaggtcttgtgcgactaatttgcttacttctatccggatcgatcgatctcgattggaacaagtgttctcgtgtctgaatctctgaatctgaaatctgcatttgctctgttcttggattggttttgggtttcaggtgaaggctggctacctggcgcctgggctgatgggggtctacatcgtgttcctctgctggacagcgatcaggaggtgattattttctttgaaagattcattcggatctcagttctgaatttgtgatctgatcatccatggaatcgaatccattttataacacaactttggttcttttgttttttttttgggccatgaacagtgagcctcacacagagatttgcaacaagaaagccgaggttgcaacgagtgcagattgggttaacatcgcggtaatcatccaatcaactgttcagaaatgaaatttaacaaaatcgaacaatgtcatcatctgcttaactgctgctgtataaatctgaagaatgaaatgtccaacatctgcagagcttcgtgatcgcggtgatcgtcatcgtcacggcgacattcgctacggggatcgattccaagtgcctccaggtctgtcacttaactgaactcatcagtgatcagggttatgatcatatcgccattgatgctgaaattgctcgagaatctgcagttcaagaaggccgagagcgagcagcccgaggacgacgacatcccgtacgggttcggcttcttccacttcgtgttcgccatgggcgccatgtacttcgctatgctcttcgtcggctggaacgccaatcaaaccatggagaagtaataatcccagccataacaacttccactggtctttagcttaataacttgataatccattcaaggagatcaagtaaccataatccggtaactgattacaatttgttatgatccggttgattgattgcgtcaggtggacgatcgatgtcgggtgggcgagcacctgggtccgggttgtcaacgaatggctcgcggcgatcgtgtatagtaagtgaaccaaaccatgtactcctttcattccaaaatataaaaatggttagttttcaaaacttatataccataatatataagtatttatagtaccctgattgtgtgtacacacagaaatccaagcattttgaaacaatcagaattttgggaagagagcctaaccaattcaaaacttaatcaatgatacaagtgaaaataaatcttttttccgccacaaaccttaatctttactaaacaggctagaaatacttacattttaaaacggagatagtataacaatatctagccgcgcaattgcacgagctacatctgcactagctactgtatattactgacaaaactgccgttgcacctgcactttcagtatggatggtgattgctccaattgtctggaagggagggcaggtcggctcatcgccagagggcacatgacacaaggagaacaaatcagaattcagaaatggagcttcgtcagatgatgcagcgataaatacttggtcagcgacaaacacgtacgtagctgcaggctgcatgatcagggagatgtacaggatgagaagaacagttttgctttcgttgcagctgctgcagagaggcatatgcaattggcatccattgcccatacgagtgtagctagctagctaagctagatatttgtatgttcagtttcctctcctgttactggagagggcaatgcatcgaatcagcaaagcatattgtcaaatgacaaactgctgctgaacatgcaaaaggggcagcaacccttggaatatacgcagacttcctgaaacagtgactaatttctgtcatttggaatttcagttctgatctgaaactgggtactcattgcctatctctctctctctctcatgattcaatatttatgtagggtactcctatgatgtaatctgatcaggttacaaagcttgaagaaatcttgtttgagtgagagggtgactgagatctctcatgtgatgcatgcatctgatcgattctgatcaggtcggccagggacatgaaagaaatgatttactccctcacttccaaaatgtaaaaatatagtattggattaaacattttataatactacaaatctggatatatatataaaatgtctaatctggtacttcctccgtttcacaatgtaagtcattctagcatttcccatattcatattgatatctatctagattcattaacatcaatatgaatgtgggaaatgttagaatgacttacattgtgaaacggagggagtaagtaactcttaaaaaattaaatactaatccatacaagagatcaaacaaaaggaatagataagcatcaatcgttggagtaactcattttctgatattgccatgccctgatttctgaaattttgtcctatgaacaaaaaaaaatgtgtatatgctctaaattacgatgttatgatggaaaatggatcatacttcgccttttctgcggcttcctacatgcctcctattcgctggttgttgtttcctcacgctactcctactctatacacatttgcatgcaacctaatgacccctcttgtttgcagcaatattgtactgatgtactctcccgtccttaaaaaaaaacttaacccaggagaggtcatacaacgaattagacaagtgtcacatcccttctagatacacatttcaatactcgtggtacgtttttcaaactgctaaacggtgcgtttcatacgaaaactttctatatgaaagttgctctacagcgcggaatattagtttgagcactgcacaacgccctctccttctggttttcctgttttttaccacaccacttttcctccgcatcccacatttcctcggtttgttttttttcgtttctttaccactccactttccgtgtttcttttttctcttttccatctcatccgtgcttcatccatgggcccagtaaaatattaaccatctagattttttttttcgttccttatttgtagtttttctattttcgcgttttagtaaactatttactgtctagtttttctttccgagttttccgtttttctagtatctccgcacgtttcaaaagtaacaaatttactccatttactccgtggagtttttcatttactccgagcctcccacatccgctcatttaaaagtaacaaatttactcgcatgaatgcctccatacgcaatacctagatggtcgtaaaagaattactaccagcttacaacgctagtaattcttttaccaatattataaatattgtttagatttcatggtctgtgagtaaaacaattactaccttcctttcgatatagcccatgatctcgtagccaccctatagtaatatatttactgatgtgttcaatacacaatataagagtaaaaaccgagatttcctggtatgcgactatgcgagtaaaacaattaccacattcctctcgatatagccatgatctcatagccacagtgtagtaatatttttactgatatgttcaatatacagtataagagtaaaaatctaaaactaagagtattgttgatctgtatcacaaaataatcgtataaatgaaaaaaattactggctcaatcacacacaagcgataaaattactcacaaaattactcacagctgaatcaaactagaaaaaaaaatgattcagccaaaaatccatctggtggctttgctggatcttgctataaggatgaagagcacggtctatgtcttgtgactggtagtggagagggcaaccgggtggcgagcagtagtcgacgatggaatcatggaaggatgtagcggtgtggtatagagatgagctcgacgttgcgcagtagcagccattcatcatctagcaagcacgaaaaaatgcaaaaacattctcgttcatgtcaatacagatgacgagcaaaagaaaaatagcaaacaacttccatcaccggcggactccaccctatcctctgcagccagccacatggagcacgatgtgcaaatgtaggacctgtgcagcccatcaattgagatcaggtaatattgaagattgcacgttaatttgatttgcaaaaaaaattagggcttcatgcgtgaagttgaaggagagtatgcatatgcaaatcagagtgtcatttccttgcttgttctatcaatgtcgccgatgtggagcagccgctggttgttgctattggcccaggtgaacacctctttgctggttaaggtgatacctagcgtccggcagcgaggcccgaagcgtgccttcgcctcaaccgtcgccggccactgccatcaaccaccacggtgtcatcctcctcctccatggtgtgtcgccgatctgtggggtgggatggtggatcgatccagatcccaaaaaaaaggaaaaaaatgaagtaggggcgagagtggttggttgggtacgggaaaaatataatatataccggaagcagagaaattgtttttatcgcagttaatcatttactccgataatggtgggagcacgatgcgggacgtggggtgggatcggaagcagtggagttgtttttattatcgaagtaaatcgtttactcgaataaagttgggtggttggggcgcgcgataggagtaaatcgtttactccgacaacggtaggagtgaaatgacggaacgtggggtggggtgggcctgggctgatgcatgtttggcgcttagaattctatcaaattaatctatgtttcaagtttgtaataattaaaacttaattaattatacgttaatattacctcgttttgcattaaaacacttaatttttatctctaagagaaaaaaacaccacctaaattaaattttttaagcatggagaaagtacatattttttgtttttacacagctggtagatgtgtagcaaatccaaaataaaatccacgaggcaaacgcgtccgtggagcagtcgagccgaagcaaacgccgcccgcttccgagttccgagtcggcgcggcggacggtatatttatcatcatcctgcccccctgcaaaatccttcctacttttacgacacctccccaccccccgtctccttctccctcgtctccagatccgtgggtcgaagcagcggcggcgcccgatccacggcggtcactccctccgccatgaatcccgagtagtaagcactcccatccctcacctcctccttccttccttcctatggttcgtgatctccgcccccggtttcgccgtgctgctcgtttggttaggttgcccggatctgagcgggatcccttcgcatggtttcgatccggatctcaacttggtggctaggtttttcgtcttcttcacacgtggttttgacgacgcgcgggttgttttttttgttgacgatgatctcctcattatcacgtcaattgcaaaagggggaattcggcaatcgctcatcacaccatgatttgctgatgtctcatacatatttggggaatgggaattggattttattctaccaggaaatttagtttataatgttgccttatgtgcgtgccaatgtatcatatcagctcatgtccgtctgctctgtagttatgtgtaaaaacattgccatagttttgaatttggatatcttccacaagtactaatactaggcatattggtcccgtttggatatcaacatacttttggagcagatgtatatgcatcattattcagttacttttacctgcatatataagggagtcctaaataatacaatggtctctattgacatttattcatgccatgatttgatagttacctataagggaagttgacttttgggatatggaaagataacattttattgtaaataattcccactactgtaggagtgcattactacatgtgataaaacactgtgttgaaatgaagaaggtagcagttgtatgcatgtaattgttatttcattttctctatgtactgctactgtaacactagttttttcttttggtcaatttcagcgactaccttttcaaacttctcctcattggtgattctggtgttgggaaatcgtgcttgcttctcagatttgcggtacgagtttaactcattgtctcattctcctaattgtgtttttgtactaagtcattctggaataaatagttcttatatgtaaatgtgcttcagtagaaacatgcagtgtaggatcatacctcactattgcaatagcaaagtggttatgataattatgcaagggattccttccattggtcatctttttgttataaacatgaactgtaagatcatgaatccacaattcactcgtattaaataataaagaatcaagcatgaagcttgactaaattttctgttacgtagattgtgaatgttattgatgtacttgcttcctgtgattaggatgactcatacctggacagctatatcagcacaattggagttgattttgtaagtaatatattgttgatttacttgagttaagtttactttttgtagcacagcaataagttgtgcattttgtttgcagaaatacggacagtagagcaggatgggaagaccatcaagcttcaaatcgtaagattactgctaccttttcttcatcgcttttgatcccgtattgttttttacttgtgctagacaaattcataaataaggatgtccagttatgatgcaatggttattgtgaatgaatctagaaagatatgttctgaaggttatgttcccatatttgtgaaatattggtgctgctcatcggtgaaatttcattttccttgctcgtaatagattctatagattcttgagagtaagttatatggtgtgccctcattgtcaggggtgaaaattgttcagtttatgattttttgcggttgtggcaagatctggtctcagaggatttaccatcttaattgtgttctctttatccaaagggtaaagtctatttttgggccttgaactttgctaagcccatttatcaccctgaactacaaaactggttattttttcaaaacattcaaagccagacacaacaccctgaaccatatgttatggtggttgtcatgaactttaactaggtaagtttcatggtggtggaccttaatatgcataataagagtctgaattaggaaaatcatgtctatttcaaacaaaaccactaacaaattatgtctcagggtgtcttttggctggtttaaaagttgagggtgaaaaataatcgatttctttgtagtttggggtgaaatagtttgaacaacaagttcaagggctaaaaatggaccttacccttatcgaaatatgcatatgatatttttttacccatatttgaatgtgttcgaatgctgaacgttgtatcgacacctgaactcaattctggcaagtatatactttataatattaaaacccagaattgaattcagatatgggctatggagtgctttggtatgtccgtcattgttattgcaaattgtgccactgatgagaaatctttaaatttgtttagaaactattcttttttgagtagcaaactttgagaagtacattaaacttggtgaaatgtgatccatatccatagagtaatctgaagtggagcaatagtccaagtgcatcatgaatttagtatttgaaaatattgttaagactgtggtatgagtatactcttttactttgttacagtgggatactgctggacaagaacgtttcaggacgattacaagcagctattaccggggagctcatggaataattgtaagttggccacatgatccaaccgctattttctgcaaagtattggccatcttgtccctttcattaaactaattcatcctatcttgtgcatgcagattgtatacgatgtgacagaccaagaaagcttcaacaatgtgaagcagtggttgaatgaaattgatcgttatgcaagtgacaatgtaaacaagctccttgttgggaacaagagcgacctaactgccaacaaagttgtgtcatctgaaacagctaaggtaagctctccagagtcatttgattgaatgtgtattggctttgatcgactgtgtattggctttctcaccattgtcatgtgatgctcttatttatacgcctttaacatatctacaatcgttaaaatatcccgcaggcgtttgctgatgagatgggcatccccttcatggagacaagtgccaagaacgccactaatgtggagcaggccttcatggctatggccgcatccatcaaggacaggtacaactttaaatccacatgagcagtgtagctcttgtattaccctcatatctgggtagattttagtaacgaacatcccacctgtcatttttctcaggatggctagccaaccggccgcttcaaatgcaaggccaccgaccgtgcagatccgcgggcaacctgtcaaccagaagacgtcgtgctgctcgtcctaaagataaccaagtctttccttccatgtaaaattcgacgtatgttactactgtttgctcactacaacgtatttgtgatattcatttgaacgcccttgataccatcttttctttaatcagatggttaggcagctgcaaatatatatgtaaccttgctttgttgctctttgctcacgaatcgagaggagcaagcagaaccagtgtattgattcttttcacgcttacatttttcccatttcattgcatacaagtattctgtgttgaggtttagttagaccggaagcggactgattacaacaattttacaacttgtcacaggtgttggaaagttaattttgcatcggtagaaagactatatctttcattgagtgattaggtccaattattttgttccttgccgtgagctgggtcccatatttttatatctaatcccatgaacgtcagtgttgttctggattccgaacgtctcacacgatcgcttcgggcctcgctgataacgcttaggttcacgacatccgtggtgccctcagtagtcatctcccaattcttggcagtctgggacgccgtgcttcccacctagctgaccctaggaatggaggaccggcttgtcagacttggatgagcaaccgacaatattcggcgcactctgcctaccaggcctaccttctgggcctccactcttttgcttgcgccgacctgcaatgggatgctaaagggcctacctaaatgcaagcttttcctctggtttacactccagcagtgttgttggacagctgatattctgttaaagtgtagagtcgacatccatttattgtgccccttgccccttctgtgctcaggagtttgagacgacaaaccatatcctactccactatgtgttcgctcaatagatgcggcaccgcgtgctatccacggcaggctggactggtaccctacctctagagctcgccttctagagcagctttgtcaaggctttgactccttgatcttgctggtgtcctggcagctctgtaaggagcggaactccaggattttcaactccgctcttttgtccatccaggttgtctttgactcgattattcaagattttcaactccgctcttttgcccatccaagttgttttttcaactccagtcgaacgctggatggcttatctcgacattttgttgggaggatagcagtgctcttttacttgcttgctcgtgtcttgcctagcttctaagccttagtcctctaagtcccttttcgccagatttttgtgctagtttttttttctcttgtacctcctccgcaatggcctctgactgttgccttaaattccacattcttataatatattgatgtgtaatttttttacgcgttagttaaaaaaaagacacgccatggcgcgccccagcacatgacacaaggagaacaaatcagaattcagaaatggagcttctcatcgagattttgaaagtcacacgaattgaatggcatattctgaaaacggtgtgaattggatggcatatactgaaaaatctcttcgtcagatgatgcagcgataaatacttggtcagttatacagacacgtacactgctgcagttgcatgatcagggagatgtacaggagaacagttttgcttttgttgcagctgctgaagagaggcatatgcaattggcatccattgcccatacgagtgtagctagctagctaagctagagctttgtatgttcagtttcctctcctgttactggagagggcaatgcatcgaatcagcaaagccaaagcattgtcaaatggcaactgctgctgaacatgcaaaaggggcagcagccttaggaacaaacagtgactaatttgatttctgtcgtttggcactgtatgtaatttcagtatatatttcagctctgatctgaaactgaatactactcatttgcctatctctctcatgcttcaagatttatgtagggtactcctatgatgtaatctgatcaggttattttggagtattaacatatctgatcgaatctgatcaggtcagccagggacaaagaacgaaatgatttaactccagtgttgttgcggtgagctggagcgtgcgtgcaggacaaactaaaacctgaaaccgtggggcgtagtactactgtaggagtattacgtatcgtgcgattgtttgtagcgccgtctaaggtgagtacactaggtgacaggccaggtacatcgtcatggcaaacgtcagagttccagacatacatggcccagaaaccaatccaatcagttgttcgcttgtcacttgtggctgtaattcagttgcaactgacctggctgaacccctcatcgtttggctttatgttctctctccgcaaaatatgtacacttcatccgttctaaaatataagaacctagaaccagatactacgaatctagataagctgtctgtctagattcgtagtaataaaaaagtcctaaactcttatattttataggactgagtgagtaagaaataacatatgcttaaagaaaaaatgtcctaagttcttatactataaatctgaataaagagaggtatatcgtttcatgtctacaattcgtagtacaagatatatctcattcaaccaaagtcctttatattttgggacgcacggggtaagaatcatccgctgctaaaatttaaacctaaagtttattttaggatattttaatgtagtttttaaattagattttaagtcatcaagaacatatgtatgtaaaagtttcatctaaattattgtgacttgcatataataattagattttaaattattgtttttgcatatatatatatatatatatatatatatgtgtgtgtgtgtgtgtgtgtgtgtgtgtgtgtgtgtgtgtgtgtgtgaaagtttcagctgatagtgaatcgacggggaccttagcctaccaagtcacatcggtcacatagatcgacaatgagtgtatgcaactgcaatcgggattgtgcatgaatgaatgattggtttcagatctgcatccatgtcaagcttcactcttcttgtatgttttggccacagctctgggcctcatgctaatccgttttgccgctcgcagttcacgtggtttggcaatacatcaatttggcgtcctgcttattgatccggaagcagtactgctcttgttgtaaagcgaaccgtttcaatactgaaacttgcaagcaatgattgatttatcgatcaccacctactatagttctctttatgatgagattgctaataaaagcgggcaaagtagtccctcggtaagaaagacttatgagaaaggctagtaatcatgcacgtgcaatccacgtttgatagaatatatcacacacaatatgcatctatgtgttttaataactgacaaaactaagaatttgttggttttatatcaattacaatagactggagtacataattttgcaaaatattattgcatttgtgatttgcaggggattggagctctggccaaaacccacttcagtccatagctttgctaataaaaagatccaaaattttggagaaatgagttcacgatagtgaagtgagttagttcatgaacaaaatcactaaactaaatatattttaacgaaatttttgagcatactttacctcaacggagaataaaactctcagcatagtcatataaggatatggtgtatatgctgagcactcgcatattgtagctacaaaatgctttaccttggggaggaggcctgccctttcggtccaaaagcgcttcaggctgccaagctgaaaatataaaatatcaattattgaatcaatttatctacaatagtgcttcaccttggggaagaagcctgcccagaaaacttcatctcttagttgcaaaatatagcatttaaaatttgtaaaaaaaaacaacttcttcgtctactttatcatctcaacaaattataagtatctcatttaatttattcacctatttactcaactcaacttaatcataatcatcatatcccacattaaatttgacctctcctttaaaacccataaatgtttttattttaagacaaaggaaatcggtaagggcaatgttaacaatagagcaaactgctagttctatctttagctagatcatgtaatgtcaatataatgcatactatatcatcaatatatgatctaccttattatctcgtaacactcatttgagtccatgctggagttgaatacagatctatggtttctcttttctaactcaacaaaaatttaatatactctataacaattattatagcacgctcacatcatgtttacttgctccaatgagatagttggagaagtcctcttttacgagtagaactgcgggcataccactccaaggctccaagctcacaccaatacacgtgcatacgtagtcatatgtgtccgttacttatagtccaaaattgtatgacatagaagatgtatagcatactcatcactttcttcgagttgatagtgcttgtcattttgaataaagacatggtcttgaccgctattttttattacaatatatgtaaaaatatcaataaatatatgattttattgaagtactttttaagtacaatctacatatatggtcaccatatttctaagaaatattttagatattatttatagtcgaattttttagagtttgataatagccttgtcaaaaataacaaatactatcaattcgtaggtagttttacacactacatttactgtatattttaacccttattaaaatcctagcgcacatatgagcgtaatatttatgtacaccaaaatttaaaatttcatgtgtaaagtcatacaccatgactctacaccgtatcatttttttgtccctgtaatatggtaatatattcttaaaactagtgtaagttagtgctaattagtgggacacaagacccaccagcactaatcctggtaggttattaagcgtacacatgtacatttagccatctggtcacatatatattagcttatcaatggatctctttctctccaaattcgacccaacctatttgcaattggcaggttgacagtaataaccttataccatatatcataaacattagttcgcattggaacggtgttttaataagttaacaattaaggtgaagagcgagaggtcgacgaaggtcagaagtagatattgtaatacgacggtgtagtatctatcttctaattatctccatctcaagatatgtggtaatttttaacaatgaatccagataactattatctccatatcctaaatatagtaacttttgattattaatctggactggacatataattatctagattcatagctaaaattacttatattttgggatggacggagtattaaatatgatactcttgtataatatctactacttcctttccaaaatataacttttaattatatatgaatgtggatgggtatttgttcatattatagctaagagctgttatgaatctggatgagtagtggttcagattcatagctaagcgtttctatattttaaaatggagataatattgttggtgacaatggtgtgcacatcaatttcaaaaatttatagatgaacttgtgttaacgaaatatcacatcatttcctctcgtgtatatataacttataatgttacaaattgaaaatataccgtcaagattgtatatgtttttcacatcccttaagcaacggtgttgtgacgtggagttgtgcgtgtacaactttactaatcagagattaaaattccctgagggcacacatattacatataccctgcactatacttcctttgtcccaaagaaaaataacttctgaaaatgaatcgattcatccttaaaagttgaattttttttaaggatagaggtgtaggattttagcaaggtccaatatataggttacggatttgtcattggtcgttgtattcttttatgtatgccagagaatgcattcgcggatatatgggttttatattgcacgtttagcaatgacataatcgggaaacatattgaatactccctccgtcccaaaacataagcatttctacaaatgaatctagataactccatgttcatattcgtgttgtttttttaattaatttagctcacaacatatgggcagatctgagctggaccagggagtcaggtcaggcgagaggcgaggccaccacacaaaactgtagcgagtgtggccacccatgcatgcaatgcagcctcatcgcttacgtcaccgccgtcctccccccccctacataaaccatcagcatcatcatcatcagccgcaagccactccacctcgagctctcgcaatgccggccatggaggaggaggcggtggccaacgaggcgcatcacttcctcgtcgtcacgtaccccgcccagggccacatcaacccggcgcgccacctcgcgcggcgcctcgcgcgcgccgcgccgggcgcccgcgtcaccatctccaccgccgtctccgcctgccgcaagatgttcggcgacgccgcggctgcgggcgccggcggggagctcgtcgacgaggggggtgtgcggtacgcgccgtactccgacggctacgacgacggcttcgacagggcggtgcacgacagcgccagctacatgacccaggtcagggtcgtcggcgcgcgcacgctcgccgccgtcatcgaggggttccgcgccgccgggaggcccgtcacccgcgtcgtctacacgctgctgctcacctgggtcgccgacgtcgcccgcgaccatggcgtccccgtcgcgctgtactggatccagccggccgccgtgctcgccgcctacttccactacttccgtggcacgggcggcgtcgacagggacatcgccgcggcggcggcggcgcgggaccggatggcgcccgtgcgcgtcccggggctcccgccgctccggctgcgcgacctcccgtcgttcctcgccatcgccgacgacgacgacccctacgccttcgtgctcgacgcgttccgcgacatcgtcgccgtgctcagccgcggcgacagacccaccgtgctcgccaacacgttcgacgccatggagcccgaggccgtggcgtcgctgcggcagcacggcgtcgacgtcgtccccgtcgggccggtgctctccttcctcgacgccgccaagagcggcggcggcggcggcgccatcaccaccaccaccagcaacgacctcttcaagcagaacgacacgggctacctcgagtggctcgacgcgcggccggccggctcggtggtgtacatctccttcgggagcctgtcgacgatgagccggcggcagatcgccgaggtgtcccgcggcatggcggcgagcggccggccgttcttgtgggtgctgaggaaggacaaccgcggcgaggctgacgacgtcgccatcgacggcggcgtggtggtggagtggtgcgaccaggtgagggtgctcgggcacccggcggtggggtgcttcgtgacgcactgcgggtggaactcgacgctggaggcggtggcgagcggcgtgccggcggtgtgcgtgccgcagtggacggaccagggcaccaacgcgtggctcgtcgccgagcggctcggcgccggcgtcagggccgccgtgagcgaggtcgacggcgtgctggaggccggcgagctgaggcggtgcatcgacgccgccacgtcggaggcggtgcgcgccagcgcggcggcgtggagagagaaggcgcgggcggcggtggccgacggcggctcgtcggagaagaacctgcaggcgtacgttgggaagattcgcgccaattagatgtgtcttattggattttgaattgggatgatgctccaattttatatgtaattagccgaatttcctatgtaattgtggaaatatatgctaatgcatatttgtatttcattttaatgtagagttgtgcggttgtgcctactagacacactctagtactccctccctccaaacaaaagtaatcttggtgaggatttcacatcatctagagcaagtctaggggcctgtttagttagttaaataaaaatttttgggtgtcgcatcagacgtccgaccaaatgttggaaggggtttttagacacaaatgaaaaaaaaactaatttcataacttgcctggaaaccgcgagacgaatcttttgagcctaattaatccatcattagcacatgtgggttactgtagcacttatgactaatcatgtcctaattaggctcaaaagattcgtctcgcgatttacatgcaaattgtgcaattagtttttctttttatctatatttaatgctccatatatgtatccaaagatttgatgtgatgtttttagaaaaaaaaaatttgagaactaaatagggcctagattcattgtcttatgtggtatcaaatcatcacctaggttgtttttttttaatggatggaatacatgtttatatataatcctatcagatcctaggttcttgtattttaagatggagggggtactagcttgttgtctcgtttgaatgaaccttagtttgataccgttttcgacacatatcaagtggttgaattggcctatcgctctaaataacacgtcacataatcaaatcaagtaatttgatcctactggatagagtcattacacggtactccaatcaaaccaacaagtgatatgtatgtatcaagatttaaactcctatcggcagcaaaatcatcaagcttagggaggagataattaaggaggacaagtcttgaaattaatcctgatgactgcgtttggttcacatccgtttcttagagacgcattcgagtaacatagcaagaggaaattgagaaaacatatgtaaaggcgccaactaaaatgggtctttgaggcgagatgatgttccaatttatataaactaaccgaatttcatatgtaactatgcaagtatttcgtttgaatgtagagttgtgcctactataaagcttagacgcactgtatatccttatactcaagtacatgcttataatggctagggatgtaattatcttcctttttctttttaaaaaaagtgtagctagttgtttcattggaatgaaccttaatttgtcgccattttcgacacttctcaagttgtttgaaagtcatcgagttggcactattcaccctggcctgccacacttaagtacatgtcacacaatcaaatcgagtaatttggcacttatgttggtggagttatcacacagtactccatacaatccaacaggtagcatgtctgtatcaaagttatgaacttcaattggcagcaaaatcatcgggtgtatagtatagccaattgctaactatagtataaatattgacacatcatctataatcaatttaatagtatacttgtaataggtagctataaatatattatgccatctctctttctacacaactagagtatgtgatgcagttggctataaatttatagcccgcgtgttcctctatttctctcctttctctcctccagctaagcacaaatccaatgtgataattattatatcatatttatatcatcttattgtactcactcaagatgagataaggacaaatccaatcctcgttactgtgtttggttcacatccttgtttagttggggaaaatttttaggtttgtttgtcacatcggatatacagatacacatttgaagtattaaacgtagtctaataacaaaacaaattatagatttcaccaggaaactgcgagatgaatttattaagcttaattaatccatcattagtaaatgtttacggtagcacgacattgttaaatcatggcgcaattaggcttaaaagatttgtctcgcaatttacacgcaatctgtgtaattggttttttttttgcctacatttactctatgcatgtgtccaaacattcgatgtgatagcgtgaaaatttttgttttgggaactaaacagagtaagagaaaacatacacagctacagtagaagagtatcttggaagaaaagttaccaattcagattggagggtagccaagccagtaggattgagggagtttagctgctttgaatacgccgacatagacaagaaccagaccagatgatgttggcatttgatgtatcaccattgtagttctctctttgtccaagaaaaataatttttcggccagaatgtagaggcgtgataagcaaccgagcaatggccaattccctggcaaaaatggcgtttggttgtctcatgtgactatgtgagcaaacaaaaattaggccgagtttagttccaaacttttttttaaaacttgcaactttaccatcacatcgaaactttctacacacacaaacttccaacttttccgtcacatcgttccaatttcaaccaaactttcaattttgtcgtgaacaaaacacaccctacctaggtgtggcagttttgctagcaataatacttggtcacttttgttttggaatgatattatcatatatctgcatgcaatttctactttgctgaccatatggcccatatctttgcctgacaccaaacagtggttttcctcagaaaccaaacagtgaccatattttggatgggtacaagcgagcatcaaaccaaataccaattttaccaaggctaatgcatgtgtggtgtgtatgtagtgtgcgtgccaacatctgcatcacactatttttacctgtagcacaatctctatgtacagttgaaacattaaaacaacacagctacacacacgactatgggtgacacattgggacccaattgtcaggctcattatgtaccacttttctctctctctctctctctctctcttttttttttttttgcagcagagaaactgtcaccatctttctcccaggaccagctctcaaacgtcacaacaatgagaagacatggatatatcatcgttatgcagaaaatgccgggctgcaccaacagctgcctatcattttggcccatttcccccaacaatacgttaacccagaggtctaaataagaggggggaaaaagaaaaggagaaatcaacatatgtacaaatgatgaagaaaaaagagagaaaaaaggggggcaagatgctatctactgacttggtcggatggagcagatgagctcctttctatcaacaaaaaagatgggtagtcttgcatcggctcaagccggaaaaagcgttgtcgtcagtcgtccctgaaatctctcctcccatcccgggaagagtccctgctggacgccttgatcgcgtcggccatcatgagagcaactgtggccttgtggagggcaaggtcagccttgtgcatcagcaggtgggccttctctctcttgagcttggccatggccaccgcatgctgcgctgcactggaggcatctcgctgcttgagctcctctatgtcgacgcgggggctctgggacgcacccgggagcaggtgctttgagctctgccattcgtggatgaccgcgttccagtgatcaggcgcgcctcgcttcactctctgatgacggaaggaaggtgatggctggtgatcctcagagaatgcaaagcttgcagtccttttgacactgttggttctcaaaaaccttggtgtagaacatctttccaaaccatcaaatgcgcgaggggattctgttttcacagagaacctgggagagtaccctgttggtgaatagatagaaccaccgtcataggattcacatgccctcccatcccccacatattcgctgtattttctccctgatatttgacagaaacctcgtatcagcaaaatataatgacaaaatatggcactggatcaatgattagaaaaaaaaaagttaagaaaacgaacctggtcggtaaaagccatcttgctctctcgaaaagcttcctgaggacataagttttttatgggaacgctgcttcggtcccttatacggtatttggggttggagtcctcgaggtctcaaacagaaggcgaacaaggcaggttttggaggcaacttaacttggtaaccatttgatgaaccctgtattctgagtgctgttgattcccattcctgtagctgctgctcgtggatcttccacatagcggactgaaaatggtacaaatacaaggttagaggtcgtaagtactgaacatttttggtgcactgccctttatccgtttagttgtattcaaacatagtaactgagaagcacaaaaccaatcatttccccagaagcatcagcagttcaacacaatccatgcatcctagggttcaagttaaaccatgactagacacttgctctacagtcactcttattagaaccatatcccaaaaagaaattgtatgtctagttccacagcacataagctacttgaaagttgaaatcccatgataatacactcactcatcttaatatgactgctcaatggcatccaatactcttggaaaagaaactaaaagtggaaaactacctccgctcaagtaaacgatgttttggtctaattaattggtggtcttaaagctgggaataaattatgttaagcacacacagtgctctgcctctcacatagcaaaaataaataagcatgaccataaaactacctaagcacaaaactaactgaaatttagtttaaagcttggacagatcatggagacaaagctgttcactaaacacaaaaatatagggtaataacttaaactagattgaaatctacccaatattttgaacaaaactagtagaaagctatcggcaacaaggcaaactcagaaatggcaatatattgttcacctgaaagtgtcgaatgagtggcattccctttttcttcctcttgtcctgccaataatcatgtatcactttaatggtgtccagtggtatgttatcactatctagttccttcatctgatcaatagtgagttcattgcagttgtggctataagcaagtttctcgaatttgtccatgatcctctcaaacaagtcatctgtcacagaggtgctgtccttgcctagtttcctccatcttgaaacccacacttcatcatcactgtccatgtcatatatcacacgagattcatcaagtgccatttcaacatctgttccaatatgaccaatataatcttgagagcgtacaaaggatacagcatcatgatcatcatgagcttcagcaaagcagacaccaggaattggaatattcttaacagatgcagctctaatgttatgactataacattcatcatgcatttgcttgaaaatcaaccactgacttctgtcaggaaattctaagcaccactctgtcccccctttccatatcattgcatgtgtatagcggtttgtcgccccaggctgcaaaacttgaagaactttgtgagcatacttagttccttctgcaagcttcacacaaatcctccgttcactctgcccatcagagtcaattgtgatctgagtatcgtactccctccatcctctatcaccaactgtaactaggacatttgcaacacaagccaatgactcaggactgctctgttcacttcttgaattatcaggaagtctctttgcactgctatgagactgtatcttgcggaaatgtcctttgtgttttgagccaggttcatcacttctaggagaaaccgagtacaaaacctgagtccttggcttcttagagccaccagcaaagcctgtcaccataatatcttcttgccataattttgaaccatcaccaaaagtgcgtgatagggatgtaaatcggttccgatggtagggagtcctgggggcagttggtgtaacacgaccaataggatactcattcagttcctggaccaagtcagatgtaggctgcatggccttttcttctttgttaagtagcttatcatctggtggatctgatatattatctccaggaatagatatagaagaacacctcttttgatacttctgaggagggcaaacagcagaaaggcttccatccataatttgatctggaaaactcctgcttgttatgttggcaccaccaatacctctgctattacaatccagacttacagtccttttagcagtattgagcttgctgctagcagaaccagaatgattgatgcaaccagcggtacccatatccaaggaaccagtattagatggactaacataaacagaacaaacttcagaagcagaagcagccagatgaaccagatcagatgtgtgctgtggcagagactgctgatcctcttctaaagtaatcggcatgaattccggaagacttttagaagtcaagttgctttcactgcgcaattttaagtggtgaaaaaacaacagtgaaggtgcagctgccacatccagatgattttgaacagatttacttcgctcatcaagacaaaaaatgatagggtcgacatttgaatattttgattctgtgaaaaacagagagtcctgagcatcgagtgatagaccctagttaacagaagagtaattatcagtaataagaagattttctataaacctgtatttcagcacaatatgttttgcaccagcgcattcaacatgtaaaatacataagaaagcagatatttaaagggaaaaggctaaataatggattgatcgagacggaagagatgaacaagaaaaacaacagttcagatagtctgtttatttcaaaagttcaaatttatgattcccaatgcagataaacataacagaaatcaagtgaggcatctgcagaaaattataactgcatataaagtttctgggaaaaaaaatgtgtgtccagaatatctcacaggagaaaccacagatcaagaaatggtatagatcaagagaagccttttcattataaaggatagctaacaaagagcactaaagtcatacaccagcagtccagcacatgaaatatctgacaacattcggcactaagtttactgtaggaagccacgtcccacgtgagacaaataaaagaagtattcagtcagatgtctgtattttaggatactgtttcaacagtactgatgcaacaaaaagtgcatcagaaggtttagtgttaaatgcatcagaaggtttactctcaagttattggttgacaattgacaaggtcgtataaatgaaccgagcacataaaaaactgcaagactagtaaggaatagtcgttttccaaaaattcaactaaaattagcatttacatatccttggatcaagagtaaagcaaacatataggttccagtagcactaccaagaaggaatcggttcattttgttgctagttagaaaacaaaagagcaaattcagtatggtggtttcatccaatttatctaaacacatgaccacattgagcctctcgtaatgcaaagaactattcagtaaaccagcctgagcgtccagtatagtgccaagcactgaatgaaatataattagccggtatatggtttactcacaatctggaggaaaagcattaacaataggaattttctcaacacaaaaaagaccctagagttctagctctatatggctcaatgataataaaaatgatttgatctgcataagtaaggtgggtctggtaccttagagaagtgttctgttgaagtacagactctttgatcagttccatttgtaagttgctttatgtcagcacatgcgcaattaactttagatagccccctttttatatggtgatgctgcagctgtccttgcaggtgcttccatttggggtactttacccccacgaagctgaacatcaaaaacacaacttggcttctaccgtgcaaaccagatatccgaactctgactgaggtgcatagcatttttgactcattgcgtgtactcgccttggaatacgaattgaaacatccaacaagtaaacagaataaggatacagctgatcttaaggaagtctcaagaagcaagtgtttcaatcctaaagtatcatcaacaagaagtatctccagatgtacggcaggccacaaggaaaccattgcaccacggtgaaggagaacaagagcattgagaagccagacatggcatgcttcagacatgatcttataaatagattttaatggctggctcagtactaatatgccatgtcttctcgaagtaacattttcagtaacagacccccagccagcaactgaagcaaacaacgcacctgtaacttttctgtatttaagatcagaatcttgttctgaagtgttgagaaatccattctttctcctgcaagatcgcttccttgagtaaacaaagcgaaacctgctatctttaagcgtagtcctgtcttcagggatctcctcacccgcatttgcaggtgaaccaccaggtctatcatcagagcacagcatagactgcttttgatcaaacataacaggagaaatatctgaatgagtgtgattctgcttattcgtattactggatgtagcagaccttgcatggtttgatctagacagcaatgagatgatggggcctgactcagaacttcctgtgctgtttctatcaatgtcttccctctcatccacttcatattttggtttgaatatcgaccttggattacgacgattagatttatgccgagcttcgctgggcaaaaggagaagcttaatcctctcattttgaagattgatccattcctcatctttatcgtcgtatctgacatgatgcaaccttgtcatgggatcatattcctttaccaggccaaagtaccagatctcatccagaggccaaaacacccggattctctcttttacaatgcaaaacggatccacatcatgagggctgacttcataaaaatgccgacgtgggcgacgcttcttggatgaagctttgccatcacgattccgtagcaacctagcaggacccgccatgcccttgtctttgttacatgaatccttgaaatgttctgaatgctggacaaagtatgcttttgatgatctattcagtgattttgcactcttcctcagtgagctagcacacatattatctgatagagaacagagcatcctagcagcattttcttccaaattaacattatcctcctcttgaacatgcacggagctttccttggtaggatggacatgttttgatggttcacctgaaagatttggctgcttttcgactgagacatcattttcagaacagaagtttgtactgttgtcctggtcacaagtgccattctcaactttcaagcaattgatagggtcattactaccaactctgttctccttaagagtctgtgatttcctccgcttcctcctctggacctgagtagctttcgtaatgccattggatcgcagaaccttgcgacctccggtaccactcttgatactaacattctgagccagcttccttaacctcaatacaccacgaggctgcctgatcactgcaacttcacctgaattaactgaatgctctaagtggccatccttatttcttggcaatgaacgtccgtgacggccattgaaactatcttcgctccatgtggaatcgcctgagctggttcctgccgcatctagcccattaagttccactctatcagaactcaagctagtacgcttcctcttactccctgcagatgaactgctcgaaggctcctccttcccacccccattctgtgaacttggtccttgccccgctccaaccgatgccctctcggacaaagtctcctctccatctaagccttgtactgattcagttgcatccgttgcactaggcctgtcactaccactggattccattcacaagcccagaaatcacaagggggccagactcccaaaattccaccttccatcatacgcgaagtcccacacacagatcttggtgcctcatcccgaccacataatccacagattagagcaaatgcagaatagaagcctaaacaaaccaaggaaaaacactacggtcgcatcaaaaacggaacatttcaaaacagtagagcaccaatctagatcggagaaataaaaaaagaacaaaaaaaatacggggggaaagaccacgcacctgagcaggagcgttgatccgaccaccgaatcgagcccagaaccaccgccggctgcagagaaaatccggatcacacaaaccacctcagacctccaatctctaacaactccacagatttcacacgaaaacacacagctttaggggaagataaaaaaaattaaaaacagctcacctcgattgtatcgtgcggcggatgcgacccacccgcggatcagcgccaaattgggcggcggaatcgatccggcgccgagggtagaaccgatctgcgtcaaaagccccttcccagggccgatctagcgggggtaatcaagcgcctcccctgccgccacgggaagctagggtttcctcttttcgttgtgtttttttcccctttctttttttttggggggcgttttgattttttctttttgcgaattgggggaaggggaggagtggtggggcacagctaagtggcggtggatggcggtgaaggggggtgcgggattgggggccgtacgatctggatcggacggccaggatgagcggtggctgcttccgaggtttgggcggggcttcgaggcacatcagtgagcgaagcaaaagcttattggctctctttttttttgttgaagatttggaaaagtgaaaaacaaaactgatgtgacttttcttttcttttcttttcttttttgcatttttgcttgttcttcctgctttgaggttggtaagaagcttccagtacgttgttgggctgcatttttttaggcttttagtggcaaaagcatactaagctaaaacaatgtggagttaactcctccaatttgttgaattggaggtcatatattatactctctctcactcttcagttataaatatttgatgttttggacaaagattttattaaagttttagaactttgacaatcggtagttcccagctgctagtttaaaaagaagaaagagtggtatgcgtatatttatcttgaatataattactataatatcataaatgtattctaatacaaaaccaatgatacaatttttaaattttttaaccgaatcttatcctaaatataaatatttatgaccaaagggaatagcaaaaatatcaacactatattacaaaagaatatgaggccatacatgttacatgaacaatggtgtggctgtatcactgtttcctaaagtttcaagaaaattatttttttaaatgaacatgtcctataaaaaaccataatcgggaatgcatacatctcacatataagtgcaatcaaagaaaaactgagcaaataaataacatgatcatatcaataaaacacagcgtattcatggagaaatatggaaggaaagagaagtgcatatcaaagaagagagacaaagaaggaaagttgcacctgtagatctggatgtatggagatcagtggagaagacaccatacaagcggagagggctcaatccatacccgagcgatgggatctcgggaaatggaaagaacctagattggttggagaagggatctcgatagccagtggacaagatctcaaccgaagagtgcctaggttggttggcaaacctccgcatcgtctactcttacctccacgatccggagagcaaagggagcgcaatgaaagagaaatctcagcaagaaaacacaaacctctgtaccgtctgtccttgaacctccgtgattcaagaagcaaggggagcgcatggaagcaaagaacgaactaggggatctacatgtgccaatggtgcttggtggcggcgctgtttaggagaaaaggggataaattgaggaggagaggaaagcgtctatcagaaaaaggcgaaccattcgggttccttatatttcctattttactataacaaattgggccttgtagcccaacctcttgggccttataacccaatctctctctctcgcacacatttagagagagaagaggagaggtgaggaagatgatcgaggaagtggttgacatgtgagtctcaccccttgacttagcaagccaatcatgatcggcctgccattccagcagaaatcactccctaaaccactgaaggagttgatttgcaccggttttcgaggatggagagatgttatacctagttttacaatgaggaggcgattcaatcagaagcaagagagtgaggcaaatacacttactcctttagtttgcaatcatgcataatgactcaggagtgagccgaacgcacccaaaatgctagaatctgatggcgtagttcagcccaatatctaggatacaaacgggatctaacatgaaacaaccaatttttggtacaacgattaaacatagcgatacttacatttatgggaaacagattagaagagaaatagtttgtgaaatgctgaaatatcaaaaaacagtcgcaccaagattatcataatttactacaataccaaatgaagccatgctatacctaccatttgagaatgctctcaccacacatccatcgactccacgagattggaaattttcatataatttatgcaggtagttctttacatcttacgttaactagctaaaggagctaaaatttgctacctatgtacaaacccagaaactttgtttccgagaaaaagaatgtagatacaacaaagagcaaaaacatcagcaagtctacatgtacaactgcctgcctatcaaaacttccattatctacaagaacaattgatcggtgtcggtgcgccacatctttgtacagaccagctgccattccacagctcctgctctgtgtagtgggcaaaaatgaatcaaccctgggatgttgcagagtactcgaagagaagtcgattggacggcgtagattggaagagaacacggagcctgctggttagctgatatatgagtgaccactgcattgccatttctgaatctttcatctgcctgacaacagaggcctgcagaacgatgtgagcgattcaggtcggatgatattcatacagaacattatgccagtaagcttaaaatgcttcggttttcaaaaatgtaaaaaggctaaatacctgaaggcgttttccaagttgcacttcgacctcagtagcaaaagatatattgtttgccagcgatttaagtgggtcaaccgttggatctacagatagtaaactcggaatctgcggtgcataaaccagtcgccaccgtgcttgaccaaattcacccttgccttcaatccttggcatcaaagtttcgagtgttgcagttgcgagtttcttgaacgcgagctgtccatcaccttccaatagtgactccgcaagctgtgactcaaaaacctttgcagcctagaaacagcaatgaacaaaagaatatcaaagagttaggcatgataggagaagcacacatattaaccaattgtctaatatctttatgtcagtcttggatagagtgctggcaatcaaccagtaaacggttcaccaggcagtcaccttattatacagtaataaaattctgaaaactagatgaaaataaaccaagaaactatcagacctaaagtaaagcttagctacaattcattgaagaaagtgccttacctcactaggtgaaagaacatcctggtccacagagcgtgtggaggttacaacaagattgtcttgccacatgcttgctcgactttggatcttaaattgccactcagatccaacaagaacaagatccagaataggatccaaaccaagatctggctcaaactttgctacattcaaatgatcatttttaagtcttacctgcataagaataaaaatataaaaccacagtaaccatgagaatgtatatttaatataaaatgacaaagaaggtatgccacaagggcttaagaattctcatgcttacctgagtagcaaccaaattgacctcaccattttcaaaagttaagacacccttaggtcttatgtacttcggatgaaccatgccattaagctcaaggtcgccactcacagcaaaattcaaaattaaaggataaacaatccttaattcaggtccaaatgtgagcttcagatcattgagtcgggcatcaatgtttggcttaaaacttccatgttcaggagtcctttcagtttctgattgttggcctaacacattaaattgaataatccagttgacttgttgagtaaatagacaaaataatagaaagagacaagtaaaggaaaaaaataaatgctgctttccaatattttgtgtaatagcaagagttaggaactaactgtgaaatgaaactactaataagctaagcaaaatgtattggtaaaagggacttgctaaaatactaatgaagatcgaaacaaatgactacttaccgtctggactagttgatagtgatcctagaaagtgggagacatctcgtgagactgttctttggtcaaaaccagcaggaacagagatggatttatttgaagacagcctggtggcaacagcaccattgcctttatcatgaggcaaatacgcttcaccatggcttagccgaatcattccagagacatctggccgcaatattgagcctgtaacctgcagctggctgtctacttggccactgcacaagttaagacgaaagcatattagacaataagaagttatataatacggggtcctacacattgcacagtcaaatttaatttatgacatgtcagatcagcaacatttctgctaaggaatatgacttttttttaatcaaaggaacaattttagaagacaatcaaccagatcacaccaacacccacaagccacaggttagcaaatctgcagcataagaactttcaacatataaaaggataaagtaatggtaatgacctcaaaatattttttgctcgtatgtccagaacttcgcatttcagttcaatcttgtcattggctgatggctcaatattgtggagaggtagagtccctttcattgacaatctccctttcctcccaactctgctttccatggaactgatacatagtctgttagatataacatgaacattgccagcgaaatttgtcagtggtgtccgaaggaaaggagaagccacggttgcacggtgaaatgaggcagacccatcaacaacagggtgatcaacagtgcctttaacctttcatccaaatgacaaacaaggggggaaaggtcatcttggagtgcacaggcataacaaaagaactagctatttaaactgaacttgatgcttaataattcagtttcatcttacattttcatcaatttgaattaatgctatgaaaaaaaggtgaaaatgagtaagcctatgttatttagtcatatatctccttaatggaattatggggattaaataggaatgggcacctggagaagaacttcagcatagccttgaagccagtttgagtaaggactcagtgcagttatcagtgtcatacccccatcctttatatctgcatttattctcacttcgcctggttctagcatattccagcttaaaccctttaggctttcagctaattgaaactcccaaccctcatcaggcttgtctctcatgattcttgtttcgctgatgtcatttgtcaagcctctgtctttcgcccaaacagggattcttattataccttgtttaccatctcccccttccaggtcttcctcaatggagttgctgtctacataagtaacaggaacactaccttgaatgttaacgtgcccactttgtatggtcggttcgaagtttgcatcaaaaacaaaacggcttgttggggttacagaagctaatacttcagctcttccgagatcaatgcctccaatggtgccatcaagaagtcttatttgaacatcacattcaggctttgctagagtacctctcaaatctccctccatatgtagaatgcctttgattggtgtcaaccattgcctcagaaaatgaatcgagtctgtggttgatgattctatagcctgaactaatgcgggtataagaccaactgggaaattaagcacagcaaagtgaagatttgttaatgggccaagaattgatccatcagcatgaagagtggcattatccttctgaataaataacttatcaagacgcaggccatcattattgctgaatgaaccagatgccagaacacgctgtgtcttgtaagtgccccactcccaatcttcaccattgaaatcaaaatcagcctgtagtacataagagtattacaatcaagttcaaatatatggggcatatatttggctcttgtataggaagattatcctgatgatagtttgattgtaatttcaagcttctgtagagttgttcttcaagagacataaaaaagaatgcaaaggaattggaaactaaccgctaactttaacactgcacaatgtcagggacaaagtgaataaagttgaacaatacaagcagggaggtccatatagctaaaagatacttgtatgctcaatccactgtgcaactgtttgcaaagtctaaagagaaagaccactgtaagggagttatcaatagttactgcctgaaatgcttaccatagtatcgccgttccctccaccactggcatcaagagaaccacgccaataacctctcagttcagctaagccaggaagagttatatcctcaattgtatcatcatccaaccaatcaggatacatttctaatgcctggtgcaagcaatgggataggtttaatacaaaagtagcaacctatggtaatggtaacaacagcaatgataaaggcaaccatataacattatatatgatgccaattctatgcatctgtttccattttcataagattgtttactttagtgtacctttagctggtcacgaagactttcagcattgaatccaacagaatgcaaagtttgcataaaaagttcctgaaaagaaaaggaggataaaaatggctctgtcatccaagtctccaacagaccacaaataaacagaatattttgtccctccaaagggaatggcatgcacctttgatctggaacgaatagctgggtctgtacttcgtgatagaagtcttgccaacggaagcatttcagctacttcagcaccaggtacttctaatctcatcctccacctgcccatcgaagacatcatgctaccaagatgccctcccatcgctttctctatgaaaccattactctgactttccatagggaatctatcacgtgttccaggaaaaacatactccccttgaagttcatacttgctattagcttgctctaggactgatttttccatagtaatctgggtgttgaaaagaaaatacaaaagaatagctcaagtgagcacaaaggtggtttatgtctgatgagtaaaagaagataagaatctcactcagaaatcagaatatataaataatgtcaggaaaaacaacatatggacatgcagacgcattgttattttctattttctactgggaaacacaaacgatggagatacatctgttttctcaaaaataaaggagaacaatggagatactagagaggataaatttgctctgtgccaccaaaattgccgccgaagtagcaaaataccatcacaaaggtaaataggaaaacgtcatagcaaagaacaaaaatggaaaacaaaccatcaccatcacctttttttgtccaaagtgttcaacatgaccattctaaccgtaacctttatttcccttgccttcattaatttttttgttagcatcaggtccacctgtcatttgccctatcctctcccctccctattctccagtccacacatgcacatagtgccacagactagccatggggtgaattagaaatctagaaattttctttctaatgaatgggcattaactgcacagaccaactggcatcttaacagtgacggtatttactggagttctttcttgcccattttgtgtttgccaaggtgttttaaagcccagcatcttcatcacagcacttcccaacaccagggcagtttggatggcacggagacggagcaaagttagtctgctagaagccataaataacttataaattgtgacagtgagtaccatacccttgcaactacactcttacggtatattctactaagtgccagacatggggcatgactgtaaagcaaacacgaaaagaatatatgaaaagaagaactcacaacatcaccactccatcgagcagctatatcaagtgattccccaagcatgccactaaattttgggcggataactgacagcaaaccatgacctcttcttttctggaaattaagctggagttctgcctgtaacaacaaaagacccatgtgtaactgttttacataagcatcacaactaactacaacttacaaatacatgggatatagtagaatcaacaaaacagagctagatacagatatgtaaaaaaagactgattcaaatgtgccaatgggctagctaagagaaatttaaaatcataataaaccctgttcttatatagcagtgttaccttctgaacaaacccacgtaatgaagcaaactccagctcatcaagtggcaaatttcgaacctttacaacaagaaaacaaggatagagaaaattagacattcatgccagcagagtacctccaagcaagatcacaatgctctagaaagatctgttggataacatgcaagcatgccagtagagtacctccaaactagtcaaattttcagggtgatagcagatattagatctcagctgccccttttggaggaatattgacaacagccttccgtcttgaatggcctcgtgtgtgccaaaaaataatggcacattcacttctatggaaaaattttcatcgggtctgcctgtagcatttaactgcttggacatggagtagaagacaaaatgaaaagagagcataaattggagcccacacaagtacactgaaatgcaactttaataataaatgcatatgtgctctcaattttgctataatctgttgagagtatgttctcattgaaatgaagtctgtgaagcagtataaactggaaacaaaagtgaatcaaattgataagaaaaatataccttttgtgcatgcatgatcctcaaaccttagttaaaaggcgaatggttgatatagattatgtaaaatttctattttttactattatattcattacttggttttgactttgttttgaggtaatggagaaatacctttagtgtttaaaaatgttaaatgtaggagatgttttaatttataaaatcctctatatagactgaggtctgcctgcagaaacaatcattgttgccagttgtgctaagtgcattgcaacaaagaaatttacaaacaaagggaacataatatggtaccaaatcactttaagtaaagaaatttaaatataaaagcgtgggaacaagaaaaagagcatgtaataacaaattaccattatagaatctggtgatatggaaagaaaaccagtagattgtggtgccagcataagttggttaagtttaattcctgacagagaaatctcgccaacaagccttgatacatcgttctcaagcttactttggtcaatggtaccttgtatagcaccatggttcttctcatcaactaactggctatatttcaccacttttccttgaaatttaaaccttccagatgctttcaaatgtagaggccgtggtgaatcaaaaggtatcgaagaagctatatgagcaaactcaaagcccctcatgcgtaaatccaaatccacaccctccacaatcagtggcataatttttttcctttgatacatctccttatgcagcaaataatcatcaatatatgatgtttgaatatgagtattcaaatcaaaagaaactgatgatgagttgaccataatatagtcatgtgcaataacaatattgccacgcgcatcagaaaaagaatcttctgcatttggtgcagcccatttgatatcaaatttcctgtcagatattatccacagttagatcaggagtaagaaaaagagtcagcccaataggatatttggactgcagatggcacatctaaggtactcacggcctaataagggaaccagaaagtctagtctctccattgagctctccaattttgagtggaatcaactggatgcctccaggaatgtagcgatgcaaaactttgtcaagtaaaatgctcccagacaaattaatatccatagcagaatcatcaccttccccctgcagagatctaaatatatattacacttgcataaggtggtaattaattaagtgcagtgctagtagtagatacttaagcagagactttcttgtaggcccaatttgtatgtatgcatattctttcaatggaatagaacttgcaggttgagaatgcaaattatctagtgggttggtactgaatgtatacaaaattacacatatgtacttgggtgcattattgcacttattaggaactttaatggcacagaagaataggagtagttggctatttgcaggaccctcaacccatttagcggtaaacattgctgtaagcccagagaaatgaacaatgcaatacctccactaggcttcagccatatttatggcataacagaacactgttaacaatgaaataatatggaagaaatgatttgcaatgtttaattcttatactaattttcattttgaaaggatactgatgtcattatatatccatctactctttacacatcacaacccaaaatcctccacttaactctctaaatagattgagaaatcaacaaacatgggctattcaaaacaaaatgaatacactatggcagaagtagaaagaagttagcgaatgcttaaatttaatacagatgtgaaagcattagtgaccaggggtgcaatcaataactacagtacctctgggcaaatccaaacattaccagctcctcgaatttctccaccatccaaaaggcatgctctaatgccatataaatcagcaacctgtagccagtgaaaatacaaaatagtaaagggaaaatcactgccaaacatccataaacttcatactggaaataatggtggctatatttgtactcacgcagttatcaaggttgaaagtgaaatttgctgaaacatgagtgaagggaatatgatcaaaagcggccactgcaccagactctttgttttgcatcacagcttcagaggctgccgatggaagcataccagatactgaaagagacttccttgagacaatcccacttccaacaaaaacaggagcatcaagaggcccttgacagttaaatacggcagtaacagcaccagccaactgaacgaattaagatattgtattaaaaccaaatcttaaaggatgaacattaagggtctgagccataacccataaaggtgttttggcaaacatttacaccatcattagaccattgtaaaatattaaaaattgagtttgacacacatagcctatccaaaagctatttgcacaattgcatgtactaacaaagaaggtaattttgagataaaccaccgcccattgccatgcaatgcagacaagagataatgggtatcaaatgatgcacctagataggttagccagttaactaggtgtttccataaagacactagccatataaaaacacttcctatacaagaagtcacaatttttcattgtactagatatatggactcaatgtagctgtaccaagttacaacttcagaacttcagatggaaaacacatttttctttatcactaaacagcatctcttcatcttttttatcagaatggattcgagtttatttctaatgaagtatagttaaatcatctgtgatgtgtccacatatagtccagcctttatgcaattatgtggaaacaaaccaactcaaaatgataaaggaatccagtatctccagaggagttcagcaactaaatatgagaggaacagtattttgtaccggaaacattaagggtcgcattttcattgttttcataagtgcattaacttcaactgatggaacctggaaagaagatcaaaattatcaagtttatcactgttatgtaaaggaatatttgaatgataaatcaaatatgcacttcgaaagtttaaagatacctggcacattagatgaaactctccatcctcaggatttagaccaaaatcaccagaagcttctaccggagcatcaccaaaccaaccacttgcattatgtagaaatactctttgaccacgaaaagatagagttgccactatatcctgaatgagttcaggctttagttaaaataataataatcatttcgaaagctaccacatgctaacacttcaaaaaagtaccatggatggcaacctagctataatccacagcaagatgttagtgtccaaaaaaaaaaatatatgatacttggaaacattaatggacaatccagttcttgggacataactgttccccacaccccattcttaagtctactgattccatagttattgtttccttgaaatgctaatgaccaattcatttctggcgtcactgcagatcggcagctctcaccctgatgacactaataaccaatatgcacatcatattccttatctccctctttaaacccattttggttgcgtgcaagaaatttatcacatccaacatcggtgaaagttaaggcactgtaaacctataattgcaatatgttgcttacaatcaagtatgcccaattgtttctcagatcttgaaattcaaattccaggttagcctttatgtatacaaatcaataagccctagatgctctggaaatgtaatcacattgcttacacaagtatcaatgtttattggaaatgtaaaaggcatcaatgacaaaaaaaaatatattggtggtcaagttacagcaaattaataagaaagcatcagaccatgctaatgtgtctcataacttgagggaaataaggaaaatatgattctctagaaatatatgcagagtacgagaaaacatattattgggttaagcacggacatactgaaaacgatgatggagcatctaaaatctgaaaagctaggcccttcacatcaagctggccatgaatgctcgggaaactatcacccttcgacatacagagatgcacctgaaggaataacaaggtgaaacgttgctgtaagaaattcatatgttcaaggctgagacaaaaaaaaaagggtttcctcgagacatggatgattttataaagtttgcaataaagccccggataagtccactaattaagtgaatatggaagtcacatctcaaaatttgtcttcagaaacatgcatgtgtgaccatacaaatagtgggaaaataacatgtaagagatcaagtttagaagatcacctcgccagtagctctccctttattccaaacaactggtatttcgaggatccgctcaaacagctgcacatgaaaactacctttgaacacaaagatcaagaataccaacatcctatatttgcatcaaagagaagtctagtaaaaaacacagtagcagaaaaatagatgcattaccggagcaaaagcattgactacattcaaattagcatgccatgtttgctcagctatatcaacaaaaacatcagtagaaagataaccccctccttgagaagtccggtcttgcctccactccatgcagttcccagtgacatgcacatgtacacgattataactgtttttgaacttgatgtgtccattagcatgtttcatttccctacagttggatggcaataagtctacggaagtagtggaatcatttaaatgttatagatggccaatactattaaattgtggcaactgtaagctgagaaaataagatcaaataacatgaatcagaaaccaattatgagaatattctatattttgtaacactgaagggtgattgctattcaatgcagtacattcataggctgctgtaaatggtcaaaagaaaataacatggtttttgtggctgatacaatggacatataaaagcatgagaaagaacagggatttcagtatttgtaatggaaatggagaattacaaggtcaaaccttggttcttggtcaccatatcctagaagcatcagattccctccattgaaatatacagaatccagggtgatgggaagagtttgttgaacagcaccaggatggatctggccaacaccttgtgaaagttcggcagaattgtctcctggaccaatagcaaacaatgacctcaacttctggatctgaacattcagagaagctgatggtgcattgaacccgacaggaaaccccttcaattggaagggccaaaatgatagccagttgtgagcatatgtgcatgaaccaaaagccccaaaatcgaattcttgccggtaatcatcttcggatatatttttacgtttcttcaaaacaggggcttcagatacttgctcattattttcccaagagtgtgaactaatctgactaggttgttgattatgagaacttccattcaagacatccgtattgccaatcagcattgtactagcgaaattgcttttctctggcggtaattcaccataatccatagatgttgtctcagagtattcagttggtccatcatttggactaccttcctcaccaccaccatttgtatgacctccatcagatgagctttcaccaggaccaggcaaagagtcatcaggattaccactacactcgttttgaaaatatgcaacagcagcatatgcgctacgcctaaggatcctttgctgagaagaattgtcagtgtccgatatcaacttgctatgagccttcctcctgtacctgcgcctgctagggtttggaatcatcctagaccagaagctgatccctggaatacgagctttcacgccgaacgatttctccaaatcggcatgtttcgagctggagtcaatgcccgcatcaatgtgatggtccttcctgtgcatttcatcaggacataggtgtgggctggatttcccagtatcaacaggtccatcgtcttccatcatctcatcgatcgaaggcgaaatcgattgggcactaggaacaatgtatcccatttcggcggcttcccttgcagccttatccctctcctcattccactgctcggcggccttctccctcgcgagccgcctcgttttggtgcggtaatcgatcccctcctcccccgaatgcctcttgggtgagccctcggatggcgcggggagccccagccatgagaaatccttcctctgggccacgagcgccgagggctcggacagcacggcgtcgacgacgaccctcccccgcctgaggctggcgaatggcctgaccctgatcttcatgacgggcacctcggcgcaggagaactcctccgcgtgcgggccgatggagcaggtgtggagggtgatcccgagcggggagacgctgcgcaccctgccgaggtggacctcccgctggaggaattcccccagggcggcgcacgcggcggggaggaggcgagactcgacgaaggagcgggcgcggagctgcgcgtaccaggagagcgcggcggcaacggagagcgccgccgcgaagacggagcagcgcacgaggaagagcccctcccgccatagcggcgcgagggaggcgacgagggcctggtacggcggcggcggctgctgctgctgccgccgcgtcgggagcagcggctggtgctgcgagtgcgggtggtgcggcgcggggcagtcgctggagtcggagaccttgaggcggagcagcggcggcgggtcgaagcgggcgcgcgcgacgaggggcctcgtccccggggaggtgtggatgcagcctccctggcggtggcggcggcggcgggacgggtggaggaggggaggcggcggggagaggaagggcgacgcccggaggcagtgggacattgcggccggcggcgagcggcggcggcggcggcggcggcggcgagcctaggtgaccatttgattttggcgttgcgtgcggcgaggggagagatgcttggcttggctttcgccggggggatcgttttgcgtattctcctcgaggtttttttctctttttcttctatctttgtctttactttgctttattttgtctctttgaggatggcttttcagtcttgatttttaagtggaaatctgaataaatgtttataagtacttgttgttgaattatgatattcatcttctgtacattttgatcacttcttttatgaatgttttatatacttatctaaagattatcaaagtacttcctccgtttcacaatgtatgtcattgtagcatttctcatattcatattgatgctaatgaatctagacatatagcattaatatgaatgtggaaaatgctagaatgatttacattgtgaaacggagagagtatgtaaaagtaaagtaaaagtctattgcattcatgctgcttgcacatacgacttcaccatcacatttgcttgcacctaggacttcttcaccatcacaacactgatgcttctcagttccaaaatattttttcaaacttccaacttttccatcacatcaaaactttcctacacacataaaccttcaacttttccatcatattgtttcaatttcaaccaaacttcacacttccaattttgacgtgaactaaacacagcctgtatgaacttgcaagaacatgcagctttgtccattgtggctagactgtttctatcacaaccagggcagcttccattcatcagaatagccaaacaaatcaccagacgccagccacaagaacgccagacactcagtaaaaaatgtccacaggttacattaacacactgagctagcaccacaagcagctagatgatcagctattctactccagaaacacgaacaccgccataaagaacactggagaaatttaaattcgacaccaacaagatccttgctacttctggctcacaacgccaattccagcaacatccccattaaacagcttctaaagtaaggaacaaaagatatgacaacgtaagaacaataactgtcgaccaatttcgacacagcaagccacagcacaaaagagaacgagagtacccaattagcccccactggccatgccgtccattaagttccaccgggtcaacaattcaaaacacaattacatgaccgttttgagaccagaaaggccttcaagaattcgaaatgaatctcagaaaggcgctcaaaggtcataaatacaactcaaaaaagtttattgtgagtccaaaaacgaacaaggggatttttcaaactcagaacatttttcaaaactttggcggccatttaccgcacaggttgctggttgtaatggttcttctctttcttcttggctgccgcgagcctagcgctccttgctgcagcctcagcagctgcaatttttgcagctgtgtctgactctttgcctgatttctttttcttcattgaagccatcttctttaagcgctccttcacatcaacagaggttgtgtcttcatcaggttctgcactggcagtctcctctgtcccatcagctggttcttgtgattctttagcctcctttgctttcttgtttttcttcttcttggaactcttgctctctgaaggtgctggtgcatctccatcaccagtttggtttgaacctttcttctcagctgcaagaaaacaaagcacatgaacaaataaattccataaagacaaccaaccatagagagacacatgctgaggaacacacaaaaaaccatcaagtacaatttcagcatcataaagaaagcaaactaaacaaacagggtatacagtagcacttaccattgttttcatcctgtgcagcattgcttgaaccaccagaaattcccaactcagccagaacagcatcaagttcggctagctccttctttttcaactcctttttggacagctgcctctccgtatctttaggcggtgcaacaggaactgcagctttcttaccagcaggttcagcagaggtatcatccacttcatgctcaggttcatccacagcaccatcatcaacctcatcatcgaggtcctcatcttcactctctacttcctgcagtgcatagaggcaaacacaaataagaattccaccaatcaagcataaagaggcaacagtgaaaatgcagcacccacagtttctgttgagctttatattgtattcaacatcagtcaattatttgttcacatgttttttttggcaccaattatgtgcccctaaaatctaatcataaagaattacatacttatgggaggaaaagaaatttaaaaacatactgttttttataattattcatgaaaaattatacatcgtattcttgttcgataggtaaccagtatattagcagccaaaatagtgtgttcttatttgctgtgtcaattcagtgatatagtgcaaaaagtaactccttgtcaatttatcagctcagcatatgctgtcagacaaacaaaatcacgtcgttggacaaaacaatccacagtataaataaaataaaatcacatcattgaaagaaacagtcctaataaatataaataagcatagcagacatgatatcatatcaagtaatcaataatgactccacctgtgatgttaggttattcatcaaatattgcactgtgtgacaaaaggaaattgttttgccaacggacaaaattaataacgtagtaacaaatacgatacaaacattccaatttaccagttcggtatctaaagcctgttttgaaaactaaccatgcagaaataaatacacctgagatattcccttgtctcctcttaccgtttcatacggatgcattcgtagtttgtaaaaactaataatgcatgcacaagtataactaacgcattctaacctcatgctacggtttcaatatacctacatataaatccaaattatcaccgagcatgtgtttcgcaattccaaaaactaatcttgcagacatcaccactaccattacagcctacataatatcctcctacctcaatccagcaattcctcgcgctacacgagtgcgaaatctattattccaactataatcaaaacgttgcgcagcagaacagcacatgtaatcaagcgaaacaaaaaaaaatccatgcacatcacagacaaataggcatggtacatggaggagagataaataaacctcctgaagggcggcgtggacggcatcgtcgtcgtcctcctcatcctcctccttggccccatcgtcgccatggccggtgccccagacggggcgagggggagcggtggtggcgaagtagtcgtcgtcgtcgtcgtcctcgacgtcggcccaggacttggtggtgaggggcgcgggcgcccagaagacctccttctgctgctgctgctgctgctgagacgacggctgcgccccctgctgctccctcttcctccccgacgacgacgacgagccgcccttggccttgtccccgcccttcttcttcttcttgagcgtctcgagcgcggcgaacacgttgccggtgctgagcttcacctcctccgccgcggcgcccctcctccctcctcccaccataatcaacccccctaaaaaacctcccgaatccgctcaccgccggggaaatctgaatctgggaaacacgcgggccccgcgcgacccccgcgggcacaggccgccgccgatctgcgggggagggtgcggagcggaggacgcggcgatcgggcggcggcggcggggaggaggaggaggaggttggggatgcggcgcgggctagggttttcgtggagaggagacgccgccgccgcgtgcttgcgttgcgtgtggtttgtttagtgagagagagaagaggaggagagggaggggagagctctcccgggttgggcgagttgggttatctgcacacacagaaaagaaaacctatccgcgtcaggtcagggcgcgaggtggagccgtgtgcggcgtactggtgtcacgcacgcgacggacgcgccacctcccggcgtgccgcgtcgcgcacccgcgcgtgcctgggctggggggcctcttgcgttgcgtggctaatctgttggctgttgctagctcagcctaacacgaaaaaaggctggtatattttatatgatggccaaacaccagttcctccgtcccaaaaatataaaagattttaaaagaatgtggtacattttagtactacaaatataaatgtgtacatacatatctaagggtcttttggacatgacacggtttataaatgtttcatcacactatggcagtgtttagcaaatgggtaatggaaataatttcccacccatctttaaatcctaaccattcattctccctctttcatttaatcctagccattcatttatttcccaatcccaatctcacctcccatttctcattatctaaacacaccctataaatatgtcgttaaattatgtttattatagtgataatatgaaggagaatagttctggtagcgagcaatatagaaagtagtatggggtagcttattttggatatgacaccattactgttacattacgctataaatatatcgttaaattatgcttatcttattatagagataataaggagaaagagaatagatatgctagcgagcaatatagaaagtagtacggggtagctcatcatgaagtatggtctataaattctggacttaactacccacaggtgccatatcatctccgaaagttccagttaatctggaattctggatactacaattccttgaacacgacaatataattgcttcaatatattgttgatgtaggagaggatatactcctgttaatctaaagaaacacgcaaataaaagccaagcaaaagaaagcacgcacaaatgaaattgctttaagccatactagtgaagttcagaaacagcgggtcgtctgctatggagcaataggctgtcacatgttcagatatcacaacaccatcaccacctgaccaccccctcctaggggttcacccgttggcagtgacagttttcttccacattgctaccaacgtgtgtcatcaaatggtacatcgaacaagtagtgaaaactttaacataccagttctggagcttctcccaatttacatgaccacaaaaggctagacggctgcttatcatcccgggtgaaaattgtgtacatgttgtagtttggtaaaaatcaaaagaatatactacgcatagcagacaaactatgcagaacattcatggtgacattgcaagtggaaatcatgcaacgaagaatataaagatcatgaggaaaaccatcagcacaaagaatatcttcatcatcagccaccggttcgatgaaatgctgttgagatacttcagtagctggccctgagctccctcaacattggctagtgtgtcatccatgttctcatcaattctgttacggattgtgcgaattttaaacacaacataatctcaggaaaatagaaaagctagtatgtgaggagataaacaatttgacatgaaacagctactccttcctcagccctatgcatgaatcctaaatgtagtgcactgagagaacaagacatcaacatggactagaaaaattctaagagtgaagaactggccaatggccataataattgataaatatatggaaacctattcttactctaaatcattgctgacatacaaaatctagttggaatttaggtcctcaaaggtttttcaactattctcaagttacgccattagtggaaattttgagaccaggagcaaaacagtctattcactgaatttcaggaaaatgttcatctctttatcgcacaatgggaatctccccacaatgagatcacagcatatcttgaagcttataacaattattcaaaataatgatatgaacttgaccataggcataagacagccaactcatgaattaaatggaacagacttttgtaaaagagtgttaacctgattgctagctctccctgctgagaaaccatagttgccagttgtgtaaaaatgttgcttagctcatggatggttgattcaacattttggagagcctccgctctactctgcatgtaactgtcctgctgtactaactgctgctgcatgaatggctgagaagatgatgatgatgctccatgatctccattagtcttcttcctggtgaacagaaccacaaaaaacatttaaaaaaaaaaactaaaaccacactaccaactgaactcggcaaagtatcattgagttgttcttagtggatagcattgagactgtacaatgagttgtttaaggaaaataactggagtaacaagcagtttattgcacatttgcatgcaagtgctaactgcagttactagcctagataggttaaccaaaatctagcaagcaagatggtaggctaggctagtgtgtttttctattggatatgagcacattccccaaaggaactttaacaattgcactttgcataaatatgagcaaattttatacctctgaaacaatggagtagtggcagaatcactggcccatggtgccgggggtacagaggattcaggaccatccctggtaacaaggggacgttgacgaacaaatggatttgatgcattgttcgcagctgatgatgagaacatttgccttctattctcatgaactttcaagttctgcgcattcaaaaataaacaaactaagtaatatatttttactgaagactatcaaaaggaaacaggaaggcatatatttacctctgtccgcatggtaagaacttccttaaattcttttgttgcgctcatcaggcgattttttagattgtccacaactgtagtggaatgatttgttgtatccttggaaaggttgccgctctcattttgtgaattgcagagaacctgtaggtctacaacggcagaattcaaagcagtgatatctttcttgataactgcagtcagctcttgtatctctaccgtagggtcatcaaaaacagatgtcctctttgccactgcaaacaatccaagtcatagattagcaaggtctacagtgtcaaaggaaagcctaaatattagcagagcattgaaataagtatttgtacgttcaagcgttgaggctgtgtccatcaaaggttatatccatctaattcttagtgaagtattgagacaataacactaggtcgttgttgaggctttatggtaatgaaaatatcacatacaacatcattaatacctatgtgcttaactaaatctcaaggagtcaaagatagaaccaatgaatcatagctgagaaaaaatctgcagatgatgatcaacacggtttaaggcaacatataatgtgccaaataaaaagggattacataacttggattctagaaacatattatttgcacaattaataaagtatgaagaagtcatgtgcatcaatgcttatttgccagctataaaacaccatgtgaggaaagtatgcacgaacaagatacatttaatttccaaatccatcaggagctagaacatctaaaagcaacagtcactatcgcaagagctccaaccaactattggccctcgcagcgcatctttgagcagatatgattagttcacgttgaataccattgtaccccccataacacatgcaaactaccgatgcatccagttcaaagagaagaaagaatgcccatattagcttcttgagaacatggtgatgaatcaatcagcagcctattagcaactgtttgatttagtaatcccccaaagtatgcaattcatgacatgatggaactcattgtttataccatgggaacacgattgcagaataccccatcctgactacccacaaaacaacgtgagcaaaatcacaatacccactaaccgcatgggttgagtgggcaccagaagatcaatcagcatggcagaggaagtatgtaatcaaaatatcacaaaataacaagcaagcacatttttagagtatctaactagtcctatggcaactacaagcacaaacagatagcaataatcggctgccacggtactagctaatcatccatacacggtggcaacttcctaggttacaattccatcgagataagatctacagcatgggcatctcgagatcccaacccaatagtatgccaggaaaccggcagctgaactaattggcaaggatgcaagcataagagagaccaacaggagggtagtgaagagccatacaatcgggccgccaacgctgctgtagcgcgccacgctctcgacggcggcatggaactcattggtgcgatcacggaatgacaccagaacgggactcatcaggttcatggtcatggcggacacaagggagctggatcagtatctgaatctaggcgccttggtgggcgtgatggggcagagagtggcggttggttcggtctctgtgggggaggagcaaagcggtggcggaggaggggatcgtgatttggtgggaaatgttaataaggaacaagaaaccagaataaaaccgggaattctctagttgggctccattgcagaacaccacatcgtgagttcctgactagacaggagacaacactagagaaagcaagataccccctaattgcatcggctgattgggcactggaagaacaatcaatcaccatagctgagagatgtaatcgaaatattgtagctagaaaaaaaaatctaacgagtcctactgttactgcaactctggaagcaagcatacatatatagttcagaaaaaaaaatctaactaatcatcggagaccgcacatacagtaataactaatcaatcatccatacatggcgacgacttcctcctaggctacgattccatcgaggacgagatctacagcgcgcggggttcgagatcccagcaacggagagagggcaggcggggcgaagaggagggaggcggcatacgtttggcgaggcgggcgagcttctgcgaggtctggtggatcccgagcccgatcttggaggcgcggcggttgaactccgagtgcgccgaggccgccccccgcgacacgtcgagcgggccgccaacgccgccgccgctgctgctgctgggcgccgccgccgcggaggaggaggcgtagcgcgcggcgctctcgacggcggcgcggaactcgttggtgcggtcgcggaacgacgccggcgccgggcgccccgggttcatggcggcggatctggatctggatctcggcgcggttgggtgggtggcgggtcgacgcggtcgcggtgggagggtgggaggcggaggaagaaggagggaggagaggggatggggatcgagctggaaattgggggagatcggcgagggaaaagaattggcgtaaaatggtgtttctctgcgagtttgatgaatttttttgggtgtcggttgccgggcttgtgtgacttcgtaacgaggtaatccttcttactccggactatacgatggaaaagaaagaagttgtatgtagtaggagtatattccaaaggatttaatgatctgtatatgtaccatttatttttgtaggaatgtaaatatgataaaattaaagaaagaatatatggaaaattttccgttggtatagattaaagtgtgcatgcgttgaaaaaacaggaacccggtcccctttgagttgtgctcaggggcatatccactctccgggtgcagcccctaatggctatgcttggggcacatcgacccctatggccccaaagtgacctactagacctatactttaaagtgtgccgccgcatgagtgatctacatcttcaaaattagccacatcatatggaagaagggttcatcctctcaaacttagaaattttcatcacccctcatagttgtgaccatcatcatcatcaccatccaccaatgatcccacgagtagggttttacacatccggtggggcttcgaaattgtctagaaaagcttgcctctctcattttcattcgcgcaaagcatcacctctgtggaattcaatttgttgttgacaacgatgtgttcattggtgtctttattagtctcaagatatatcggcataatctttttaatgtgctcatataaatagggtgtgtgtatggataatctaaaagtaaaacttcgatgataaaaaaaatgagcaaagtgaaatttaccaataaaaaacaattttcataacgttcccaattgaaaaaaaaaagtaggtggcacaataaaaatagaagtacgattattttcctgtgcttgtgtccactgggccgcaggtgacgcaatgactgatgatgttgtgggttgtggccttccaggcagaccaggccgacagcccatttgagatcaaaaaggacccaaaacagtacactgaacggaccaagatagaggataggaccaaaggggaggagaaaagagaagagagatgaagatagtatatgatgacttacatgtgggtctcgctttttttccttgactatgatgccatgtagacgttaagtgggataaataccctatcaatgcgacactcaggacgaaactgccgttcaaaccgttcgaggaggtaattggtttggtttttatagttgaaggagcctatatacccgattttacggttgagggatacgattcgacctatggcaatagttgagagacgcaaaacagacttattcttagagtccgatattgggtgacacagaattgcagcccatctaaattcagcacccaattcttttgcactgccatttgccaaagaaatatcattttactccctcaaactatttgattagatcatttaaccccattaaaatacgtttggctcattttactcctaaactattgaaaatgatttaccctacttcctaataactttgatttttaaccatttgatccttttgaaaaacttactccatagataaacccttaaaaacccttattataagaatgaactctttgcgcaacgcattcatcgttgccgtggtccactatgtcagcaccaatgacgttggcatcatccccctaccgcttggtggaagccaagttacttgtgtgaaggggaacagtgctaatgccagtggcgcggaggacctatttattaaaaaaataaaaaggacatatttataataaatatttttttacaaataggtcttgcctatttataataggtccatttatataataagttttttttatctatttgtagaatgagttttctaaaagaatcaaaatgtgaaaaattcaatcctaacaacatctctttttcctctctatgtaagctatattttaaactacaattttgtagagccgtagatgacaccatcatcaaacttcatcagtcgttttcttgaactttaaaatcatgatgtttgaatcaattcttaggtacttccaacctaggcaaacagtaacaaaaaaaactaaaaaaatgctgagacgttaagttatatacatgcatacatcatcatcctacaaaaatcattgcaaaacagggagtattataaaaggagtaaaggataaatacataaaccgttttagggtaacgaaaaatggtttagaggattaggtgcttcggtgaaataacttgactaaagcagaatataccttttttccaaacatttcatcatgcttataagtcaacttatgagaaaaaccaatatttttttcgtttggcttttttaagttataagttactcatacactgtcaaactaaagctagattggaataactttttttccttatgtgaagtggaagtataactccatcattaaatttaaggttttaaagccaccatcttataaaaacatataatccaaaacgttagcttaaaagcgtaaggctaaacaaaaggacctcaatgtcaaacactcaaatttaattactgtacatgctaaacgctgaaacttttgactgaacaacaccaaaattacgctgtacatttatacatgcattcacacaatcatttaagttcagtcttagacattgcaagcccctgtgttaggggcaatcttgtttagccttttatataaatagcggctgcttttcattgtgcacaacaagtagttagttgggttaggcagcaatccatccaaatataaacacaacaatatgtgcatgcatgcatgacatatataagtcattggtaggcaaaggcataaagtgatctcacgatcgtcaggagccatcagctacagtctctactaattgtggattcagagcaatgaacacatgcatgaatgaataacaataagcagcctcagtgccatgacaattttcacaggatatatgcatgcaccaatacgcatacactgaattatttgagcctgaatgattaatgttctctccactgcatgagacgaaatgtcaaacaatgtcctaactcctaagtttgtgctgactccattagcatctcctctttgcatatgcatccatgcatgtgttaaatggtaaagtgattagctagcttgagaatagctagtgggtgtgtggatgtaataaagtgaatggctaagattagctagctagctaattacctttttgcagtgggagattgatagatagatctttcttggcaactgctactacttatccgcaatatctgtattcacaatggtcgatagttcgactaaatcacatttctctcgaagttgcaggttttgcagtgttaattaacaacgaaaaagtattctgaaagtgcgaaatataatgaaggatcacgcagaccatttgtttaatcagctgaccagatagcaagcactaacacagctgcacgtactttatgatgaaaagaaaaggagaggtgacaattttatacacaaatatctgtaagcgtaagctaaacgtaatacacctaaacctggctgtatttaagaactacaaattgattgatgactagatatttagactatcatatttttgcaaaacacaatctatcaatgattagattgcggttcgtttcgttcgttcagatgcgccatcatttcagggagagaacaggtggatggctgcatatatatgcaactagctgcatttgccatcttactatctcaccaaccatttcctcaatgtgtctggctctcacgtgttaaatatgaacaaaaaattaaaatgattcgtatcttgacccttagcctgtaatagcagccgccagcgccactgatcattcggaggttgtttggtctaccaatacattattcagaacatgaagagattacacaccaacagtccaatttgctactccaataaaggagggagtatatcgcatagttcaattataaccagctaatcactaattaatcagtgcagactgtgtgcatgtttagttcaactcaaattattacttactgatgaaagatcaatctgtaacatgctgggtcatcaaatattcacaattgactatatatgcagccgacgacgacaatggtcatgagactactgaaaacatgcctgaatatgacaaaaaggagtgagagctcaaaatcttttgtcttctttggtttagttattttctggcccacacgttgtctgaattctttatccagctagcttcttcagagctgaccattattgcatcattggatgcttaaaaagaaattgaattgcatgcatgcatatatccgaaaacgtgtgagtttatctgttcatccaaccactttcagggaaaagctgcatacatgctccatgaaagacaaagcgaaaggtttcttgatccaaaaaagcttctgatatgatggcctccatctaccgaactttcctgttcaaacaatcccttttgcagtttcctttgctctttcccactgtttattcacatcaagatatctctctccctatgcactaatgcttaatttccatgctaatttatttgatgcgttataattgtggagtcagacatgcggcattaaaacattaaaatactgaaaactatgatcataattgataaattacgatcaaagttacacctacatgtcgataaattttgctgctacaaaatcagtccaccggctcaagctggctcggtttcaaaaaaattaaaaataagtcaaagtatatgtaggacatactcacagacctgaaagcatttattatgatcagtattagctattggaccagaggaattatatcagtaatttggtggagttggtggactttacgcgtgtggtatatataaatctcgttaagaagaataattaaagacatgtgaaattggtacaaataaagaatctggagtaattcaaatgttaaaaaaatatattctcgaagatacgcccaatccagacaggaggttaatcagaactaataataattaagctacgcaaatttaattccgctgtcggtcagtcaagctagatcaaagctgcgagcttactataagcatgcactgcagcatatctgcaccaaactagaccactgctattcctttttggttttaaatttgttgtaagccaagttgtctctctcgatcctgattaggagtaactaattcaccacctgctgctaattgacaagttgtctaatcagtcgatctgactgtttatcggtttagcactcgctaatcagtttgatttgatttgattttggatgacctggtccatggacctggtagctttcgtgctctcaatgtgaaggaacatgacgtacttcatcacctttggaacgcgtctctgttcgatctgagtctgaatcatgagcttatgcctgattgagaggtttcatcggattgaaaaagtgaaatatgatgatgaaataaatctatatttacccctgttttaccactgggcgatcagatttttttttttcacatatcaacggttgcaaacagagagtattttagagtacatttttgttgcagatttattagactgtgaaatgtgaaatcatttgtcatgctcactgatttaatttgaaatcgttgctccatttcacaaaaaaaggcctttatccagacaattatgagcataaaacaaacataaattcaactttatagtacaattgcttgtgataataattaatttgacctattaaaaaaaacactgctaatttggagatagagtccagagtctatggagcaggaaggaagggttcagacttgcttggaaagcacatcttcccctacctttgaccacgacgctggaactcacacgagcaggaaatctctgacaatggcaggtgggccccaccccgactccttcctacccacggccgactcccctcctcgtcaccacgttgtccatttgatccaccatttcccaaatccaaaacacctataaataccactcaccctccttgcactccaaacaagtcaaatcaaaccaaccatttcaaaccaaagcaaagcaacgagctagcaagggcaacaacaaccacccctctcctcgtcttcgtagttggttattcctctcagctacaccattttgttaacaatggcggccgccaagtccgtcgagcggctcgggcagcggcgggtggtgccggccgagccgacgccggccggtcccctccgtctgtcgtggctcgaccgctaccctacccagatggcgctgatcgagtcgctccacgtgttcaagccggctctcgatagggcgatcggcggcgatgacgtggcggttgggccggcccgcacgatcgagcgggccttggcgagggccttggtgcattactaccccctcgcgggccggctcgccttctccgactccggcgaggtgtgcgtggactgcggcgacgccggcgtgtggttcacggaggcggaggcgagctgcagcctcgaggacgtggactacctcgagtacccgatgatggtgcccaaggacgagctgctcccgccgacgccggcgggggaggaggagcgcgagctcgtgctgctcgtccaggtcaccgcgttcgcgtgcggcggcttcgtcgtcgggttccggttcagccacgcggtggcggacggccccggcgcagcgcagttcatggccgccgtcggcgagctcgcccgcggcgcgggcggcgtgtccgtcgatcccgtgtggggccgcgacgcgatcccggaccccgccgccgccgtcatcggcagcctccccgaccccgccggcgccaagcgcctcgagtacctcgccgtcgacatctccgccgactacatcaaccacttcaagaaccagtacaacgcggaggcgcacgccgccgccgcgggcgtcgccaggtgctcggcgttcgaggtgctgatcgccaaggcgtggcggagccggacgcgcgcggcggggttcgagcccgacaccaccgtcaacctctgcttcgccatgaacgcgcgccccctcctccacgcctccctcccgcgcggcggcgccgggttctacggcaactgctactacatcatgcgcgtctccgcccccgccgggaaggtggcgggctcgtcggtgacggaggtggtgaagatcatcaaggacgggaagcggcggatgccgtcggagttctcccggtgggccgccggcgacatggccggcggcgacccgtaccagatcacctccgactaccggacgctgctggtgtcggactggacccggctgggcttcgccgaggtggactacgggtggggcccaccggcccacgtcgtgccactgacgaacctggactacatcgccacgtgcatcctcgtcaggccctgggcccacaagcccggggcccggctcatcacccagtgcgtcacccccgaccgcgtcgccgccttccacgagggcctcctcgacctgaactgacgccgccggcggcgaacctggactcgccggaggccgggaggatgggtggattagcgtcgcgtgattaggtgggggtgattactactgatgattagatgggtggtcgttgtgtgattagtgggggttggtaactgaattggattggattagttattaatacggaagctcgtgggtggagcgtggtgtgggtgtgggtgatgtaagcctgaaaataagcagctcaactcctgaaaatcgggggtgtttttggttcatccattcaattgaatttgggttgcatttgataacaatcttcgaattgttgtgtttacgtttacggcgttgtctgaattgtgttcccttctgtccgaaagggacaaaagcggcagaaaattctcgtcagtcactccgttgtcacagggagattcagatctattaaagttggattgcatttcatctaaaagttggattttttgttgcatttggtaagaagtttcaaattctgaattgctccattctgtgcagcagtttgtttgtcagtcactttcagacagattcagtgtctcctggatcttcagacttcagttgcttggtatactgaaacatcagctactgcttcagatcagctggcatgcaaatgcatgcgtgtgttgaggaaaaaaacacgagcagcaagcatgttattggatcgtgattgcctcctgaatttgacctccaggtttagtgggcacggaatccaatctgactgaacccattttttcttcttctgatgaactgtcagtccagttccactggtctccctctttgatattgtttcccaagtgggcttaatatcaaacacttcatgaagagatattatgcacatatatttggtgtaaaattcttaagctgatgagcagcatcagcaggctggcacactgactcacattcctcagcagatgagtcctatacaaatgataaatctgtcagctaaactgttttcagaaactatattttgcatgctcttcagtcttcagggttgcagacttgaacacttcagctcgctggctgtattctttactacttgacaggtgctatgccatctaatttttttagataatagaagctctgttgaacgatcaattatatccaggtaatacaaccgtatcgagaacaggctgtttagaaactcatgtattgtcaagtgcactaaaatggtctgatcagttttgctccaaattccagaaaggaaccaaattttcttgggaacgcctagctgcctgcagagaccgaaacaaaactattggccatttaaaacaagaccgaattaacattcatgattagaaaagccagtttgaattcgattgatctactagcatagagtatagtactagctccactgattacaaaaagaactgatcatgatcaagcattaaaagatgttatctttcatgtgtttcccagcattaacggttctgcaggagcagcttctggagtatggatggctcatccttttgtcagatagtgtccggtctctgggttggttgatcctgcatttcttcaggatcagcagctgcctactgtactggtttagcatttgaccgccacaagaagcggatcaagattccaagaaccaacgtaaataaggaacacatggaacaaaacatcgccactgggatttgtttctttctgaccacatagaaaaacatcaagttgaagctagcagcagccctagttaattgattcatctatcggctgcagaaactaaataattcactttattctgatgccagataatgctagtctagtatagttagtcagttacactatctgaaaaatctgaagaagtgcttcactgcagttcattgcttaccttcgcggcagtcagcaatccttctgcatctgaaagttcagaggatactgcttctatcaaataatcaggtagcataaaatggatcgaacggcatatcttatttactaaagaaatgtctaattctcgaaaattatatggtcatggaggggagcctttctcatagatgatttggctagttctttcatccttttcgatatatggaaatctgcgttcttctgaacaaagtgaagtgcacatactgtattttgttttcgatgatagaactgaatatagcctcacatcgaagatgtatctggacaagaacacattacactgcacaacctgaaatactcctagtaaatatgagcacagaaaaaaaattatagagttgctttattactgaaagtaaacatatcaaaccagtagtcactactcactacatttgttagaggtcattggagaaatcaatgctatgccaaaattgtttccctgacatgtgcgattttgtgctggtcaatcccaccttctacgcacttgtctctcaacaggtcacatccagcaatgaacaacctttccagtgatcctggcaatcccaggtgtggtagggagtctatgctctcacacgatgataaatgcaggctcttcagggaggaaatctggtgcagcgttgcaggcaatgagcggagatatgagcattcactgaacacgagtgttttcaatgaagtcagtgtaccaaatgcttgctcctgctctggagttaggcatatggtttgctgatccgtgtcaatcatcaaatattgaagatacccaagtgtcctacaaattggcatggtaaggaatgataaatcatcaatatgcagtcttttcagtgaggcagtaattctgagatgtgatccctctgcctcttcgacgagatttttccatccctccatgaacttaggacttcttagcacagtcagttctgttagatggatgagagttttcatacatttcaatgtcgtgagctctaggcaatcttctataatcaggtaatccagtcttaccattgggttcagctcaagggaagtaacctgggggcagtcctttattgacaagcagtcaagaatgccaacatttgataaaatttcatgtagtacatcctcagatatcccagaaccgcatatcttgagttcactgatgttagacagtgaggatccagaatcatccatagtcgtcgatacctcagaaatatcatgctttccctggcctttcaatggtagtaccatgaaattatcacaacctggtatgctgaaactcttgaggctcctcaagttatgaaatggcagaaataattgtctttccagcaccaaatcagatatgccagaaattacaatctcttcatcattcaactccatgagagagattatccctgcatttttaaacttatccttgacaacgttgaagaatgtggaagtggaggcaattgatccaggctaggacagttttggatgtcnagcatttcaaggcaagggaaccatttgtagttgacttggtcagaccattgctcaacaggtagcatctgcaagctgggacagtccatgatggtcaatgtcagcaatttaggaaagaagcattctttctcaaccccacaccatgatcgccactctagcatgttctcaaaatgcaactcttctaaacaagggaaacccattaaagagccacttccatagagttcaggacctatgcttaggatggaacccataccagtgaaatgaagtctccttagataaggaagctgtccaagaggaggaagcatttcccatccggagcaatcatgtaggtagagggactccaagtatttggtatgtaaatccgtagctagccatgttggtgatgtagagcctctataatttattatcctgagatgtctgagatttggatggggttgaagaccctcaagaacacttatttctacgtcactgcttctacttttcaagttgctattccaaagtaaatttaactcaaccaggcggtatttttctcttactcctgaattacttgcttcttccttgtttcttacgttctcaagatccccaatggcaagagattgccccatctcccgtaactcttttagctgctcgatactaaacccatttccctttccaacattgaaacagtccaactcctgtaggctggtcagcttcccaatgtaagaaataccagcataaccagcaagcaacttgcttgaagcatcaactaatagatgtctaatgctaatgagattgttaacaccagttggcaatttaacaaggttcttgcaagatcttacatccagtacctgcaaatggcaaagcttgcgtactgattctggcaactcagcgatgtctgagaacctgagatccaagtacctcaaatgtatcaagtcaccaattgttaccggaagggcttcacagtttatatgatgtaagcatagcatgcggagattaatgattcttctgtagttaatagacatgttccaaaatccatcatcagatgcatcagacaatgaaattgttggagaatccataaaccatatggtccttagattattcaactccaggggacgaccaggtggtcttctctcaggtaaactttcattgctcagtgatccatactcgatcagcgagaacttatggcggaaaaatttagcatggtccggagaaaggaaatacaagtggcggaccacatctgggataccttcaggcaaattatcactggtagtgaagcactcatctttagataatgaacttgcaaggtcatgcaataagtcgtgcattctgtaaaggttgtcatttgatgaaacttggaagaatgaagcagatgccaattcgtataggtattcccgtgctgtatcctctagtgttttgtctctcctcatgcactgaataaaaccatgtgccatccaggaaaatattagctcctcttcacagaaagaatagtccttggggaatgctgagcagaatacaaagcaacgttggatgtttgcaggcaggtgttgatagctcaagagaaggactggcatgatatcttcaggtccttgtctcagctcccataagttgctgtctaatatactcatccagtgctctgtagtaagttgcttgtgcaacagctttccaatagtctttgcagccaaaggtataccattcagcttgcttgctattttcctgccaatcaaattcagattatcaaccatatttgcatccccaaatgcgttttgtttgaagaaagaccagaaaggactgtcttgtaaccctccaagaatgactgaaggaattgtgccaacagtattagctatattgtgatgccgagttgtgattatgattttgctccctggtgtcccagatgataagggggcacacaacagttcccagttactgcaggaccacacatcgtcaagaacaattaggaatttcctcttcttgagcttcttcaccagcatggtctgaatgttgtttaaactgagcgaactgataaactgattatgtccttcttcatctattgattgaagtatgtctatggttacctgtttgacatcaagaaatccagacacacatgcccatgcccttacctcaaaacaagtgatggtagctagatcattatacacatactgcacaagggttgtctttcccacaccaccaatgcctacaactgggagcaccaagaagctcttgtacctattttgaatatttgaaaactttgtttccaggagtatctttacaatggtgttcttctcctcatctctgccgtacacctctggttcagtcaagagtgagctggtttgtcttgagtttggaaactttggttgctgcatatcatcagctaccaacttcttgaactgagcaacacgctcaatatgggcggtagctctttgtagacgatcggaaatggatttcatcttgcaagagactgaatcccagtcacatgacacataatcaaaggttggtctggcttttttgaatggagggaaaagggaggaacctgaaattttagtaatgcatgttaaaaggtgatatatgattggaattgtatatgataaatgaaaaggtgataaaatcatgagctaccctaggtcatcctaagcttaaatggaaagaatgctgcaactaactgaataatcacaaaactgtgcaccttattagtcagcaaggaatgttaaaagttttctatcggtttagagtcgtcttctcatcagctgttagtcatcctaggctgcaaaatatttttgcagatgccaacttctccaaagaaaatgaaggacatatgaaatcagtattatgtgttgtttacttcacatatcgccttgctatagtcctttcaggcatgtttggcaagagtccatcctttcatttgtactgaacattttgtttcttattaaagaaaatgacatgcagtctgccttcatgttctcaaaagaaagaaaagttgtgaatagtatcacacacaagaatctagaatagccccaacatttattatgtctgttcttgcagtaatccagcacttgtcttgctcattgcctagtggcccataaagacctatataatccaaggtaagtacttgtaaataagtttcatctagtccaatccagtcaataaattgtatgatctcagtatttccactatatgctacaaaagttaccaaatgattgggctgtactgctgtatagttagagaattcctagtcttttttaagcatagtgatagttcctaagtttcaagaaacatatcgaaaatctcgaacatatttacaattcaacccaattgaatttcatccaaaaagttgaacatagatgcctgattctaaagaagttcaatttctttatctcacatctaagtttagtggagtcaaaagttctcggaagatgagtacctggctggtcaaaagtgttccgaagagctttaggaattgataatccaatgctagcagcaagcttgttttcgcttctgttgtccactatttccataaggcgaaagtagtctaactcatcaagcacatcctctgcatcataagctgaagacttcaaatcccaaactagttgccagatgccctcctccatcacaggactgcctttcagggtcataagtattgccttagccatatcaagctgacgacagaggttttgaaattcacctcctaagtttgcacgatctgcccactgctctaacttggagcttaggtacttgtcgaagattacttgcatgaatatcccaattgtgctcccaataatccctgaatccatggcaggctgaagcgaagagggctagaagatgattcctttatctgtatgtgttgtgtgctatggagatcgagtttacaagataatcattgcttgcaaccatgtcgagcaagaaaacaagtccactacccaagtcaacaaaacataaggtagtatcataaagagccaaatagtgataagacagctggctagttgggtggttggatctaacttgtaatagaaaactactgtgctgacatggacttatgctgagaccatgtagccaaacaggcttgtgcagtatgctggaatttaacaggtgcatgcatgacagtaaccatcaactaatagaaacttctgccgtattcaaacttttcaagttaaaaagatgtttttttccctttttttaataatgccatagtcaagctcgtcattttcatttgctcctcagtattaaacaaagtggacccccttatccccaatatggactgcctagtcgatccgtcgaagtaattcgaactcaagaacagaaaaaaaaaaggagagagaactgcaattcagaatatctcccttatagtgttttttttagggaatacgcagaagactacttgcacacctttgtattaagaagaaattgcaggatacaatggtcgaatttgtcgggatcgacttacccgaattgatttaactacgcgccacggctacagcgtgcaaatctcccctagtatgatacaagcatgacattatggtgctactaacagctactatcgtctcctctacactacgccaggcgtacgacacgcttcatgaatgaaactgaggtaataaatggtgaagaaaagccatgcgaaaactcatgagctcgaatgcgcttaaatctgattatctgaagatgacagaacgatatccgtacctcatcacgagtcgaatcctgcagaaactccgcctgaaaattagcctcgaaaggtctttgaggcagtagcgcatgtgaaccgccgccgcagatcgatctggaccagctgtcctgctccaagtgactacgaatcagggattccacaatggaaaatgcagccacgcgcgcggcgcggggagggagggaatacctcacctcggaggggaggtgccacggcggcttcgacggcgacccccccctcggcgtgctgctcctacgcggcggtggccggcgggaagaacctgggacctgggagcgtacctgtcggtagccggccgccgccgcgccgcacggcccacggggccgggggaaggcccattccggcgacgcggcgtcggccttccacgtgagggcccacctgacagtgcgagaggctttcttgtaggaatccgtatcagctgcagtcgctactgggactacaagctctgttaggtatcccattttcccgttttctgtgcgcatgattttttaactgttaaacgatacgtttttttacaaaaagtttttatacgaaagttgcttaaaaaaatcaaattaatattttttttaaaaaaagctaatacttaattaattacgtgctaatgtaccactgttttcgtgatcactgttccatatgggaacaagaatgtgcgaacacaggcactaccagtttgcatcaacggatgcagatggaacgtccagatcagcgaggcgtactgttcatcatactgtagcagaaacactgcagcacataatactgttggtatggtcactgtatcactagatctgagccgttgatcacagaaatggaaggctgaaattgcatgtagttcttaagttgcagtcatagctataactgcacctgatctgaatacttcttgtagcttgcagggtccacctgtcggggctagatctagaggaaggattgagcaccaaaatccaaacgaaatcctgtaaaaaaaaatccaaacgaaatggatttaagggtctcatatttttgcttatgcttatacttattagctaaaatttgatttaatcttaaatttggagctgatttttaggtcttctcatcgaattttattttccagcctttgtttttagatcgttaagaacacgtatataaaaattttattcataaattacttttcgtttacaaatataccgttttcgattattccgcgaataagcaaaatgatggttacgtaaggccccattcgaacaagggacaagctgccatatttttcatctaaaattctgtacaattgtttttacacacaaaaaatgtatatctttatagaaaaaattcaagaaatgtcattgacaaatacccaaatcatggaaatatcatcgataagtgcgagtttcataaaatgttatcgtacaagtgattttgtccaaaaatgatattatcgttaaggttccgtccaccccgctcagttaaggatactaacggaacgctaacaacgatgacacttttagggcaaagttgcttgtatgataacatttcatgaaacctgtacttattgatagcattttttggaatcagaagcttgtcaatgatatttcttggattttctcatatttatactgtaaatttcaaagttacattataattatattgtaccttttctaatacacaacaaaagatataaagagtaaagaacagatttatgaataggcacacatgtaagttccaaaccacaaaagcaaaggattatatccgtgtactcacaaattaagggctaaaaatttgactctaatctaacgaaaaatctgttgccacttaaataaaaaaaagaaaagattgccataattttgttgaagcaaataatttgcgaacaaattttgtaggattcaaactctattttttttcattttgtttctctgaaacaaatggttggggctttccaaatcctaaaaacatactaattaaatagggaaatctggatgaaagttaacaaaagctccaaacctcttgaaaaaaaaaacttttgagtttatttctctcatccaaatcctttgttttatggaatagtacattatgaggctgagcttgaatacatttcttccataacaattgcctctaagttgttactcccgccattttggagtaattgtcgctgttgactaaaattatctcactttaatcataaattacttttaaataagtatattatgataaataaaagttgcatggttatatttacgacactatatgcttcaacaatatataacatattttgaagcatttttttctgcacaagaatatgagcacatatatttttaattaacacccttaggaaaaacagatgaatagacaataagggaaatgagaaaaggagtctttgatagtatcgcagtaaacaaataaagcaaagaaaagttttaaagaggttagttgatctcttacttgttttactatgaaattaaactatagaaatgcaatcctttagaaaattttctatcctttccaactaactaaagagttccataggaaataatcttaggaagttgactcctccacaagatatatatatatatatatatatatatatatatatatatatatatatatatatatatattgagtgggacaatcctccatttcgaagggccaaaaatcagtaggaatttttttccctcgacacaacgcataactgaactgttcgtcagtaccccaccacaaaggtgaccctgcacgtaccattggctgggcatgcatcacaggctcacagcacactgaaataacaactcatgcgaacttgtccccatatatatactccttccgtactaaaatacaataaattttgggtggacatgatattttagtacgaatggagtttatggacgtcaacaataacagaaaaacaacatgaagaaaaaaaatgatagatcaattaattgaatggaatgcacacagacaattgcttgcagtgcatctgcaacgaaaaataaagaattcttcagaggagtaatatacatgcagtttcagttcatgtacacttgagcaactagttctgttcatagttgcatcagctaaccaattaagtaagcatacacactgatcgattctctttctgtatatatatactgcgcattcgcctcactgatctgtatatatatactgtctcgttgttcgatctgatgatggaaatgggcaaatggccaagaacagcagaattaagatcgagctttcttcagtcggagtcatggttgtgccaacagaggagcatggagacgcacctcccgaggatgtacagcctcgtcttgtgctccttcagcaccgcgttgcaccgcccggcgagccccactccggcgcagccgccgccgactaccttccctcgccgccgccgccgtggcgttggccccatcgccgacgaggaggacaggtggcggtacgccgagcagactgaagaggcggacgatgagagctccatggagaagagatgaaaacgaacgaagaatgtgtttggtgtgtgtgggggtttgcgaaacgatgaggtcgcgatccggtggtttaaataggcgaggtgatgtggcacaggtggaggtagcgagatgacgattctacccccctgggggtatgagacgacactgcgggctgtttagatccctcgtaaaatttttcaccccgtcacatcaaatgtttggatatatgcatgagtattaaatataaacgtaaaaaataaataattacacagattgtgtgtaaattgctagacgaatcttttaagcctaattgctttattatttgacaatgtagtgctacagtaaacatttgctaatgacggattaattaggcttaataaattcgtctcatagtttacaggcggagtttataatttgttttgttattagtctacgtttaatacttcaaatgtgagtccgtacatccgatgtgacacgctagaactttacacctatagatctaaacaccactgagaagatgtgatagtagcaaaggggtaggatggtaaaaatggagtggggaataagagaccggtcgtcgccgtcgccgtcgacggcgtcgagacagatcggtcaaaggcatgcatatgatatatacatgcaccgtcgtcgtcaggcgagcggcggtgcaagcaacgcatgcacgcgcgtacgtacgacgtccggtccccatcccgcgcgcccgccaccggcgtggcgatcgagctagctggcgatcgatcgcggcggggcggcgggcggcggcccacacgggtcggggacgggagagaaggggggggaagcaagctaagcgtgcgtcgtcgtcttcctcgtcaccggcgacacaccacgttgccgcgccccagctagctagatggccccgcgcgccttatcgcctcactgtgcacgcgcgcgcgcgcccactgccacactacatactcgtacacgctataccgctagcggtaggctagcgtatagcttactccctccgtccaataaaaaatcaacctaggatcggatgtaacacatcctaagggtatgtttgaaggagcttctagcaactacagcttctcctagaatttccagttgccagaagctcccctaaacagtctagcttcttacctagattatgagaatctgtagttgtagaatctgtagttgccagaagcccagcttctccaaattctcatcagctagcttctcagcagctgcttagaattttaaactccccaaacaggccctaatactacgaatctagacgtccagattcgtagtactagaatgtgtcgtatacggtactaggttcgttttttatgggacggaaggagtatgtaggtaggctgtagctgctggctgcctgctttcgcgttgttcgtccaagacgtttatttttttactgtactttcagttttttttttcttcttcgaatctgcgaacctttatatgatagattttttttaacctttctagggatatagttttaattctccccaagttgaatccgcgctaaaatacgtaaaatattccttctccagctttgaagaccggcaatgattaatttaatcggttagaattaacgattcgggggttaattaaggtcagggtgagagaaaggaaagagctaagtttattgggtttagagggatagttgtggaagatggtgagcaggaaagggcgaggcgaagcctcgtggtcagttgagggcggatccaaaaaagaaaaaacattatagggtgactcatctccctcttcctcccctctccactttggtctccctcttttccccttctctctccttttataaatggtgatccaacgggatagaaacttgagtatcccaacacccacgttagatccgtcgctgtttagttactagcggtgaaccagggttgaaatggggagtggggtcccgaccagtttggaggtagggatggtggtgcccatgagccatgaggccgattgagggatggtaagctggggcatgaagaagcttagcaacggtaatgcgggcttgagtgaagcgagcaacggagaggaaaggagaagggaagggctagttaaaacgtagttgcacgaattatcaaagcgatattactgctctttttttaatagatgacgctgttgactttttgtcacacgtttgactattaattttattcaaaaaatttacataattataatttattttgttgtgaattattttatcatttaaaatactttaagcatgatttatatcttatatatttgcataaattttttaaacaagacgactaaacgagtgatcaaacatatgtttaaaggtcaataatgtcatctattaaagaacaaatggagtatttagaattcacatgatttatttctcttttacttcctccgtttcacaatgtattaatgtcaatatgaatatgaaaaatgctagaatgacttacgttgcgaaacggagggagtatttcccaagatctctgaatcgatttcgaacacgcaatgcatgagctgtgatcattctcctcctgatggaacatctgtcgtcgtgtgctcactgctgcgcacgcacgtacgcaatgccctgcccacacgtacgtacgtacgtctgccagccagatatactacgcatgagtgcatgaccagcttttgcatttcgcacgagagatttggacgtatcgctgctgcctggtggtggccggtttggaccggcggcagtgagaggcgaggcccagtagcacgttgcattgggcccatcacgcactcatgtgcacagagacagtgtcacactcacacacacatgcctctcttccatctttgaccagattcagactacaccctctttgtcacctacctaacctcggctcactgctcaatgaccaagcgggagattaggctctctctgctctatcctattttcttagccaagtgcagttgcgtttaagtagcacgccccccccccctttctactctaccttgactattgaattgaattcaaactttaattgccctgcttcattcttgccatattgagattctatggaagaaatgaaacgttacccgcctacttatacttcataagtgccaccaatctcgttcaggcactaaactagtttcggggaggatggatggttgtcccttcttctcaatagctgcggcacaacctgggtgtggagacagtttgcatgggttcgtgcacagatttacgttcaataatccctggggctttcacttcgacacgtcttcgttcgtgatcgcttagagccccttttccatcaataggtactcccaaggcgtcgaccacacggcctaacatggcctttcccgcaggaacatccacaatagatccagtgcgcttgacaagatctccttctttaatagcggtatcactaccaaagacaacaatacctacattctcattctcaagattcaaggctattcctttcacaccgctggcaaattccaccatgggtctattctgagaagcagctggttggtagcctgtttttgagaatctaggaagggttgggtttctagtttctaacttctaatttattttctggattatacaactacaacttatcagaatctgaatctaaaactggagaagctcccccaaacaggccgcccatgcatgtaagctgatgtaacgaaaatgtatatcatctcttgctattctcatttggttattcttctttagttccatctgaaggaaaacaataggaaaaagacagtacatcttcattcattcagacatacgacaacatgatatgtgttccatcccatttgattctacattgttatatttttgaacaaatggaatatttttttctttttctcggtgattgaaatttggctcgaaatttctgaaatttaggaaatcccgggggacacagaacgatttcgtatggaaatttcttttttttttaaaaaatattcaatctaaatttgttcaaatttaataaaaatcccattcgaaattcctgagatgcccccgggcataaatacgcaaaacgaaattgcaaatgtatgcacccatagttgccagttggcatagaacccggatgttttcatcggggatatatatgatacagctactctcttcagtcttcaggtttttgtcatctgatctctctgcaccaagatgtgtactacacttcttgctgatcttagatttgccttagaagatcaacaagaaggtgagagggacatgatggagtggttgccaatcgtcattagctgtactaccactgcctgcctgccctgcaaagtctctctccatcagagcaaacaagagaggaccaataattggagatctctctctctggaggatgaacagacaaacaaccatgcattaatccatagttgctttaataattcagtcaatgaataaagttttctcccagctaccccagatacaagttgttggatctgcatgcaagcatgctactaaaaacataaacgtgggagtttactcttctgttcttccattctcatccaatgattatgtgggctcaaatgattatgtcatggtaatatcatctataagtgttgcattacagtagaataaactcaactgctaatctgtacttgctcaagcacttgatgagtgctgggagatctctgcctactaactgaatttacaaaatgcaggcaaaattgatctgatatacaatggagatggttgttttctatacaagggagcagatacaaaggggaggggattttttcctaaacaaggagataattacattgaacctccccggttgaaggttaacctcaacaacctaatatgctcaactcaggtgatcatcatgataactattccaacaccatctataatctgttacagccttacaggcaacttcagttcagaacaaactgcaggcagcaactcatagccatagcctcagcctcataggagtttctgggttaacaccagagagcagtgtaggcaaatgctctattcaagtctgtctgaaaaaaaaagggacttgagaagttgcatgccaatttgtagattgtcaagaatgtgttccatccccatgctcatgggaaagggcatgagagcagctactgttgtgactcgacgtcgttcctgactctgctgttgttgctgtcatggctgctcctggagctcgagtccggagcattcgtcgagccgcctaagtcagccttgcaaagagggcacagtgcgtttatcttgagccatttatcgacgcattccaagtggaaaacatgattgcagggaagctcccgtagatcttcgttgtttgagaactttgacaagcagatgcagcatacctgcagagcccagagatccataggtgtcaattgcatatgtggaaacatgctacagacgtgtaaacatgagcatagtatatcccaggtttggtaaagtgtaaacaggaatgcaggaggacactcacagcgtcttctgcagaaatagttcgctctttgtctgttccagctgccaatactccaccattatcttctcccgcttctccatcttgaaactttttcgattggaacttgtatgccaccaaggcatcgattgcttctgcagtagcgcctctgttaaaatccaaatcctcgtggatgcccatcatggagataatgcagggtaggcagcagcatatcattgtacataggatgaaaggcagggcatagccgatgaagccgaatgcaaggaatactatgcacagcctgaaaaatgatcactaacaaatgagtaaacatctaagttgagaagcaaggaacacattgtctatggctgcttagcatcacagacctgtacaagttaggagcgtcatggagagaagtacggcccccgaatatccacacattcccaacaacaaaccacacagcaaagaaacaatccagagccaatttgaagcacgcaaccaatgcgtagaccctataaagcacagaaggcattgttacctcataaatgaatccaaatgttagttagaagaaagaactcagatggtttcatatgatgttgaatcttctagtatccagataagtgacctaaagtgttagaaatactgaaagcccaactgttttcaatggctaccaggtagacagcaggtgcaaagacatcatagtaaaataaattgctaaagatcatatgaaatttgataacaaaaaacagatcttctcaaatataggcggttgctctgccatagcatatcggtggttgatggttccacttaaacaaacttatgagcctgagagtgagaggtagtgcagtcaaatatactaaagataaattcccaagaaagataatgctaccttggacttgcaatccttgctactccaccattattaccactgtccacaacttctgatccatgagcagacgaaactactacataagaattaggctcatatacgtccctttcagatgaaacctgatttgttgattcttgctctgtgttctgccgattgcggtggagaaatcgccaataaaggtgaggaagagtagcaacacaacctatcgtataaccaataagccactgagccaaaggagcatgaggatgctcgttccttgatactgacaggacagtaatagctgctataatctggcttaaacttacaataagctcaattgagatccagaagccagaattcaaaggatttggttgacggtgtccttgatctcttcttgcaaaagaagcgtttcgggagatagatgcaggagttgcactagcagaactttctgggacatgaggaacatcatttagaggccctctagtttggtgcaactcatccaagttattatgattatcctgatgagatgttgatgggaaagttgcatcatttctcagtatgtcgatcgtgtgatcacgatgactggcatttccagagtcccccatcagtaatggatgactatctgcctgaccttcgcactgtggcccaacaggacggacagcaataaactagaagtttactccacacattagtttcaggacattcctagatatgtagatgttttcaattgaagttgcctttttcacacccttgcttttagtgtaccttaaggaaaggaaagtaaacaaggtgtcaattaactgcctgcctaaacaaagaaagcatgtgtgcaaggtaagacatcatatattgttggacaggattagactagaagggaagatcatagccagaatttaaaaaatactccctcttaattcttatttactacttgttatgtagggcattgaaatagtatgacatgtttgatcattgccttctctaataatatatctataataattatataactaaatgaaattattttcatgataaatctaacaatgtcatttttacatataaaatattaatgttttcttaatatattagtgatttaaaagatttcgagatttgattgcatgtattctaaaatgattatagcctttcccttaggttagaccaatcatctattctcggtttgcattttacattacaagttacttatattacagaatcaattatttcatcaacatactcctgcaatcttagaacttgactgcagatcaatctttcaggagtaattcaacaagtccattaaaacaattccagtggtaaggactcgattgcccccgattagaaagcaacctagttaaaattggattagtagaccaatgcaaatgcaacacaatagcagccatccattatttgcaactcaagaaccttacggtgatgtcagctaatacacaaatgaagcactcagcatggagaaggaatgaacaccatacctcaatgcctcagcagcaaaggtccctctaatcaccaaatctcagcaattcatcaattctcctatttcacctgaacaaacaagaaaacaatgtggacagacagcattggggagagaaagaaaatcaaacagaaccccatcccacaagcatttctatgatcctatcccattggccaagaacccaaatcagcaagaacataggtttcaaaaaaaaaaaaatcagcaagaacatggcagcagctcgtggggatcgaacagttcaaccaagaacgcaagcgaaatcggtggattcggtagcctacgctccactgaattggaactcaccgaagcaagcaatcaaccaatcaatcaatcaatccccaatccaacggagcgagaggaatccggagaaaaatcaaccataccaggtggagatcgcagcttcgattcgaggtagctctcttccccaatttctctattcctttttctccttttatttttcttacgctttcttctccccaatttatctcgcgcatttgggggctctttacttaagtaggaatccccccaggtcagcggtagaggatgaacaggtcgtcgtgaggtcagcgagggaaatttcaacgacacgtggagctcatcccggccgtttgatcagcccgggcgacgagatcggacggtcggggacgggctaagttttctcagcgcacgcgtgcagaattagaaggtttctttttagaattttttttttgttacaggcattttgattttcatcaaaagcgtgtgggattaggttgttgcaatagaggttaaaattacaaaaggtaatatttgcttggctaatgttaggtgaagctttttggctcgtggggaaaacacattttcctcgttttgttatgagacaaataaatacgtgctggtaaaaaagaattg

SEQ ID NO: 1747 - DNA, 7975 bp, Oryza sativa
atctcccaccaatagccaaaattttcccctgccatcatcctagttttttctcatttttttagtgggactccagtacacattgtgaattctcttcttatcaattgggattcccaaatatttcatgggaaaagcacccctttacaagttaaaatatgacagtatatctcttctttttcttgggcccctcctaaacaaaacacctcaattttattgaaatttaccttcaaacatgacatttgttcaaagagacacaagatatacttcaagttttttttgcatactccaggttatcctccagcataaagatagtgtcatcagcatactgcaaaatcactatctcatcctctgtatattccagccctagccctttaaccatcccctgttccactgctctattcattaaaagaggtagagcatcagctgtaatatcaaaaagtagtggagacaaagagtctcctttctcaaacctttataggtttggaaaaaaatcccatatctcatcatttaccttaactgccactttaccctcttcaacacatctcatgatccaatcacaccaaacactagggaagccttttgcttccagcatctaacatagaaatggccattttattttatcataggccttcccgaagtccaccttaaacagaactcctgattgttttttcatatgaacactatttaaaacttcatgcattatcacgactccctccatgatgtttctttctttaagaaaagcagtttgtgctttctcaattaagtcagctatgacataggttagcctcttcatcagggttcttgttatgattttgaaactaacattaaggagacatattggcctaaacttctgaatttatgctgcatttttgcatttaggaattaaggatataaccccatattttagtcttttgatatccaaaatcccctgatgaaaatcatcaaccataacttttagatcattttttatcaccttgcaaaagtgtttattaaaatcagcaggaaaaccatcaggcccaggtgccttgttacttccatttcaaacacaaccttcttcacctcttatagagtaaagggtttcaacaattccttcttttgatcttcagacaattgtcccatctcaaaattttgtaatcttatattagatctttcaggtggcccaaacagatctttataaaaatctgttataaaactcaacatctgctcttgcccatcaatcaacacattctcctgttgcaaagaaaaaaaatcatatcttacctccttctcccattagccttggcatgatagtacttagtgctattatcaccctctaacacatctctctcctttcacctttgtaaccattttagcctctcctcctcatagtaaaccttagttgatcctccaatctccctctctcttctctgctcctcacacatacaccatgattctcacaccatttgttaactttctaactcgctcactaatttctctttttctctcttataatttccttcctaattcatatttgaacccttaagagctttccttcaatctctaagttttctttgccattttttctatatttgagatatcctctttattattcccctaggcttttctcaccacatcatctacatcttctctcaacatccaactattttcaaacttaaaaattgattttttttaataactgatatgtatccaacagaataggagcatgatcagaataaatcctcttcagactttctactattataatggatacttcccctcccagcttttagagagtcacctgattattacaccatgtgaacttcctaccacacatactcaactcccacaaattactttgattaataattgcattaaacagaaaattgtatttattataacatcacttcttatttttatcactttcttttttaattatgttaaagtcaccacaatagcattggatgagactattctgacaaaccaaatttctgctataaactcctctaatgttccaaaaagacatttaattttcttttcttatatttattttacttccataccctttattcacttttggggttaacttaattttaaggggctccttttaatttttttttcattacccaaatctctaggtctaaatttgactttataggatcttagataaattaaaattagaattctccttatcagagctgttaacactaattaacccattatcatctacctcatgtggagcatcctccactttattttccacttccttattaacaaattaatcctagccactttaagatccctaaacaaattagcaagaaggaattggagatacttttgtttatgaaagcattcctgatatcggctgttgactagaacctgcaactgtgagagaaataagatacaatttaatcacaaattcagttacaaaaatagtgcgatttttgaaataacacgaaaatacaattacactcacaagtgtctacgaaaatacaattacactcaccagtgtctcgtaacagcacaagatacaatttaatcacaaatgcagttacagaaatagtgcgattttcgaaataacacaaaaatacaattacactcacaagtgtctacaaaaatataattacactcaccagtgtctcgtaatacaaaaatataattacactcaccagtgtctcgtaacagcataagatacaatttaatcacaaattcaattacaaaaatagtgtgattgttaaaataacacgaaaatacaattacacttacctgtgtctcgtaacaacatatcactaacagggcaaggacgtcggctgggacaacagcgagagcaagggtgaattgggagacgcttccagcagcaactgaaggaagacatgtagagtgtataatatgctgaactgttgtcgcttaggcataatctgtggaagacatctgtgacaccctgcgtagacagggtgatagatgcttttgcccttcctatcgtgcttttgttcatcccggcttccaagtcacggtacactactcaaatcaaatctgcaaccgagccttgcgggccctaaatcacaaatggaaagggtcagtttgtgtgcaatggcgtataaatattacatttacatgtagttttctttttgaggaagaagctccattttttcaggaagaagctctatcttgttatttggcggcttgcaatataagctctcgcagcatgcgggtcagcatgggagtagtggttgtatgaattctagtacactcatttctgagatggtttgccatgtacttaatagaagagcattaaaagaaactgcagaccagacaccaaaagcctactctcgacttcgcttcactataaatatgaattgtgaagggccagagaagcttcccttggattagtgttcttcggcaaccgtcatatctattatgcatgaagaacaatcacaaatgactatacataacataacaaacaaggagattattaggggagagctacaaatcggatgtccgatgatgtaaaaaaatcggacggtcaaatgtttcagttgactattggtgcaacattaagttatacatggtgaaacaaaaaaatcagtctctgaaacatatagaaattttgtgaaacacaatgagaatacatggtgaaacatattgctatcacgtatgaaacaataagtttttattgtttgaaacatatgtttttctttcatcagaatataatcatgtgatatcttgttgtaaacatttaattataacgaattcaacagtgtgatcgaatcgttcatcggataaatagtttagaagaaaaatatttttaagatcactaatatatgcaagcatccatggtgtgggagggagccaatagaatggaatggcaggagagagaaggggcaaaagcgtctcataattttttggtcattagtgaaacattgagttatacatggtcaaacacaaattcaattattgaaacatttaaacttttttatgaaacataatgaaaacacatgttgaaacatattgctaacacgtctgaaacattaaatttaacggattgaaacatatgttttctttcatcagaatataatgatgtgatatgttattgtaaagatttaattataacaaatataatggtgtgttcatatcatagattagataagtagttcagaagaaaaaatattttgaaaatcattaaagcatgtatggatgtgtggagtggacagggagatagtagtttgcttgtccgatttttctcgttacgtcagacgtatgatgctaagcattttccagaaaaaaaaacatgtatcctatcttcctatatatataaagttgtatctaatcatttaaaactttgattttattaaaaataacaaatctcatggcaatgtgtgtggtgccaactagtaattaggctgggttcgttccgtggggttgggatctaatcctcaagcacacaaaacggagcaacacattagcacatgattaataaagtattagctattttttaaatatgatttttaatgcaactttcgtatagaaattttttgtaaaaaatacatcgtttattagtttgaaaatcatgcgcacggaaaagaaggaggtgagttgggaaggctaggaaacgaaattgatttcctttagaatacagggaagtaggtaaatgctgatgagaacattaggactcctcataacaagttcatctagtaacttgctgaaaacaattaaatgaatgttaaaaaaaacgatgagtttttttgacaattttattacaaagatagcacagcagcagtcatatgtcacggttaagaagcctcttaaaatcagcacattcaatatttatcaactcttgatttgaataggtggattcaatactcttcagggaagctatatggttataaaacatagcactcactttctctagccgatcattcaaaataagatgacaacactttacttttcggcagtgcaagagcaaaagaggatgttttatgcatcacctcctgccactgtgttgccaaggaaccctgccaatcgtagttaatgatgtattcatggatccacatcatcaattgtaaaccccatagaaaaataatttcagatatataggttagattatatatactagtagaattgtcccaaattttgaactcttatatcgggcattctgcattcccaatttccctagactctacccagtatttcgcatttctaatttccctagactctttacagtgccatccgcctacgcgtcacagtccccgaagatgacggatataagtatactattatgcttaatatttataagaaaatgaaatttttatgtgactttcaccaagcaatttggggtataggatactgttcctaacatgtaaggttatatggcatatttgatcctagctgtgtagggtgacatgaaagattaactatttctggcaaataattataaatgcattatgattagttataaatgaatcatgtaatatttatctcatagtgattgttattcatcaaaatatgggcctagacaaccgccgtcaccaccactagatgtagaaactgatgatgtatctgttatcgttggtgaaaacaagagttacgaaagtgacaacaattagtgtgtgatgtaagtctgtattttcctaaatgactatttctataatgtatataaagttgtgttttaattcattttctagaacaaaggtactcatattaataaatagatacaaatattaatatttttatttttattgttatttacttcctccgttctatattaaaacattttagttttgtcgtaagttagatttatttaacgtcgaatgagtttagagaaagatggattgatatttgcaatgacgaataaatgtatatattatatatacttattactaattttaagttatataacataacataaggtatatgcatttgtacatagtaaaagacacaattgacttgaatagtatttataatgcactatgatcattagattcataacaaatgttacttttaaatttatccatataagttatatatatatatatatatatatatatatatatatatatatgtttattggtattatctaatattatctatatatattattaattgagagaattctagattatgttttaaaaaaatgtctctcaaattatagcaactagttaaataacttggatgcatcaaaatctctctcaaattctaaaatttgactgacgaggcatcgaaaacaaatctttgttctcaaccttaaagtttactaccttcgtcccacaaagaatgcaatcataacatttgagataataattttgttagatggatagagtggatccaattaacctaaagaagtattttcaacaccctggtataggtatatgcatgttttatacattgttaaataaaatatgaaaaattacatgttgtatacattgttaaataaaatatgaaaaatttggctagatatattatgataataatacattaccatacaagcaggcaactacaattgacaattgaagaaaattaaaataataaattttgtctgcacttatttttgtttcttaaagaacaaatcacttaatcatacatgttgatatatgcacttgagcacttctaacatcacaatcaatctaatcttttttttctatttggatgacatacaaataacggagattgcacctgtagacagtaatatgtccctgttagtgatcccgatgatggccgtggagcagggtggaatggattctaatcccgggtttggagtttggactataattactccctccgttttttaagagatgacgccgttgactttttctcacatgtttgaccattcgtcttattgaaaaaatttatgtaattataatttattttgttatgagttgttttatcactcatagttctttaagtgtgatttatatcttatacatttgcataaaatttttgaataagacgaatggacaaacatgtgagaaaaagtcaacggcgtcatctgttaaaagcgggggtagtatcagactaggaaattgcgggaacaaattaactgcgtatgaaatattggaaatttgatcacaccgtaccatactggagtaccacgttgccattgatcaccgtactaccagatgtacattattaggaataacgagcagctaattacacaagacgccgccccgccggcgagcactaggagctaggatgagccggcgcagtcggcgccggcgaaggtgaccgtgccggcgtcgaggtcgtagccgacgtggatgttctgctgcgcgaggttcccgaggatggacaccggctgctgctccgtcgtcgccacgattgccaggcacagcgtcccctcctgcaccgccacgaacgcgttctccggcttcagcgccaccgccgcgccgccgccgaactccagcgtcaagtccgggatgctctcgccggcctccacctcccgcccggcaacgttgtagcacagctgcagcagcccgtccggcgactgcaccggcggcagcgtgatccggcgggagagctcgtcgacgatcggccccagcagcgacgggtcgaggaacgtcagcgtcgtgccggagtccacgatgatgcgggagctcgccgccgacgccaccgtcttgttcccgaccttgacggagtcgaggaccacggtgtagtacgtgtccacgtcgccggcgacgagcggcgtgctcgccgcgccgggctcggtgacgtcggcgagggcgccgaagttgagcgccgacgaggcgttgacggagtgcgggacgaggcagtaggagaatctccgcccgagcgacgtcgcgccgccgagctgcgtcacgagggagaccgcgccgccgccgaggccgaccagaccgtcggccgggaacgagccggccgtcgcggtggagcagccgaacttgacgccgccgacgcgcacctggcgggggctctccccgagccgccgtcgtcgaaggtgaaggtttcggtggagaggacgccggtggtgttcgacccgtcgccgtaggcgtag

SEQ ID NO: 1748 - DNA, 551 bp, Oryza sativa
actattctaattacaaataactagcatacagatatcacataacaaacaattcaccaacatggccaccatatgttggtctctgcttccagattagcaaacaaagcaatgcactaccatattttttctctacagcacagtagctcaacagatcaaacagaacacaagatatatgataactaccatagtttggtaagtctctaccacaaaggggaacagataatggggatacagattttcaacagtatgaaatacgatgttgatcatagggtaaaaacaagtcgcaataggaaaacgatcacatcatacaaacacaatcacataccctaacgcgattcatgcgttcacaattttaacagtatgaaatacacgatggtgatcagtgggaaagcgctggcactcataccgatggcgagtagcgtgggcttcttcagcgggcgatccgtatagacgtcgggctccggctttcggcgctgcacgatgtggaggtacacgggggacccactcttattgtggttacacgccacgtgcttccttcccgaccccaagaacga

SEQ ID NO: 1749 - DNA, 518 bp, Oryza sativa
aattatagggcgttctctttttaaagtaaatcaaacttgataacttttaactattatcatactaaccatatacatgctaagtattatgcatgttatattactagatatatattttaaagtactttcatgtgatgctaatttcatatttattaggaacataagttggaataaattaatggtcaaattatatcattgaagaccgtataaaaaatatagagcttataatttcaaatggagggagtataatctaacaaagaagcccagtatcaaacagttattaggcacaatgagataacaggaacttagaggaaaaacaaactcaagctaatgcatcaaagatgtataacaatgcacgactgaaagtgacgtgaacttggtacaaaggcagtaaacattttcttttgtttagttgttgcatcatccttaatgtccaaacaaatggcccaaacgaaagaaccgggatattctatacttggacggcatgtcaacacatgggcatctgacactggaacaaatag

SEQ ID NO: 1750 - DNA, 647 bp, Oryza sativa
atcagcagggcggcgacgacggcgcaagggggacgagctcgtcggttggccacgccgcgcgcggggagtggcccagctcgagcacgcagaggaggcgggagggcgccggggcatcgtctaagagggggtcgtggaggacgaggcaacccctccaagtcgccggccgtccgcgcgtgtggaggatctcgccggcagtgctcgcgctgggaggatctcgtcagccggccgcgcgcgagggaggagctcgccggccgtccgcgcgcggggaggatcttgccaaccgtcctcgcgcgggggagtagctcgccggccgtccgcgcacggggaaatagctcgccggccgtccgcgcgcgggagaagcttgccggccgtccgagaaggaagccactggggatgtcgccgagcgccgggttgtgctgcagcatgaggacggagaggctccggcacggggacgacggtggcattgccagcagctgcgcatggcggacacccgctccgtgtcgcgtgcacgctagaagaactccgctagcttgtttgctgcttgctcatgttcttcgacgatttcatggtctctgatttgttctgttcgttcccctttcttgtttcgcgtgatcgccagcgtcttctctgaattcggcaaccatcat

SEQ ID NO: 1751 - DNA, 516 bp, Oryza sativa
agcgtgcggacatcgtcgcgggccaccatcctgtgctggcagatcgggcatgcgtcgttcagcgcccggtccagtgtcctgacgccgccgcgagcacggatgtgctgaaacctctgagcgttgtggtctatcaggttcgccggcgacgccttccacggcagcatgcagcgggcgacacggttgcatattctgcatctcatgccgtgcttgcggttgcggaggcgctcgtcgacgcaggccttgtggaagacgtggtcgcaggagagcgcgcggaccacggcgccggccatcatcttctgtttacacagcttgcactgtggtcgcagcgcctgatccagggtcctgacaccgccgagcgtccaaatccgccgcctataccacatactcagcgtctctcaccccgccgccaggtacggccacggccaccccgccgccgtccacatcctcagcatccgccaccccgcacacagaaggtgaaggaagacgagcgaggccatggcgccgacgaggtccatg

SEQ ID NO: 1752 - DNA, 545 bp, Oryza sativa
aggaggaaggggatgaggagtgggtggaggagggggaggaggaggaggaaggggaggaggagtgggtgggcgaagatgctattcctgttaaagatccagaggtggcatatgatagtaatgatccaccgatgacagaaaatagtgtgtatgaaaacattgtgcaattcagattggcaatagctcagcatgctattaaacatgaattcgagtataacattgttaagactgacccagggaggttcattgccaagtgtgctgctgagggatgtgggtggagaattcatgcctcaactatgcaagacggtgttacaatgcaggttataacttaatttctattgttttttcaacaggtttcatagttttgcagttgctaatgaaacaatgtttttgttcctttgttgttttgacaggtgaagaccaatagtgtgcctcactcttgttcaagtgcaagaagaagtgaaaagattaaacctgcaagtaaggcttggatatgtgaaaaggttaaggattggttgttagaggatgcaaccgtgggagcaaaagaa

SEQ ID NO: 1753 - DNA, 842 bp, Oryza sativa
atctattgctacatatggcctgcaaccatctcgaaaaccatctatgcaaggttttagtgtaaagaatagtcttctgaatctcaacttattcagcactgtgtggtgatcaattacaacaaggcttccagggcattctctttcaattattgccttgtaactgtacaatttgtcaaaactgtcctcccatttaccatacaacttttcaagagccaattccttcccagcatataccctcttgtagttaatcagaactttgtgagtttcaaggatccttctttgcaattcttttgctcccacggttgcatcctctaacaaccaatccttaaccttttcacatatccaagccttacttgcaggtttaatcttttcacttcttcttgcacttgaacaagagtgaggcacactattggtcttcacctgtcaaaacaacaaaggaacaaaaacattgtttcattagcaactgcaaaactatgaaacctgttgaaaaaacaatagaaattaagttataacctgcattgtaacaccgtcttgcatagttgaggcatgaattctccacccacatccctcagcagcacacttggcaatgaacctccctgggtcagtcttaacaatgttatactcgaattcatgtttaatagcatgctgagctattgccaatctgaattgcacaatgttttcatacacactattttctgtcatcggtggatcattactatcatatgccacctctggatctttaacaggaatagcatcttcgcccacccactcctcctccccttcctcctcctcctccccctcctccacccactcctcatccccttcctcctcctcccccttctcct

SEQ ID NO: 1754 - DNA, 8583 bp, Oryza sativa
  unsure (1)..(8583): unsure at all n locations
ttcctgcagcccaaacttcaatttaactttgcctcaactcaagtgcaattgcagtatgtcatgcaaacatcaccaaagattgccatgcaaatatcaccgaaaactgatctaataccaacatctgttgagctttaatttgatttaggtcatattaaataaatttgaggtgaagtaatgaatatcattggcagaaaaaaaaacaatctaaagaccatcaacaattatactatgatccctacattacatatcccacgaacatttgtctgatttttttgtgtgcagggactgaatgagcatctgtgtgacatttttttaaggagaatcacacattggcagaatgtaattagagaaatcttataaagtaacgaactaaccagcaggctagggctgcaaacaccacgacggggtgggttggtgtggggaagggggagcctgaatcttccactgttacagagttgcaggcattttagcaagcatacagatggctaacatcacggctgaaccataccacaaataggggaggaaaatcagtgtaggaacactgtgcaaatcaatttacaagcattgaatggtgcctgcgtttgcagtgcaaattagattcggagaaatacttgctcccacgctgtggacgggaggtcgaggggaacttgggcgccgatggagttgttagctagccaacagcagcgccccccccccccannnnnnnnacagcttggggccaataggatttctatgccacagccaacggaaactacatccgataggagcccaccggccgatggctgccactatcgccaatgggagctggcggcgccgccgatagaagctctgcacatatgtaggtttcattgatcatgaggccagcattatattccaaacagtaaaaaaacaggcttagagcaagttcaatagtatagccaactactagctccaattcatctatagccaatctaatagctcattcatacaatagttacatactacactattaatacctgatcccacctgtcatacacacactgtgtcttggagtccgtgttgcagctggctacaaatctgtagcccgctacccttctctctccttatttatctacttaaaatatgtttgcagctggcttatagtctgttattgtacctgctcttagaaagtagtataaccattcaaagccccacgattgttgtaggattaacaaaattaacaaacagcaggtgctattgcaatgctgcagttccattgagttgtatcagctttgcacactattggccgaaatttttcaatttgtaatttcagaagaacaggggctacccattaaaaccagtattggtctatcggatgaaaatagccaataggcatgcagaaaacatggttaaaaacaaaatgaaggtggaaagattttgttcctgtaaatctgatgaaaaattcaaaagcaaactaatgagagttaaaataaatgattctgaacttaactctgaaaagagcttagaaaagttgatgatattcgcaacatcatattccttttgaataaataatatgaactccaagcaactattatctacgtttatgccatcgattaaagacactttccattaggagatagatatattagttgcacattttgtagaactcatgaatatttggaggtactctccatgcattggttatgtatttgtgtatttctggtgatgacctgaatttgtttcagattacaccaaactctcaatatattttgaggatgaattatgaatacactcagaggtctttcttggaaggaagattactgtgatctcactaagaacaacaataatagtgcagtatacacatatcagttatcaatgttgataattcaaaacaacaatgcaaactttttggtgggtcaaaatgtgcgagcagatcatgtgaaaatgtgcatatattctgttcggtttcagaatatgcgaaggacgaaatggactaggaagagggaggctttatcgacggcctggacgaaatggattaatataatattttaatcaactttccaatataactttttataaaatacgtaccgtttactagttgtgatctcactttgaacaacaataatagtgcagtatacacatatcagttatcaatgttgataattcaaaacaacaatgcaaactttttggtcggtcaaaatgtgcaagcagagcatgtgaaaatgtgcatatattctgttcggtttcagaatatgcgaaggacgaaatggactaggaagagggaggctttactgacggcccggacgaaatggattaatatgctattttaatcaacttttcgatataactttttataaaatacgtaccgtttagggcccctttaatttgtaagaaaaatgtaggaaatttgaaggacttcaattctatgaaaaaaattcctatgaaagcctttgaaacaaaggattaggattgaatcctatactatcttttaaaattcctatggaatgtgtaatcctacagagattttggaggaaagttagcaagaggtccaacctcttggaaaaatttatttgagtctatctctctcatccgattcctgcgtttttcctgtggtccaatcaaacggtcattcttatgtttttcctgtattttcctctattttacatctgcattcctatcagaatcctgtattttttctattcctgcgtttttccatttctgcgattcaaagcggccctcagtagtttggtaaatatgtgtgtgaaaaacgatagagatagttggaaaaggtgagggaagaacaccgcctaaacacaaaatcaggcacacccccatatattttggttgcatctgtcgctcttgctagttgtggtgttaacaactttcgtgcatgtggtgaggggcgtacctgactgtttgacacgaacgaggaacattctctcaaaggtgcttttacctttacctccttcagccagctaggaaaatcgccgacgtgtcaagccggacagcgtccttcctaagccactcgcccccacacaaggagacgcgatatgcaagtgcgtgtatacgatcaaatcaaatgaacagatcagatcacaccggagatgttgttacttgtttcgtggaaggaagaagaagacagtcggaagactgcctcaaacttgaaataaagaagaggataatgtgctggttcggcaagggaacgctgcgccgaggaaaaatgatactcctccgtttcaaaattagtacaattttacaccgtttgtctaatttaattttttttataattagtattttatttattattattattattagataataaaacatgattagtattttatatgattaatttttttatatataaatttttaaataagacggacgacacgtgtaaccacggctaggatggagatagtacttattaacacatggttcccacagatacatttttttcaagtgctacattaacgccatgtggtataaaaactcagtcaaacaaaacacttaggctgtgtttagtttagtgcaaagtttggattttggttgaaattaaagataatgtgactgaaaagttatgtgtgtatgacaagttgatgtgatggaaaaggactgaagtttggatccaaattttggatctaaacacagccttagacgtgttgttagcaacatctaaatcaatccgggttgcaccagtttaaagagatggacttgaatgtggcatttcggttcaagttcaaaagtcagactctgggtaaaatcgagggacgtaaaataaactgcattatctcatcatgtaggttgttaagctctactgaattgattattttgttggtgaaacgaaaatgtgatgttggtcaaagaaagtagagaatctgatgcagatcgacggagcatacgttgcaatgatacaaacaaatatgaagttaacgatggtcgaggttaaaatgtacaatgaaagagtgtagattctaagtacgaactatcttcgatggctgtgaagctatgtatctgtggagctttatatcgaaaacaactccaatcggcaatagcactatagcagaaaaggtgatttcgatggctagaaaaggtaggtttctagtccaatgtggcatgtgctgttcttgctatggacttctccttgccgcaaatgacctcactttctatttcaggccctgcaaaaacagttaatcagacatgaatatttaaggaagacattaaaatttctctattttgctatattcttgcttctaaagttttgtatggactagaatggatcgaaaaaggtagattaagcccaattactttgttttgtcatttacttcaagacccttcactgtacatagaaaacacataataccagggaccaccactgtacataattatggaccagcaagttcgtcactttcaggataatgtaggacaaatataacacagtaggaaaaacagaacaagaaaaaccttgaacagaactaagaaaacagtgacaaatgtgaagattaacggcacagtttttttgaaaaccagagctaattagagctaaaatgtgacatacaggtaaagcaacaatcatagaacatcaaaacagaagattcagcatgatataatcactagacactttaacagacctgtagtaggctgtaccaagttttccaccttccagtcctaccaggcctcccgccttgagagttctcttactgaccctataataccttgcatcaacttcttcatattgaaaatcctcatcagaaaagtcatcacacaacacatcaaaaacactatcaaccagcactccagaactgtactcaaactcatcatcggagctaaaattggtaaaatcatctaccattgctgcaaaagcggtaaaatgtggttaattttcatgcaaccgataataatgtgtaataaaaacagtgaccacattagatagccataatctacagtgttttctgtttacaggcagacaggctccttcaattaatcataagaagtcaacataagaccacacaatcaaaaccaattagacaacaaaatactattacacctcccaaatgtaatttatcataggaatagagctacaacagcaagcaaccgtggtattaaacactcacaatgttacaacccattaattataaggtgtccaagtaaataagaaataaaaaattaaacagggtgttaataagaaatgtcttactaagccaacataaaattaaacaggctggcctcagaaggtaccttgagaacgctgcgatgcagctttagaaacaagtggccgtaagtgcgcaagcctataaacttcacggtcaaagtcctcatcagaattgttggagaccaaccttagcacagacgagtatctgcattgttcaaaaatctagagctgattacaactttaatgaaaccacattgttcaaatatatagagctgattaaacattaatgaaaactaccagacacctatgaggctacaaaagtgaacaaaacaaacaagataatggatttaacaaaacacgtcactacagtcagcaaaggaacacaaatcatccggtaagggaaattaggccaacatttcatcactccttaaatatgttctatgcaccaacaggttacatgataatgcactcatcacatgcaacaacagaaacactccctccattcaatccactcaacaaacaagaaacaggggaagctaacataaggtcaaccaagaattgctcagaaccaactacacattggaaaaatctaagcatcaataagcagaacaatcaactaggttcaataagggattcaaatagctatggcttgagaacagggcaagatcatatcaatctcttgaaaaaaaaaggagaaacagcacaacgaatcaactatacgtcacatccacctaacaatacaagattcccccaattgtgtggcaggggatcagatccgaatagacaatcacatgatcaatagctgcacaacgaattaacaagtatacgccaaatccacctaacaacaagatacaccaatcatagcaggggatcagatccgcataggtaatcacttgatcaatagcagcacaacgaattaacaagtgaacgtcaaaacaacctaacaagaagaatcaccaggggatcagatccgaatagacgaagaaatggcaaaaatataacatacgaagggcgtgccgctggcgcaacaggtgagggcgcctctggagaaggagccgcaggtgagggcgccttggaagaaggagccgccgttgcggtcgccttgggagcgggaccagccggtgcagtcgccttgggagcgggacccgccgctgcgggcgccttgcgagcgggaccagccggtgcggtcgccttgggagcgggacccgccgcagcgggcgccttgggagcgggagccgccggcgactgagacatcacgccgatcggggaggtggccgtggcctaggcggtggcggtggcggcgcaagtgctcggcgaaatcgtgattttggcggagaagaagagatcggagaggctgtatcgctcatttataccagcgtgtcgaggataatgtgctgcggctaaatgttcgtgtttcgcaaggaaatccggcaccagcacgttgaggctaatggtctgtgtccaattgttcgtgttttggaacatccagtaatttttatggttctgatcgggctagtgggccagaaatgtgagaggtagaaataatcgaatttcatcaaaaaaaaggccatccgaatcacagaagtgagaaaaccaggagtactttttagctaaaacacagaggggaaatgcgccgtgagggatgtgtcgaaacaatactgctgctactaaatggtacggaagaatcgtaagagtaaaaagaattgaagaaaacgttcgaaaaaactaataggctggaagacattaaaacacaaatggaattaaccaaaggataaaacatcgacaaagaaaaacaaacataaacaaaaaaaaggtaagacaatgatgaaaatattttaccggttgttagatcccagatctgaagaaacgacccgtcacgaacccacggatccgacgggaccggacggatccaacggctggcggaccggatcaaatcaaacagcttgacaagaataccggggcgccgccagtggctggattggtagactcgggccttcgccgcacaagccaacccagccaggagaacgattgctgctacggccggcggcgtgggacacggccaccgttgatgcaggccacagatagcatgtcgccaagacacaccatgggaggtggccgccgtcgtaaatcaaccggtcacacatgcgcctgcctcagtcgtcgcagtcagaggccaggctcaagctggcaccatggaacggctgtagagaccaacaccgtccctcgactgtacaggccggccaaagagactcctccggcgaggccaggtacgaggccatatgtcagagacctcgccaagggctaaagccggcaacttgccggccggctgcagagaccaaggccagacgtccctccactatagaggacggccacagagacatccctgccgagaccaaggccgtcctctgcagtcacagatacatcaccgccggcgaggcagggtgaggaggccataggtcggcagcaggcgccgaaaccaggccgccggcgaccggcgagagaagttcctgtatgagattgggtgggagacaaatgaatgagatggaaagaggcggccaaggggtggagaggaaaccccccctcttgttatatagcggtgagatcccacgcgggcggagaaacctaggttcacacgaaaagcctgccactacctttacgcgtcaacaggaccctacctgtcatcctgcgtcagagtaaaaaacgggtggccattcaaacctttccaattttgcgccgtcgaaagaggtgcgatgctaaccgcaccgcccggtgacgggacgcctccgcaaccaccagtcgacacgcaattaactaccccaccacataacgcctcccccacacagggtcaccgtgcagtggggccacgagcgctaaagataaacgtggtggggcccgcttgggagggtggtggggaaagcgaaaacgagagatctgggaactctacaccacccacccgacacgggaatcccacctgcgtttatcttttcagttttttattagtagatttttatttatgtagtagtacttctctctgacgctctggtcctagctgtcaattgagagcaagtttaattcggaccactagcttcaaattatctatagtcaatttaataactaatttatacaatagttacatattacactattgataattagtctcaccagtcctacacacattacgtcttgaagtccatgctacagctgactataaatctgtagcctgatatttttctctctcctcttttatctctttaaaatatgtttattgctggtttatagcttgctactcttgctatggtagatgctgtgaaacatagtacttctacagtaataaaaaaaaaggagccccccgagactggctcacacagccagctgcagatggaccaatcagctgtagtagtaaaaaaaatttaactcgccgcggtgaaacggacgggtcggttgggttgtcacttgtcgcgccttttgaacctttg

SEQ ID NO: 1755 - DNA, 13913 bp, Oryza sativa
gcccccccccccctccctcgaatttttttttgttttatttgtttgatatttttttcacgcttagggacacacaagaaccaaccatagaaaaattgaactcaaatgaacgtaatatgtgacctatagaatttttcctctcctctcctctctctccgaactagtgcaaaggggagatgtacaacttttttatttttattttatttttttgatattttttcacacttaggaactcacaggaaccaaccatgtaaaaaataaactcaaacggacgaaatatgtggcatgtgaaattttccaaagctctaccgaaaaacttctctcctcgaaaacacaatcttgcaagcggaatttggaggttttaatatcgccgaacccggcaaagctagggagaattggatgtaactttttctgtagatgtccgtgcatatattatttgcctgattccgagtccgtatgagaaagttacgcctattttaatagatgacatattttgtccgtttcggtagagttttggaaaattctacaagtcacatattttgtccgtttgagtttattttttatacggttggttcctatgttctcctaagtgtgaaaaaaatatcaaaaaaataaaataaaaataaaaaaattgcatctctatgtactgtttaacttatatatgtcatttcatgtggttatattttgaattagattaagtaatttcatatagtggtagagtgcattatgtttaacatgctgatcaaagggttttactaaagaaattatggtctaattttagtgaaggtgcaaagtagactaagtggtatgctagctattttcagacttagctaagtggtagttcgagtttaaattttttttgtggttggttgtatcgtgatcctgagtgtgaaaaaaatccgaaaaaataaaataaaaatgacaccgttgcaactccatacagaaaaacagaaatggaggcggcagcgcagccatgctggcgccctcctcccttgggcggcgccagcatggctggcgccctcctcctgccacatcggttcgcgtgcgccacggtggcagaaggacggcgcctctcgttggatgacggcgccagccactctagcaccccaaaaagaaccatttctgggataagttttttcaggagtctatttgcgaaataaatttttcaaaatgaccaaaatgtgaaaaatccagtcaccttccccactttgaaaaaagaggagtagtagcttgctgattggtgttttacatttaggtaaaaaaaataaaaatcgttgattatgccgatcttctactgctgcctaatttgggtacattgttttaagaaaaaaattaaggcgcctgcttggctgtgttttgacacgtcgttgttgcctagctagcctgtctcccatgtgtgtcgccgacgtgttggacccacccgcatttacggacccacatgggtaacgtgaggccgtgataaactgggcaccacaaaggcacaaaccgaccggaccaaacaaatgtgactcgcacggtcgcaccacaaaccgaccggaccacaaaatgtggcccgcacggtcgcaccacaaaccgacggattcgcctcctcctcccccgtccgagagttgtggttggattggaccgaaggaccaaacacgatcaagcacggtatacatttttttttgtgcgaatttattccctcacgacttttttagtgaatgaccaccctgtcatatatgtttccatgagacactgtacgctcgtggacaacgctgcgaccgatagaagttcttcagctcgatgcctcgatacctctctaacacgtgaatgctatattttcatagtatattggtagtgttatttattttcatacaccaaatgtttccatgcttaattgctgatattaaaagttgccaggttctgaaaatcacgtcacacccaattatcgatttccatatgtgctaactccatacgagtaaatcccaattactcgtatcgatttccttatgtgctccagctgtagtatatacttccaaagttccaaattgaggctaggctggacccaaatactagtataaggaaaaagaaagcagtatttatatttttccttatttttctattttttttcctttctagggagatccagccaattcttctggcaccgtttctcttagctgtagctgtaggattgtcttgacacgtccttgtttcctagcccgcgcccatttgttccaccgacgagtgggacccacccgccattagttggaacaatatgggtaaggcaccacacccacaaacgggacccacacgtaacccggtgaagtgtgttcacgctttttgacacttcaagatgatacttcttcggtctcaaaataaacaactcctacaccttcttactattagagcaagtttataatagtgcagtcaattatttgttttaaatcatttataatcaattttcatataatcgtttcatataaacatatactccctcctttcaaaagtctaaatcatattcgtagttagtcactatgtgctatattattttttttatcggaaccaaaaaattattttagtacttattggttacatgtttattggttttggattaataagttaattacacattagtcttggtgaaaaagaaacaggactaaacttttggaaggagggagtactacacaatcaaactacgtgtcatacacacatgcatgttagagtccgtgctgcagttggatacaaatctgtagcacattgatcttctctctcatctcttatctcctcgaaatgtgtttatggctggtttatagtctgctattgcacctgctcttacctacccccaatatgcaaattgagaaattttattactccactaccctcacttagccatcaaccaatataattttcacattaattaaggatgcagtggtctatccttaccggtaattgtgcacggcacaatgcacgtttcccacgttagctatcgtaatcacataaaaacacttaaattttgttgcattttcctgtataatatgtcacgcgaaatatacaaatatactaaaattttaagaactatatgtactatgggagaatttactatttgccactttaccaaaataccagtgctcaaatgattgcttaaattaataaatgaacaagatgtgtggcaagacttattggaaaggaaaaatcttaatagtaaatcaataactcatgtagagagaaaacaaggggattcccatttttatctggcctgatgaaggtaaatagttacttctaaatatgggttctattccgcttaatgtttctttcaggagagctttagttggtcagaatttggtcaattggcataatttgtgtggttcagttgtgcatattaatttaacagagaaggatgatatatttagatggaattttcataaaattggtcactattctgtaagatcattgtatttagccttgattaataatgggtatatagaaagaaatagatcatttggaagcttaagatgccccttaagattaagatttttatgtgtatctccttaaaggaattgtgttgataaaagataatttggctaagagaaattcaaatggtagtttgagatgttgtttttttatgaaagaaccttatgaaaggtgaaacctaaactgaaacataaatgagccacatcatccaataaatattagccattggattcatgaaaaacaaaagagggtgaatgaatcaagaccgttggattagatggatgataaaaaaaatattcaaataggttttcggaagctactagaagaggaaaaaaaggaaaaatgaaagagagccaggaaataagtaaaggaagataaaagattacatatatatttttacgatctgcacctatagcaaattattttttcaaatgagcccttcatcttttaggtaagattaattggtagggattgaaggtagggattgaactattaagagcatattcaaaatgtatactcgtatgataaatttagtttctataagttaattgttaatatgtttgataagaaaaatgctactgggacatacatattccttccaatgagaggtcattatctcccaaatatagatttaatgattttcacactgatttaaaacaaaacaaaattattccttataaacagacaaaatatatgtacgtaggctacataaagggtgaacaccaaagtcgaataaggggatgatagagggggtcatgtaacgatgaaaacaactataggatgagatgtaaagtttacaataaataggaagtcatttattatatcagcataatatcactcatcccacccatattcttttacgagcaacgagaagcccaagagagatggcttgccactctaatgtaccatgttacaggattttagagtccggcgaacgcgcgacatgatgtgctagttttttatgaaaaacggaacatttttccatcttttcctatattgtcatttttctagatttctttggagatcaattcaattctcatttgaattatacccaccacatagtatttctcatatgtttgagaattggctggtgggagttaataaaaaaattaagaaacttattcttgtatgggctttcaccgtatgttagactatttggcttagtaaaaatgatacagtttatgataaaacaccaacaaaatattatttgcaagtacttttcaaggcaacggggatgggctcaactacaaaggtatgataatgatatcaagctaataaatgatgcatgtcgtaaacccgagtcgataattatgcacctttttaccaactttggatggagattctcgaatagaattcataaattcagggttcttttatcttgtgtggttgggcccaactacaaaggcatgatgatgatatcaagctaataaatgatgaatgtcgtaaatttgagtcgacgattatgcaaatcgggattctcgaatagaattcagcaatttagggtctttttatcttgcgtttgtgttttctttacagtgtgtgctaagtttgtttatgtgtggactttataataattggttgtagctcgttagcaaaggtcgaaatgttactccattatcttcttataaaaggaaaaaaatacgaattaccccctaaactatcgtggtcgaccaaaatagccccttgaactcaaaaaccagacatcgctcaccttgaatttttaataccagacaacaccccctagtactattgcaagcggtttagggttcaaatagcacatgtggcagtccagtcatccttttttttaaaaaaaaaatcgctaggacccacttgtcagaatccccacccacctctttcttttccatccccttttgaagcgtgcgacggccggggagagggcgtgacgctaccggcactcttctccctcctcttctgaagcgcgcggcggcggggggagacggggtgacacagtagggtgcgtgcgatcggcggcggcatggaggcagaggtgagggcagcgcgtgccggtagcggcatggaagcggatgtgagggttgtgtggcaagcacacagaggacacggcgacagtcggagtgctgctaaatctatcgtctatctttcttccctttggtgcgcagtgagattggggagggcgcgttgcgacggggccagaggggtagcgccgtcagcgagggcgtcgggaaggagaggagattggagcggaggcggcggtgacagcgatggagcgggtggcggaggagcaaccgggcgcggggatgtaacaccctgaaaattcgacgacaaaaatctaaactctaaaaatacggattttcaaaaactttttaaattaattgcatcatgccgatcttattcgcctattttatttgaatttgatctcgaagtttattaatcgtgagtaaagattagttgtggataggaataaataaagtattatcgcgaccatatttggatcaattaaatttaaatatgatggaataagaattaaccctaattaaaaattcaaataaattatataaaaataaaatatgagtaatattaatctagggtgaattcattagttgagataacacaaatattgagtaaaatgcatatatccaaaaattaggaattgtggaatcaaatttatatgggaaatacactaaaatcgggataaataggaaaagccactattcattgccccctaggtgttcggtcgcgttccctagccctagcccctcctctgccgcgttgccctcgcgccccgcacgccgcgcgccgctccgcctcccctctgccgtcgccgtcgccatcaccgcgcgtgccgccgtcgcctcgccgcccgcccgtcgccatcgccgcctgccgccgcgctgacatcaccgagccgccccgagcccgcgccgacatcgccacccccgtgccgcgcgtgctgccgtcccgttgccgcgttgcctcgagccccgcgccgccgtcccttcgccgagtcgccgcccgtcaccgtcaagcccgcgccgcgccgtcctatcgttgctgtcacgccgtgccgtcgtgtcgccgcccatcgcatcccgccccgagccgcgcgccaccgctgtcgccgtcgccatcgacgtcccgtcgccgcgcgcgtcccatcgccgctgccgcgccgcgcgccgtctcgtcgcctcgcgccgcgagcccgccgcctcgcgccccgcgccgccgcgccgccgtcgtttcacccctccccctccttcccctctctttcttcccctctcccctataaagaccccggcccaatcccccccttctccaccccactccattccctcctcttctccctcttccccttctccacgcgccgccgtcgtcgcgccgccgcgccgccgttgtcgtgccgccgcgccgccaccttcgaagccgccgcgccgtcgccccggagccgccgcgccgtgcgtcgtcgccttgcgctgccgtcgccgtcgtcgccgccaccgccgccgccggtgagccgtcttccccccctcacctcgcgcccaccgccgtcgccgcccggggaagcaaagagccgagagagagagagatatagaaagaagccgggagggagcagagaaaaagaaaagagaggaaaggaggaaggagccgggaggagagaaagaaaagaaaagagaaaagagagaaaaagaaagagaggagagaaaaagagggaaaatagaaaagaagaaaaggagaaaatagaagggaaatttggggagaaattaggaggatttaggaaataaaaatggtcggggttaatcgtagattatttttggaaattcctcgagcgtaatagtatttcggtcgaaattccgagttaattataaaaatatgtttcttgatcagattagattaaaattagtagtaatttagatataattaataactaaacaattagatgaattcttatagattattatagattatttttggtaatctctaaaagtcatcggttcacggtagaaattcggatttaattactagggattttagccgtgtattatatttaatcatttagtcatagactaaattaaatcatataatatttctaggatttcgtccgatatttagctcgcgatagaaatctctaacctattatatggatataatgctcgggtagattaaattaaaaacttatgacaacaaaatatttatacccgcaaaatagtttaagtcgaaattgggtttgccgtagttcgcagatagtaaagtttataaaaaggaatcgactttcacattcgactttcatttggatttatttggatttttatttgaattctaaccgaattcaaatcaatttttgcacgtaactatagagcccgagggagttgcggatccaagcgaaggcaagacccgcaagactctgagcaaggcaagtcatcactattccttgaacatgttgatcccaattgcgaaattgttttgtttacaaataaaattgcatgcaatgatgaacatcctacttgtgattatgccatgccttgattattgtttacccttaaatctttgtaaccatgtttacgtatgagtccctagtcaactatgacaattgcttagaaatgctattctagaatcatgcatactcatatttatcaaatgctatatgcttgggcaattacctttgggaaggtaattgagatgcggcatgtggagacatgagcgccacattgccatgatgttgatgacatgatttgtgaaaggagaaataaaattaaataactgttttcgactggggcggacggaggatttgggtggtatctggaaaaggctagtaccgtccccggtcaattaaggaccgagccatgaagttaagcatgaaacaacccccgtacaaccgcacttctcgtatgggtatagacctagcggattagatagccgagcggaggcagtatccctgcatagatggttcacccctgagtgaggcaggtgcgctacgatgggacagccgttgaggtagggccgagaagcgtgccctacatcggtgtcgccattggtaggactgccatgagtgtgtgagagagagaacttaacttgaaccataatttaatatgcgtgtgagacttctctttcccgggagcgccagaactcctctcactgctagaaacatggacgcctagagtgcatgaggatttaagttcatggagcgggtactgccaatgcgaggttatcgaaaagctttgccgtgacgcgtctcatgtgttgggacgaggctcatgtgttgggcagtcgcggagtgcgggtaaagtgtacatccactgcagtgtgagtaaaccaaatctattcgaatagccgtgctcgcggttattgagcaccgggacatgtattacacttggctagactctaaattctttaacttgtgtgggatgggatattgcatgatgatttttatgctgatggagccacttcctgagaggcgggaacgtggacgtcctcagaaaaccataacgactcaatggcgggaagctatccttgggatcacaatggatggtggacagaaccgtcattgtttaatatgaacactggtattaaaacttgatcagtctatgctaggtcttaggcttgtgaaaagaattacaaaacttgctttgcgcaaaagaaccatagccatcctttgaattcctctgtcatgtgcatcattgctgtggtggcttgctgagtacggttggtactcacccttgcaaatataaaattaatcagaagcgggagatgaagcctcggaggatccctatgcctactaccaggagggagatgaagacgatggcgctcagtaggtcttagtacggtcgttgcctgtggcaatggcatgccgctgcctgaattccgctgccttatctatttctgcttttggatgtattccggaccgctcggtccgatgatttaagactacgcctgcggggttatgatgtaataattcgtattagacactcgtgtatgtgcacttggtatttcagctatgaattcgtgtgtaccagactacttgatctagggaaattgtactgtttacacaattgattcctgttataaaaacgggggtccacaggggacgacggggatgggcgacaaacttgttaccgtagcctgccgcctccaatgtcctcggtgccgcccgtctcaccctcttcaccgcgcgcgcctcgccttccccgtggaggactcgtcgaccaccgcctgcctgagctgagaagagatagagagagagggggggggggaagagggaggcctcactgccgtctccagggaagggagcatcagcggcgccgactagtgacgtcgacaatgaaccactcgtctcctcttgtgcttgttgctccgagtcctcgtctttgcatggatacaggaaagaggagtcgggagagagagagaaagagggaggcgacgcgtgccgacggcgctcacccgtgaccccgagatacctcagcctttccgctaaccacgccgccctcacctccgtggtcactggcctctacagccaccccgccgcatcacccctctcccccacccccgccatggctaccttctcgtgtaagtctggcgtcatccgccgctcccccgaccacaggaggacaaggcatatggtgagctcgacatgccagccatagcccgcgcgcgtgccgctcgttcttagcggcgagcgagcaacgggcgagagagatagaggtgagaggggatagagaggagagcgactatgacaggtaggcccaacattttttaaaataaaaaaatactaactggattgccacgtagggccaaaaccactccgatgttgagttagggggtgttttttcctgtattgaaagtttagggtgagcgatatctgcttttcaagttaaaggggtaattcggttcactgcgatagttcaaccagtaattcatactttttccaaaagaaaaaaaaaacaaacaactttcaggcgtttcccttccttcctgacgagtttttggtgttcgtcttccctcccgcgcccgcgccttctcgctcgcgcgcccgcggggacgcggcggctagggcgatgcagctggtggacgacgccgacggggccctcgactcgtgggcccgcttctgcgacctctccgacgagctcttcggcggcgccggcgacctctcggcgggcccgcgcctggcccccgtcgtcgcggacctctgcgcccgcggcctcgccgagctgcttcgggaccaattcatccgctccctagaggtgacgcaacccccacgcttctctacccacactcacctgctgcgtgttgctcccgccgcgcggagtattggggggctttctgcattgcacggttttggggactcggatcgcgctgcgcgctgagtgtttgtgagaatgcctgccccgaatttgagacggtgtagcagtagcagagggggtatggacttgggctcaaagaccctttcgtgtgtgcttggccatagacagtcaaggttgaactaggccacactatggaaacatggggtagacgggtagtaggactagtttgctttcgctgaaacaattgtcaggacatcacttctttcatcccttcaggtttgtggtgaacccttttatttatctgtgacgtagttaaaaaggagggaagagatggccacaatgcacagggtggctgtttcctgtttgtcagacaggcagagccccctgcaatttaggggagagtatctatgtgctagagtgtctacaatacttgttttagttttatttgagcattgaaaattgacagaatgcctcaggttttcaggttggtttgaaattgtaatggcttaggatttgcacttaacttttttcactccttacattttagttgaattagctcttatgcaaacatataagaggatcctagtctaaaagatgccatattatctgttgcaagtctgctggctgtttaaaattctatacccttgctcgtatttatggaatgctatgcaaagctttttattcttactctttctctattcaacctgtccttattaatgcagggaatatttagaagcaacgcggttaagaagttctggcagcagtttcatccttattgcaattcctctgcagtggaaagaattaaattctgtgtgagttacagaatagttaattatttgttcatccatacgtttgtttcagggtagaaaatttatgttgcagaaatgacatcttgcctgcttcatattctgattgtctttcttgcatacccaggatgtgatatctttcatatgttgtatcaagaaatgaaatggcattctttgtattgaaagatgaaaccataaaaccatcccagccatgcaaatattttaaagatactttcaccagtttgtcaatactgctgtatcataatttgaaactagtgaataaagtgtatattagtaatcatcttacctaatttcggtcttttaacattttacaacagcataatttctctaaccatgaatttcaggttcaagaaaactggcctgaggatatcttaagtaaagcattggaagacatatgtttggaaaagaattaccaggaaaagtgtgttctggctctagttcattctttacaatcttatgaggataggtcaccacacagaaaatctaaagcactggattgtagttccagcttaatgcctaggtaccagttaatggtatcttcagtacttctgacaacactaccattgagttttcctggttagtatctttttcaccactgttttactgtatgaaaaggcttgagtttgacactgagccaattctgaaatgtttaccatgacttccatttctgaaccttgcggagtggtttgtgtttctctagattattctttagaatcatgaaggatagggtgcatggcaacacaaacaatgttatattttcagtttgttttctaggcatcagttttctaggcctcacaatgatctttagaccagttatgactaaactggagtgttgtgttatctcctatgcgttaattcttccaagactcatgtggccttttcataaagagggaaagatttattactagtattaaatcttatagagccgcagattgatgcaaattacccaactgcctttacttttttggcacttttggatgggatatttatggtttccaaactttgttctctgtatctttgctcctttggtcctgccatctgggggccatatgaataatcactcattgttaggacaataagttagaatatggatgaaactgcaaattggatcttgtattggcaatttggattgattttattagcctctgcagaaaaggtcataaccattggaaagcattcaacaatccaaaattttttctattcatgtagcatgcatacccatcttccacattatagttgggttgcggccgtccttttttttgttttttgtttaaggttactttacagggtttcttggattgatggaatcatggacagatctcctattctcctccctctgataaaatcagttacaatatcctcttttagctgccagagcacagcatgcttgttgcacacccactgacacagttagttcaggaatattgcacatgaaacattctacagttactaattaatccaaatagaagctattgtttttaacaaatacattttcctgaaattataatattggtgacttgtttttttttctacttgatctgtagagatattaaatgtatacttcaagaagaaactggaagagttaaatatcatgatggctggattggatgggagcgatccatttgataatcatgatctttttgaaaggaacagtacctctgcttggcattctgaaatggacattgatggtcaagaacctgggatttctgaaagtagaaatttggttaagaacattggaaaagttgttcgtgatctaagatatcttggttttacatcaatgactgaggactcatactcttctgcaataatctggcttttaaaggtccaggctcacttctttaccttaagtacctagtgtataccacatatattattttggcatggacaatcttgaatttctgcctgtatccttatctgaactctcaattctcatattgcagtctaaagttcatgaactagctggtgatgattatagaattcctgtacttgggtgtgtcaaaaagtggattcaggtaacctttcttatcctcattcagtcatttattcagaaacatctccctgtccgtcaaatttgttctgtgtttctagcttcatattatacccgcttaagtagttgggtcttgtaaggataaattattctctgcaggtttagccttttttccctcgcacatatttgaattgaaataagacttagtgttaatgtaatagagctgtcacatcagtgcatctatcatgagctagtgcgccttaagaatattaatttttgtctcattgttctttcaattacttaatacctcttttgaatcagttctgtaagtccattgtatttagtgtaacatgatatctactatgcccttaattccat

SEQ ID NO: 1756 - DNA, 23729 bp, Oryza sativa
aaggaggtctatatagcatgatataatttatttagttattgctttttttcgtcatctctttttgtgaccagtgaataatttgttgctcttgaaccaaacatctgcatttcttttcatgtgccacaccatgtcttttccatgttaaggtctaaccaaatatgttcacacttcacacggccatctcaaacagaagagtttgcttatgatatttcttttatgttgcattaatttagttttattctttatgatgtatgtgttcttaactggagcacagtttttaatctggaaatttttgggtattgatgaagctctcctgccattgaagacctaaaacagtgtttggagtacacgggtcaacattctaaacttgttgactcatttatctcatcattgagatatcgcttgctgacggctggtgcatcaaccaatgatatattacaccagtacgtgtccactatcaaggcattacgtacaattgatcccactggtgtcttcttggaagcagtaggtgaaccaattagagattacctgagaggtagaaaggacactatcaaatgcatagtaacaatgctcactgatggatctggaggaaacgcgaacggaactggaaatgctggggacaatcttctggaagaattgaatagagatgctgaaaaccaggaaaatgttgattatgatgaccatacgaacattgatgagaagcaagcatggctaaatgctgaaaggtatatttgctctctgtttcttgaactattaagaaataattgctcctttaataagtacatcaataaaactgctgtcattgtgattccaacttttacagctgggaacctgatcctgtggaagcagacccattaaagggcagcaggaatagaaggaaaattgatattcttggacttattgtcagtataattgggtcaaaggaccagctagtcaatgaatatcgtgtaatgctggcagaaaaactgctcaataaatctgattttgatattgattcagatatccgcacgctggaactgcttaaggttggactgttacttttgtgattgtcttcttagctatgccttttctatgtatttgattgaattgcatatgatgctattccttagttgttatctctattttttttaatgatgctgttgttttggcagattcattttggggagagcagcatgcagaagtgtgagattatgcttaatgacttgattgactcaaagagaaccaactcaaatattaaaacatctttatcaaagacatctcaaactggtactgcttaaactgcgagtgcttgtaccaaacagatcaaatgttacagcgtttgcatttaaactctcttcttttttgtcagtaggaactgtgcaagaggagacagaattgtctcatgaggttcttgacgcaactataatatcctccaatttctggccaccaattcaggtatggtacaaagcttttatcgaaaccatcatggtaactgttgagctaaattagtgtcatctgtcatgtcttcccttttcttattttctgctggggcgtggggagacctatgactaaaatagtcttcagttctcatactaatatttcatatggtaaggagatgttgattcacagctattgtaaattggaaatctctaatcatgttgaacttgttgctcaaccaagaatcatgcggtcaattactgatgttcgatctttactgtttatttcacttgaccttagtacgacaatctgtctagattcactaaacctctcaaaacaaatgtagacagaagacctcacagttcctgcttcagttgatcagttgctgtctgattatgcaaaaaggtttcatcagataaaaacaccacgcaagctactctggaagaaaaatcttggaactgtcaaggttggtatgaaactttaaactgaatgtgtagctacaaggaatcattcctttttaagaatttcttttattttcccagctggaactgcaattcgaggataggagtatgcagtttactgtagctcctgtccatgctgcaatcataatgcaatttcaagagaaaccaaggtaataaaactaccatgctgcacatggctcttatttactcttaattgaggtcatcaattttttttcagttggacttcaaagaccctagctacagcaatcggagtacctgtggactctcttaacagaaagataagtttctggacaagcaaggtgtggcaaatacataatactcgtacttagcatgctgcatttttgttagtaccttatgaattctttagtatccgaccaaatcactgtagcacattcatgcttggtgctcctaacaattatgatggaccatcaatcgtttttattgtgattttttcagtgtgaattctttagacttatgatcagatgggctagacagttaacacttcatatcatctatatttgagtttgcatgaaacatataagttgtggttaatataattggtaaacagaaatggatgtaggatatctttaaacatgatttaggctccatgacatctgtaaggcgttcctgaagagaacctctcaaatttagtatgattaaaccaacttatgatttaaacctaatttcatgctatatcgtagggcgtcctgacagaatcagttggtccagatgcggatgaccccacatttactgttgttgatagcacatctgattttaacaaaaacagcaccgtgaaccaactctctgaaaggtttcaaattactgaagaggaaggtgaaagttcgattgcgtctgttgaggaacaacttaggaaagagatgacagtttatgaggtttgtttcttgagatctcaagaatgtgttgaaaagaagatgccttcgttagttatgtcatttatcagttctccctacaccaaccaagtaatcattcatttgactccattcgctgtactgcagaaattcatcatcgggatgctaaccaattttggaagcatgacactggaccggatacacaacactctcaaggcaagataaatgggacactgtccattcatcctctctctatattaatcttttaacccattcgttaatttcatccaaaattgcttgtttcagatgttctgcatagccgagccatcatatgataaatcactgcagcaattgcagagttttctttctggtctagtgtcagacgaaaagctggagatgagggatggatcatacttgctaaggaagtaggagttacatggattagcctgttcatctgttagactagatatggaaggtaatcaactagtcacaccatcatcatctgatggttacactatgaccatccggttcctaaaatgtactccattttactcttcttgttgcaggaactgaagaatggaggccccatcctgcgccattcacctcactgcgtgcagtaatattctgcactcgctgttttgttccttgctgaggggatgacgaaagtagagaagcacaggaatcctaaagcttttgaatgttgttattgtgcgtatattgcactgttgacgcttgacgacgctctcaacgcgttcggttgttttccgacgtggataaatgcatatcttttcggtctgtaaatgacagaaagaaattcaaccagacttcttggcattaaatggcaggggcaatggccggaatgccttttggctactggcacccttcggtgtcagcttacttatcactcgtggccgtgggttcgtcaacacgtgcgtgcattattcaagtgtggccgtgcttacacttgacaagttgacatgttaaaaacagtcatctctgaaaaaaaattatgatgttcaatgatctaatgtgatgttgcagtgaaaactgaacatgaatttggcatgtccggcgaggagtttggatgagatggctattcttttctctattataaatgcagcttcaaaacatgtagtgagatgtatgtaatcaaatgttatgtttactcattttttgaaaggaggtgtgtttactcattcatataaaaaaaaagttacactggtgtacaaaacccatactacagtgacaatgctgctggagtacaagcatccataaatagaagttattagaccagacatttgaccatgtaaggcccctcaagttcataacccagtttacggtagtagtggcgagtccccactcctgatataacagcgattttctttgaacgatgctccttgcgagcaattctttctgcttcttccatcaaaagagtaccataaccctgtcgatgttgagtcaaaaaaaaatcagaaatgtaatttatatttctggacaatcaagttaggaagtatatctataggcatgtaccaattgcaagtcaaaacaggagaaataatcaccatttatagagcaacactacatttcctctaatgataagaaattggataatatgtgacaatataccataccagaatgccatactattgagaagtttagacactaagcttgatttaaaacagtgactacaatttatcaagcgtgccaggatatctaatttgcaagcatagcaaagtcgttggtgctaactgctactaatactgtcatggcaccgatccatttcccaaacatggtatgctaataatatcacatgtactatggtcacctggtgttgtagtttgtctgcatcacgaccatgtacagggactgcagttccatatacatgaagttcacggacaattgaacacctccctactagctcagggcatgtaacattgcggccacattttcgcaatcgcagcagaccaataaggatatcctgtataatttgtaagatggcaaaatgtgagtgctccaaaagattgagagaacataaggccaagcgttgaactctgcagaatagtatcgatctaataattttaaaaataacaaataaatacttcaatggactgctgaaagtctgaaacacataacagtaaaaattcccggaccaagaagataggtgttggtcatataatttcaaacaggcctgctcagacattctgcatattttcaagttccccaaaatcacatgaaatgctggcaaaatatatgtacctgctgtgtatcctcgtatgagagaaaggtctcccagccctcatttgcagcatagtcacgcctaacaagctctacttcgtcaggtctaattttgtgatggatatcctacataaagacaaacaacgaaaataataaggacaaagagctaagttaaattacaagcatgtgagagtgagaggagatgcagtgttccagacctgaattcccgcctcacgagttctaacatctcggcacttcaagcctaaatcttccattcgagccaaagcaagctcacgaagattacctttttcaacaccagaagtaacaagaggcatagggatatctctttgtacacggtaaactcgtgtccaaggtggtaccatggatagaattcttgcaacaatatccaccagaagttcaggtggatagtttcggtatctgaaacacaacaaacattggcagggcctaagttctcactaaaaagttctagagaacaaacacaacagtgaacacaagactagcaatctagaatatcaagtgctagataaaataagtacctgccagttttccagagctcataaaggccagttccacgaatcacaagagttggataaatctttagaccatcagctcggaatgctggattttcaaaaaattctcggaaactttccagatctctttcaactccaacattaggtaaatctggcatcatgtgggcgaccacctatcaaaaggtaatcaatggaggattaaaacagttcaaccatatgagatgatactttattttaacaaatgctgccagcaacaagttgactaaacgagatgattaatgatttaaggagactaccttaaaaccagcatctttagccaaacaaaagcaatcagcaacagcagctacagtgtgacctctgtttgtgtcacgtgcaacatcctcgtatgtgctctgaacaccaatttctaagcgggtacaaccataagatagcatctggcgcaaatgaggccccaagcaataatcaggtctcctgtaattttgaggaaagacaacaatagtttatagaactgaagttaataaagatgtttcatggggaaatcatacagaaccatcaaggaacctaagcatatgggtagtttagattgtcaaatgatcttacgtctcaattgtcatgccaatacatttgactgcaccatgttctgaataacaaacagcctcttcaacattagcagaagtgtgtcccgataaggcatcatgaagatttctaatgaaataatcccgataatcagctggtaatgacatgaaagttccacccatcaatatgaattcgacctgcataatgtattcaaattattttaaacttatgatagcattaatcaaatgtaactagaaagtgaatcgaattactcaaaccaagacacaacactctcaagggtaagggcaaaccttgtctacactatggcctagccttttgagctgatctatcctgcttctggcctgcacatatggattgtacctacaagtagacagatcagaaagttctgaaacccaaagggatgaagcagtcaaaataatggcgacaacttcatggctatatcgcccaacacaatctgttgctatagaactgccagaccaaaagatcactagtgggcattggtgtactttcttgtttcattagctagtgaactttgatcacagtaattaatgagttgtgcatcatttgtactcctctaatgcaagtcttcaatttcgacaaaataactaccccgtggcttgctgacaatcgactaattttcaataaataacagaactctgccttcacttgcagttcagcatacttcaaaacaacactagagaaagcatcgccgtgcagctcatctcacaggtggtatagtatttccaagtgacatcagtagccagtgaggtaaatcaccttgctcgaatggcgcgcatgctggtgggctcgtagccggtgtaggactgggtgctgtactcgaagtcggagtcggggcctccggggcagtacacgcagatgttccccgtggtggcgatgtgggggcaccggtgcggcttcgacatcacggcgaccacggcaatgcccgacgccgtgcgcacgggcttggcgcgcagccttgggagcagcgcggcgcggtcggcctccggcaccgccgcgatcatctccaccagcttcggcgcccgcgccagcccgtacctccggcacgcggccgacttgagcgcgttcaggtccacgtcctcccctcgccgcgagagctcccccatcgccgacacgatctccgcgatggcccgcacccgcgcctcctcctccgacagccccgcggggagcaccactccccctctccccggcgccggcttcctcctgcgcggctgctcgccgccgccgccaccgccggcggcggctacggcggtggccatcggtggaaagggttttgggtctctcggtgagagctcgggatgtagcgtggcgtggcggcgcgggtcggaactcggaaacggaatggggtttggagtttggactcgggtcggtgttgcgctttgcccttgtacacgtgccgtactagatctcggccccccgcacagccgtcggatcgtggtacggacgtctcagataagaccacgtcgctctgcaacgtcgtagtagcctggaaatactctcccgaattaaaaactttggaggacgaaactagccttctctccttctctctcgtgttctctcccaatctcttcttgcggcggaagcaaagcgagaagcgaggcgactcttctccggcggcggcggcggcggaagcggcggcgagatggacggcggcgtaggcgaggaagggaagcagcagccgcacctggtgctggcgcacaagctgttcctgctctcgcacccggacgtggacgacctcgccaaggtcgacctccgcgccgatgtcctcgccgcagtcaaatccgatggtagaaaacctcaaccccccccctccactcgaatcaatggccgtggcagcttccgcttgccgcgtgcttctgactctgtgtgtgtgtgtgtgtgtgtgtgtgtgtgtgtgtgtgtgtgtgtgtgtgtgtgtgtgtgtgtgtgggaatttggcgcttgagttgatttgatttgatttgatctgatcgatgtgcttggcgtcagatatggcgtctctgtacgagtcgctgggggccggcggcgtgctggagacggacgctgcgctgctcgcggagatgcgcggcaggatcgaggaggagatccggaagcttgacgagaagtgagtagatctcgcttgctcaccttttcctgttcgatttgaagtctaggttctagggtttcatagaaatcgtggagttgacgcatctaataccgtgactagatcgctactttcatactcgtatctctagtctgtaattgtccattgttcaatgttagtgcgcttaatttgctttagcacatctgaccatcaattggttagtcctgttttctgtaacagaattatcaattgagatttgtttttctgcattaagggcatgccgagttctgctcatctgaattagagtaatctaatctagccatccagattagaacaaaatgtttagtgatgataaatataaatttgatgatcgcatggacaaaataaatgctgttgaggaagcactttagtttatgccatcataaattttatcaacacttgctgaaaggctcacaatttgtgcttgttatggatagctttccgttcttcttctagcatacatgagttatcattttgcttgagagtactattctgaaatataatcaaagttgttcagttatattcttgttgttaaaaatcgtcctttatccctgaaggatcgctgatgctgaagagaatttgggtgagagtgaagtgcgtgaagcccatctagccaaatcgttgtatttcataagggttggagagaaggtaatgtatcatgtatcttcaacattgttctaggatatcatccacatcacgtagatatgctgtcttaataactgaaatttcaggagaaggcactagaacagcttaaagttactgaaggaaaaactgtagctgttgggcaaaagatggaccttgttttccacactttacagattgggtttttctatatggattttgatctcatctctaagtctattgacaaagccaaaaagtaagtccgaagtctctcatttttgttatttataatgttttgcttgtttttttgttttgcattatgatgtctaatacttcacaaatttgttggctggattgaagattgtttgaggagggtggtgattgggagaggaagaacagattgaaagtgtacgagggcttatactgcatggccactagaaacttcaagaaagctgcaagcttatttttggattcaatttcaacattcacaacctatgagttgttcccctatgatacattcatattctacacagttcttacaagtgttatctcattggatcgtgtatccctaaaggcaaaggtatattcgtctttgcctagtgaggtttgctttattagcttgaatgtccattgaacaaaaatatctttgcaggttgtagatgcacctgagatcctggctgtaattggcaaagtacctcacctctctgagtttctcaactccctctacaattgccagtacaagtcattttttgccgcattctgtgagtaacaaaatcacattattttgcgatgatttttgcattatactctattgagcagtaattctcctacagcttgctattgttgatatctttgaatttcttattcctgattcctatttgttttcagctggcttgacggagcagatcaagttagaccgttacctgcagcctcatttccgttactacatgcgtgaagtccgtactgttgtctattcacaattcctcgagtcctacaagagtgtgacgatggaagcaatggcttctgcatttggtgtgaccgttgatttcatagacctgtaagtgccatcctctatgttctgttgctgtgatcctgtcgtgtcatacgacggcaattgtgctgttcatggccattggttgctaaccttttcttccaatccagggaattgtcacgcttcattgctgctggaaagctccactgcaagatcgataaggttgcttgcgtcctggagacgaaccggcctgatgccagaaatgctttctaccaggcaaccatcaagcaaggggacttcctgctgaaccgcatccagaagctatcacgagtcattgacctgtaggtgttagtgttggagctggtgcttgccaaaactctgctcgagctcccccgcacgagtaacttatttgctttggtcccaggggactacgaacagtacttgacttcgcattcgaagtaggttacgaggaaagagagcttaacaaaatcagcgttaaatctgagaatttgagcttatgtaacctactatatggatcgatgaaagttcagacccgttgtttctagactctcttctgtgatgaattcatccatttatttcatatcggtgatcatttgtgtttccatctcaaatcttcaatctttctgcttggctcctttcgtaactttctttaacaagaacacaagctactgtgcttctaagctgaaccacaaacaggagaactgaggaaggccatagccaacagataaaacaaaaggtatcagaaaatatcatgcatttcatctcagaatatgatagctaacacataacacaacgattgctgccattacagtaagcaacacaactatgtatccgcaacagaaacttaacactgtttattcaactatatgataattctgattaatgtgactacacatagggcaaagctcgcagaaattcttctgtatgtgtacatttttcatcatgcagttctcaggaaaccaaagacatcctacccgcctagaacaagggggaaaccaactcaccaacaaaaaattttcaacactaaaatcacaaaccaagttccagagaatcgcacatggggttaaaggattgcaagactgtaattgctatggtattttctagccagctgcttgactgaatttgccattaggcgtgcccacagggttgttattgtcggatctggggacagccgcttcctctaagcgcttccacaaagcttctcgcttcgaattagattcttcctgcttgagttcatcgtcgttgaacttctgtgtgcactccccgaaaaatgcagaatcatgatctgagaagatcttgcgtacgttcagtgtcaggcttcgaactgcttggttccagtgaccccttgcattcctctcaagcgcaggaaagataatgggtaatatcaccttgtaattctgcttaattaagttctcaatgtggtcattgttccaaagaaacagcgcccgctctgccacctaggaacagacaaggaaaagaaaaggtaagccaggctatatgtttttctaaacacactaatttctcaatatgtttctcagatgtcaccaagtatctaggcatccatctacaggaaatgtttaataaactacaaaaatgcttcagcaaatcacatataactaggcagaaccactggaccaacatgatagacataaaataccattccaagacaacagatggtaccaaggcactgcattattttgctagatagatgagtagcagcttgcaagataaatgttatttacatagcaagatagcaaaaaaagaaaaaaaaagagaaagtaatcctgaatacaagtctaagacctgtttctggcatgatttgcaaccagcagttggcaaatatagataaccaaaactaactaatgacttcaataagacactatgtttcttgtaaaacagacattatactttcctaaagcaggataagaatatgttaaaaacatgcataattaatccaaatacaaaccaaaacaaaaagggcaacaaagagtcgcaccatcttttcatagacatacataattatttgggtggcatgtttcctctttaacctaacaccaccaagttctaattttggtgacttagtatcttggagtagcagtagttctatgttcagataaaattaacagcttgcactcaacaatcagcttccacagtacagaatgtctttctaatcttgtaaaattacagattggcatgcaaattttctttcctttttggaggagcatgtaagattctagaagcaacaagcacctaaatctgcaatcacagattattcaggggacgcacatgggtaggatagcaggatagagataaacaaaaatttcatgcccctataatgatagcaagggtacatatcaattgtaataaggatttcaagcaagattacaaaaatgagtgtagtaaaaatgaataaattggtggtatgtaccgtccagaagattggcatatatatacaaaaaaatgatatgctgatgtttagaatgccctagcattgtaaattttcaaactaacaagtaccaacagaatttcttaagaaaacaaatgctcaagaagtataaaacatcttggtgattttttaaatataattccagattagcatatgtcaaaagcagctccatggttcaccagaaaaggtagatgaacaccaaagcttgatcttttttaaactgatgaagcaaattatataatatcatctgtggaggagagcaatgtggatacacagtaatggaatcagaaacctaagcagcaaactgcatatatcttggactgtgaacaacaaagaggattgaagttgacatggatttgaattttgaaacttgattgttggcatgagagattttacctggaaatgtgagctattcatgctacaggcaatctgacggaagagtggaaccatgcatctttggaattctgcaggctgtgttgcctccagaacctcttctagttcacccaagaacatcacctcctttgaactgtttgtcacaggccaatattttagcaagcccctaataacagtgtcagcaagtttgcagtccttctcaacaaactgtgtgatgcagtatgataattgctgatggtacatagatacacattttggcttgtgaagtgggatcagtgcccggacaaggaacaatttgtgctcttctttaagtggaagagcaaaaccattaattatgctgcccaagatctccagcagctctgcaacaccattatgcttctctgtttcaaatataaacctgtagaaaatattgttgattgctttcctgatgaaggggcggtgcaccatgatttaccatatatgcgatggaggattgtcttcaaataatccctttccctggggtcttccgaatcaaaaagatctagtagcctaaggatgaaggaatgatctatgtatctcttagccagctttgcatctgtctcctgtgatgcgacaaacctcaagaaaacctcataaactatctgtaaatgtgaccatgctgggtccatgagaggctcctcctcctccagatcaactccttcgatggccttgttctctcgaggggtggggctggagctccggaacaagttaatcgacaccatcttggtaatctccgacatgacgacttcagagaacttgccatttgcagaagtgacatagtcaacaagttccataagcgtctgccgcttcgtctccttttccttcagattctttgtcggatccgcgaaatcgtacaccgcgcagcacaggttcaccttcttgacaaacaaattctgcttctccgaggccggcacgtccttgaacgccggcagcggctcgttggagtgatacaccacagtcccattcatcatcggattgggcgtcagcccagccggcaccacgtaatccccatttccactcctcttgttcccttgctccacgctcctggcgacgctgtacgagttagacggctcattgccgttcggcccagcggcgtcccggctatcgccggccttccctggcttcctcggcagccggccaaggatctgcttgatcatcttcttcccccccccccccccaccacagccaaccaaaaaccctagcaatacccaaatcagccgcagcaaccagcagggatctacaaacccacagctccctcccaactcacccaacagcacaaagatctccagacctgaaggaatccaccacccagcctcccccaacccaatcaacacgaggcccagatcatttgaaccacagcacggagaatcagacctggtccaggaacagccgctcactccaccgcccggggcctcatcggatcaggcgacggcggcgacgcccccatcgcccctccccaacacactcccaaaaacaaaaacaaaaacaaaaacaaaaaaagaaaaatccaaccctttccgctccccggacagccaaatctaggatccaagaaccggggcggcaggggcaaccggccggccgccgacgcgaatggcgagatcgggtgaggagcgcaagcagcaagagcgaagaggagaaccttttcttggcttgagggcgagcgagagcgagagagagagagagagagagagagagagagagagagagctctccactttttctcctcctctggatttgagaggcggccttgaggtcccccaaaagtagcaaaagcagtaaaaaaaagctttgcgcttgcgccgcagcggaggagaggagaggagaggagagtgtggacagtagtagcagtagcagtattctactgcaactatttctgggggtgagctgcaattaattgcacacgcaggcggctgtcccttcgccatcttgtgcatgttttggcctccccacacagaaccttcatgggtgttagtgctaggtaggggtagactgatgactgtgactcaaaagtgggagtaggagtacgagtactccttttttttacgtcatcttccagtattaaactgagtttatttttggtattgtttagttcacaccaaactttccctaaactagtaattttccatcatatcacatccaaaacttttctcctcacataaactcccaactttttttcctaaactatcaacttcccaaacttctctccaatttcagaaactaaacacagcctttgttacggtatagtactccatccgtacttaaaaaaaactcaacctatcccctactaggttgagtttttttaaggacggagggagtaaatcaacttttatgtttgaattttgtcttaaaataagccaacttctacattcttaaatacccttggttcgcaaatgaataaaatttatcatttaaacatcgcccatctacccatctatcaatatagttctcctatttgtctttctccttaattttatcttgggaagttagggtttggcattttgtgacacttcctctatcccataaaaaaccaatctagtattggacatggcacattactactactacgaatctgaacattcatagtaatattcattcgattatatatttgtttttttagggagtaaatgttttggagataaccaaatggagacaatgggaattggagtagtttatctatatagcggaagtcgttctccttttatcctcccctactttcgtctaaaattcacttccctctaaagactgatttatataaaaaagaattgactacggtataaaaccaattaacccattttgctcaaatgatgtgttccatctcatacttggatcgagctggtaggaataacaagctgtagtaggaaaaaaaaattgtgacaaacttttggattggataagccagcatggtgaagtggctaggagatgtggtgtcagtggtacttgatgctgatttaaaaggtgtccccagtagtgtcttgatgtactagtagtactactctccttgcttgtaccgggggggtgtttagtaggagagaggggtgggacttatgcttctatgagagggactaaagtttagtccctagtttccaaacacctctgaatcatccaaatgtacaccatacgttgctgaatactcaaatcattatttgtaatttctctacaactaattagtacatatttgtcattataaaatatcctgaacttatgtaagctacggtgctatgttacccaaaaggacatggtcaatcagtactagcaatactgacagtagtattatctttggatagtataatctaggtagcgaagggcacctaaatgacactgttagtgactactaatcaagtcctatattgcattactaatactataatcgtgtggatcatgccaggctaattagtggagtagtagcatgcacgccaataaatgcactgacctaagctgtctaccaaatcgttcagtcgactggcctgacacattccgtcggcgccaacgactcgtttagcagccatcaaagcgcaaaattatgggaaaattaggcgataattatagtattcgagaacgggaccgtccacagtctatcatgccagaaatacacacagtgccccataatttcagcaaattaattagtagttggtcaagttgtacttatcgtcttgctgttcgttgtagcgtaagagcatgtacaatagcaaggctataaaccagctataaacatattttaaagagataaaagaagagagagaagagcagcgggctacagatctattgtcagctgcaacacagactccaatacatattgtgtgtatgacatgtgcgattagatattaatagtatagtaagtaattattgtatgaattgattattatacggcttatagatgaattggagctagtagtgggctatactattaaacttgctctaagcatacagtttgaaaaagagtaaagtccatcaccggtccctaaacttgtaccgttgtgtcatcccggtccctaaactcgcaaattgaccgttcaggtccttaaacttgttcgactgtgttatcccggtcctaaacttgcagatcactcgtttagatcctccaacttgttcagttgtgtcaccccggtatttaaacttggatttaaatatcatctgggtcaaataggacggtttaaagacttcatatttaaaaataatttataactttttcatgtgaattctaacgaagacaaactttatatcaaacttgtagccctcgacgcgatctacaactttgtagttgaatttatttttattttaagtcattttttgtcccaaaatgtaactttaaaattaaaatttcaaaatctataaacatgcaacaatattttgggatcctaaacagttttaattcaaaaacttttcaactacaaagttgtaggtcgtgtcgagggctacaattttgatataaagtttgtcttcattagagttcacatgaaaaagttatgaattattttttgatataaagtttttagaccatcatatttagggactggggtgacacaactgaacaagttagaggacctaaacgagtgatctgcaagtttagggaccaggatgacacagtcgaacaagtttgaggacctgaacggtcgatttgcgagtttagggaccgggatgacacaacggtacaagtttaaagaccggtgatggactttactctttgaaaaatcactgcctcaaccaaaagatttttaaatagttacggaatcgaacttaattaatgggcaggaaaccatcgattttcaccttggagtttcatgtaattttgtcttagttgtgcctgtattactattgctaattgctcgttacaaatatctttttgcggtagagaatagagtcttggatgaagtgttttaggggttgtgattgtcattttctgagataataaggtcgacatatttttatgcaaatcgattgatgccgtctaatcgacctattccttccgttccaaaataaaattatttttcacttatcacacgtatactaataaaaataaaaaaactagactatcccattttatcaaatcctaatataattattccttagtgctcccaatacatttatctcgtgcttttaaaaactcgaatacaataattactaaaattaaacttattttgagacatacggaaggagaaatagactattctgtaagagatggagtaggttccaagcggccggttaccgcattaactaggtttgtcgacactgtacgatagcgaaaatcacttaatatttcgataagattaaaagaatttgataaaattaattcttttagtgaatatattaatttggtttttgttggtaatagatgtgttgctgcaattaccgttgatatcgattagtacgagagacggagagaccccacccctattcggtgttgattttttttccccaaatcataaattcacaacaaagtatcacgtgaatgataatacctacaattaggctagggagcacaaactggaggtagctcgtctggttgtgttatttgtagtggaacacgaattcaggtcctataaacatatgtaaatgataatacacataattgagctatattttctttcagggatagacaacgatataccgtttttgtttatagtgagatcgacacctatggtgtcttcattaatctcgatagtaatatcaagatatgtgacctggtcttcagaaatcatccgtggtgagttctttaacattgatagtgatttcaagagatgcctcctaagtttcttagaggtgctatatggtgagttcatcaatattgaatcttaagatatactagttcagtctctaaaaggtacgctcaagtgacttagtcaatctccacataatcaagtctacgttgacggcatcaatctcaaaatatcccgacctagttccatgggctaatgtttagccatcaccttttagcctcaaattagccctcaaggatccaaataggtgggctaattttaagctaatataaattagtccccctcaaaacattagcgccttcaaggggtgctaatggggctaattttgtgtggggaccataaaaagcatgtctctctctcctctctttttactctctctgccttttagccttaaattagcccatggatccaaacatgtcaccctaggctaatgtttagcctatcaattaatgactaaacattagctctcaaaattatccctgagctaatctttcaaatagggccctagtctcttagaggtactccgtgttactttgttaatataaataaagtatagcacttagtcttttaaaagtgttgatagaggcaagatgtgtatatacgagcgtctgccttttgaccatttttttttttaaaaaaagaagctatggagcgatcatcgggtcttgaactttgatagctgaaatgcacctgtgaacgatttttttttataatgaaaaactttatttccggtctttacacgatgtgcacacaacctataagctgaacggataaaaattaatggctggcattttacaagtgtacgactaaaattcatcaaaactgattttgtgagtagaattgtgacaaactcaacgacaaatgtacattcacttctcaatagcgggagcaaaataagtacacttgttaggtttattatgacgattgatgaaacatatatatctaagttttaatatatactccttccgtcccaaaaaacctcaaaggttgggtttttttttttttgacagagggagtagacttattagagtgtttatattcacagctaattatttttttaataatatatgaatactagatttaagctttagaccgagacaattacatcccaataagtttatggattcgccaaagtggaatggatgcaccctcatatttttactgttggtgtgaactaggttgattctttaatttactggtgtgaactaggtcgattccaagtgtttagcttagtataaataaaaacttgttttgttctacttatttcaaaaattagtgcaaatatagattttcttttgccaagtataaagtgaaacaaatctatacattttttttagaaaaaacacttcccagtgccaatatactaatactacggagtaaatctggtaaaatactaatactacggagtaattctggtaaaataatttttggtagatatgtgggtcccacttgccagtctcggcgtaggctatatatccggagtcggaccccctcccaacccggaaccctgaacccgccaacccgcttcttccccccgaccccttcgcatctctcgcaacaaaagaaacgaaaagaaagggtttttttcctctcccccatggaggcagagcacccgcaccagatcacatacaccaccaccaccaccacctccacctcatccctctgcccgcgccgcaggaagagaggagacgacgaggcggcgcaccacctcgtgttccccatggatctcgactcggccgcggcggcggctgcggcggcggcgcaccaccagcagcagcagcagcagaccacggttcgtccgtctctttccccgtctccccccttttcttgcgtttcttggatgaaattaatctgctgcttcatcgctggacatatgctctgcgagttcttgttctcgggtttgggggtgttggggggggggggatttcttgggaaggcttgtgtgcgaggatttgtgcctggggttcaggagaggaggaggaggcgcctctctggattctttgctttggtgggttagcgagggtttctgactttcttcgtggccgtggttggttggcgccgaatgcgtggtgcgagaattcttaggcggttcttgttgtgtgtgcgtggaaagagagattctttgcttgcgtgtgcagtgatcgggtgatttgggaggaatccatggttttctttgacctaggtgttaccgccatggattggatagaggatgttcccattataagctggaatcatgaggaatgaaccttcgtggggaaacactagtgcaatttagcttcccttttttctttgtcgtgagtagttccttgcaagtgtttctcagcgattgaaatgaaagattagcagttcagcccttgcgtagttagcattgttagcattttagataaatgctggctgtgtctgtgtggacatcaatggccaggagatgtttggttgccattatcagcttcatctacacaaagttatttcttttgttgcgatatcttgttcatccttcgtacggttggcagagaaacagtactgtatctcgggaaaggtttggagggatgctgtcaggagttctgcaaagtagcgtaatagcttaaaactacatggcattcacttgttcttggcagcacttgtacttggttctgtttttcctgttgagagatgttcgattattggcaatttcatctcatacccatgtgcatttgataacctcctaatagatatttgtggcttcatcataaacaaaacaataattatagcaattcttgcttcacatgaacctttttgcaaaaaattacattgaagtctaacagatgcattttctgtcaatagtcccaggacaagctgaaagcattggcttatgagtacggtcatgagttccgagtattttcaagtgtaacatttgagtcaatgactagcaacttgcccgcagcagatcagggtacaatatatctcttgcttttatgagttccgaggttttctttacaaaaatctctctatctttatggttgtgctctgatgctaaaacatggttcatgcagaggaagatgatgacttttatgagcttcagcctgctgactatttcaacttggtttcgaacagaataggaggttaattatattgacacttactattgtttgggaactttagcatctgtgtagtactgtccaaattgtactacttttcttttttattgtagcactatctaaaacaatgaaactgactgcagaacaatcgaaagttttgaagactcgtaaaatgcgtgaagcagaacttgctgcccaacgagcaaagataaaaaaggtaagatataattcacactgctcttctctgtatttagtgtttctttctgaatctaatttggtataatatctatttttccacaaccttcttaactgtaggcagtaatgagggtgcgattccctgatggatacatacttgaggccgattttcatccgtcagaaacagttcaaagtctgatggattttctgaagaaagtaatctctagaccagacctgccattctatctctgtaagtccacttgcttgggagttactgatgtattagcttcaacagtagggtttcacctcctctttgcccccttaattacccacctttgtttatcctatcaacaacgatctcggcttacagttagtgtaatttcatctgtttcagtttacagttagctttggttttcataaagactaatgagaatacttgtatctatgataagaactatttatctgtttcatttgcaatcaaatatgttggcaatcatgatatcggaaataactaacctcccttaagtagttccatcattatagttacatgcgagtaaaatttaagtgcatccttttgtgtaaagggttttacaatcaaccaccttttacagagtaatacaagttaataagcaaaattgggtacaacattcagaacacctatttgatgagttcatatgacaacatgacagtagctcaaacaggacaagttttctcatcgtgttctcgttgcccaaacttggattagacactatctgttgttatgtcaaaggaatatcgtcagtcaccaagttgattctgtctggtgatagctttgacaaatgtttgagttaaaatatgccacatgtaacctgtatgtgaaaacatagctttaggtttaacttctacagttttttgggtaagcatcatattcatctgtcattctttgagcacagatcatttgagtgacatctccatagattctctgcattcatatcatagagatgtaccagttataatttcgtaatactccatcatttgattccactacagatacagttccaccaaagaagcggataaaagacacttcactggatttctacacaattggttttgttcctggggctaatgtctacttctcttatgatctgccggaaggtatgtttgtcctaaataagtaataactagtaccaggttttgttcctggggaactcattagacattcccattcgtttttgttttttttattgaatcacatgcaggctcagagttaaatacagacagtgtaaaatcaggaccttatctccgtgaagaaattcggatgttggatggactaccaattgtccaagaacctgtgcaccaaccaattgattctactatgaactcttcttctgctcatcaatctgatgtgtctcaatcagattttgcaccgccagcaaacaagaaaccagctaaaccaaagtggttcaaaaggtagactttcttttagtgacatactgttatgaaagagtgaattcattgctaagctatgctactacggtgctacttcttttttggttcaaatttatctgttttctcacttctcttggggagcaaaactaaattattgccctggcaataatttatacatatctgaattctctgtttaattagaataagaacctacatggagacacctgtgaacttatcgcttgctttagggtgctagaaggtaaatcatggtgatcttgcagcaatgaatttgctatttctccagcagtaacaaaaacccctcttcaagtagcatcgttgcatgagcaacaagcctaatttatatatgttgtctgaaccacctgtcgcagcttctaacatatcatcacttcaagatgcattaccatgttcatcatgaaattttgttgatttttcattttcactcttgaccaattgtacatatcaatgtatttatgtttaaaaaagtcagtttcagtttcaacctgtgcatgcattttgc

SEQ ID NO: 1757 - DNA, 3806 bp, Oryza sativa
tgatattgtctctaagttgctttctcgcgtcaatttccccagcgactagtttgttgcagagcgtgcaagcgttttttagcagcggcctctagtggccgtgggccagcaaagatattgtgcgatgattacgacgaggggtcgtgtgtaattatgttcacttcaccgcttcaattatagtatcgcctttgcgaggggtcgtgtgtaattatgttcacttcatcgcttcaattatactatcacctttgcgttgtgcttagctgtgagtggatggatgcttttgacaagaacgtttctgtctggcgtcacgaaataatgcattaatcctgggattggaattcgacgtctaatcgctgaccctggataggtacaatagagataatgtgagtggtctcacgtttgctaattaggcctcgtttggaatgtgtggggtacaaattcatacagaaatcgagatgcttattctgaatttcctgtgttgtaatagtagtagtcttaatccaccttggagttacagcggtgaacggtggaaaaaacggatgaaatttaccaacaaaattcaaaatattcttttgaccttgatagggttaatggatcatcaaattgtgatgtgatgtggccatgtgggagttgaacatccaactaccaacaggcccagcaaactgcacgagctgtgtgtactaaatttccttggccaagtttcccctatttccgcttatttttattcatttttcatgttggagatcaagttatctcagacgtgacaacacttattttattcaatatgtcttcttgtgctgacatctcagagatcatcgcatcgagaccaagaaaaggaggtttgcaaagcaagtctgaagtctctgatctctgaagaccgtttagactgcaaaatgtgcgctgatttcgccgtgataatttcagaggttagttggtaggatagcagccggttagatacactgactcctccccgttttccaagtcgtagtctgacgcatgggacggctgcttggaccgaatttccagagacttcgatttcatcagcgaacaagcaacttcctgaaatctgaacctacaacgaaggagtacatcgtcagagaaagaactctgctgcgatgattcaggttcagttcaactcagtcttcaggaagacggaaaaaggaaaacaagaaggatgagagcgttgcaaattctgttcgtcagaagaacgtcttacacacagcgggtcatcactggaccagaagacgtcaattcgatggtcgtaattcaaacacaagttgacaaattgtcaataagattctgctctgctcaaccacatgcagatcagatcgatctttcggctcagttcgttcgacgtcacacgcaaagaagaaggcgaggagagaaaggtatctgtctcctctgcacacgtgacccacacttttgtgaatttgtgagcgttgagctcgtccgaaaatttttcagatggggcagatggcaactctccatccatattccatcacctgtcctagctgctaaactctgaagaacctctctcgttgctccagtacagtacatgatcacatcacatgggtttcaggataattgctctggtccgatggcgccacagatctgaatcagttatcacagttcagtcatccagtgtggtgctgctgctgctgctgctgctaccagctagtaggctgcacggcgatctgtgtgctggaacctggaaatggtgaggccaggacgcaccaggtgcgagacagcaattactaccactaaggcccctttgatttggaggaaaagtataagaattttagaggatttcaatcatataggaaaatttcctatgaagccctttgaaacaaaggactgaatcctatctaatcctttaaaattcctatggaatggacaatcctatagagattttggagaaaatttagcaagagcttcaacctcttgctaactttcctttgagtctccctctctcatccaattcctgtgtttttcctgtggttcaatcaaacggcaattcctgtgtttttcctgcgttttgcaatcctctgttttacacttacattcctatcaaaatcctacatttttcctattcctacgatttctcaatcctgcgattcaaatgggctctaaaattgaaggaattcagtaaccgatacagtagcatttacggagattatggtcacgtgaggacatttttacgttaaaaattcatgactaatgtaactcttaggttagggctccaacgtcaaaaattcatgacgaatgtaactcttaggttagggctccaacggcggcttttctgtcagtaacacacactttgaaaagaacttatcaatcaatatcaaatactcttcgtcgtttggactcgacaacaccgctggatccatcactgtacaggatcagcaagatcgagccaagaaatacatcaatagaaatgatgtgtcaaagatgatgcagtgacaactgtattttcatgtagtaaactgtaaacatggatcaaaaaccattcgatttagacgcactgtaccacaggttcagagtggttaatccatcccatcaaagcagattggcgagtagtaatcccggatcggtccatttcgtaatagcaacgagatgggaaagcaaccacttggatcggcatcgatcaatcgtgatatttttttcttcacgcatgatagcgaccttgtcagttcgtcgatgtgctgcgaacgtttaaatttgaataccgttttctctttcccacaacagttacaaaatccctttttagaaatgaatttcgcgattaccaacagagaaattggaataagtcgtcgcattggactttctgccccagatatgagaatcttttcagcaaatccacggctcaaacatttatgcgcgatttgctcctggattaaacaaatatatttaacgataataacacatggacatgtctcttgccacatccataccgcagagaaaaaacgatgggccagtttagtttgagatctaaattaggcttgccaatttttttggcaacctcaacaataattgtgtatgtttggattgaagccaaattttgatatgcctatataacataggccatttcaatagccaaattagtttaatttagcttcaatccaaacacatgttggccttcccaaaaattggcatgccaaattttggtaaggccaacatttgtcacaaaccaaactggcccgatatcaattcagcttctccattgcaaaaaagtttgattatcgcgcataaaaatacctataaatattatactcttaaaatacttcttttgtagaaatttacagagatcaaatttactgtctccttgagcatgtgttctagtgcattgcgaatatacacgtctgatgtgaaagagtgtatatgttagagagcacaccgaatatatagttgaaaaagatgctaagggaaagtgttaagtgattaattaatagattctcaaaaaagctagtacaactagcgagcatatgcagtaaaattctcccagattttaccgcgtcatttgcagataagcccctgtatctgcccagcaattacgttggagtttttcacggttggtggcacagagcacgctgggtggaaaggttggtaggtagtggacaggtgggttgcaagccgcccggctgtgagaaagccaggcaggaggaggcgcagcagcactagccgcggtataaaacatccaagcgctcctccatcgtcgccaccgctccggtttgcctcccgcgcgagccctcgtcgacgccgccggtcagtactttgtcctccaccttgatcgctgttgctaatctccggga

SEQ ID NO: 1758 - DNA, 1675 bp, Oryza sativa
tgttccgatagtcttaagattgattgcatttttctcaccttttcacaggtatattgctgaaggaagaagagcaccaacctatttatcatgtcaggaggatcttcaccaaggtcaagacgaagcagctttaattctttatcaagagatctcgaactcccttcagagcaaggttgtctctctgttattgtcctcggggcttctggagacctagccaagaagaaaactttcccggcactcttccatctttttgcacaggtaatttgactcctgagtcctgacaataactagctgtttcatgtacaatttccaaaatctacactacgaaaggaacaatctagtgcacagtcatttgaggcattccagagcaaaggttcagttactcatacttgatcacaagtaaaagctcgaacacttgtactattttttcttcccagatacagatagtggatataggacacaattgaaaagaatgctggaaaattgcagagcaagcttctttttatccagcaagctgtttttacgaaccactcataaaatcttagtctttacaagcatgcaaaatgtgtgcagtgctataattcccaggttatcgttgatattcatgtccttgtgttacagggatttatacaatcaggtgaagtgcatatatttgggtatgcgagatcaaacctttctgatgatgggttaagggaacgcattcgtgggtatggtttctaaaagctgggtttttgacatcttggcatattgctgctgtatttagatatttctacttcttttaaacatatctagccactgaatttgaatgttatagctaggatagttgtcaataaaaacatttaatactctaattatggtcaatacgtactaaaaacaagcagtacatgatctgagatacattgtgtgtaatgcggtggcagttatatgttcgacatcttcatgaaattgtatttgtttttcctgtcccctatgaagttcaatcatcaattttgcacatatttatgcctttgttgtatattgctacagatacctcaaaggagcctcagaagaacatctctcagactttttgcaacatgtgagttgttgtttgtaatgtaaccaccattttgtgatgcgcacacgtcattatgataaatttctttttcagataaaatatgtcagtggttcctatgacagcggagaaggatttgagaaattgaacaaggaaatttcagagtatgagaagtcaaacaaatcagaaagccctcgcaggctcttctatttggcattgcctccatctgtctacccttcagtctgcaaaatgatcagaacatattgcatgaatccatgtaaagtttctttactattccatacgttattctttttggaatttatacaagctatgcgctctagttgaacaaaagcaatgaagcataaagttagtggaaaattcaggtcttcttggaagcatttcttcatcaagattcattttctttgcataaatgttctgtttgcagctggatggactagagtcattgttgagaagccatttggaaaggacttggactctgcagaagaattaagtgcccaacttggggagctatttgacgaaaaccaactctacagaattgatcactacttgggaaaagagttggtccaaaacctggtaatggctataattttgtcgggctgcaggaat

SEQ ID NO: 1759 - DNA, 7329 bp, Oryza sativa
catgtccttgagggcagggtcctcaaggagcagcaccatgtccttgaggtggtcactgtcctccctctccttgcccctgaacaggggcctctgctccctgggctccagccctgtcaccatggatactactgccttcagctcacctgcacaaaatgcaacatcacatgtttagatcttgatgatcaatccaaatcagcacaccaattaggttttattttgttgttgttctaacaaagaaacaaacaaactataggacatcttttttttttagagcgggtaaagtatgaaggacttttgactgggatcctgtggtaaagcaataggtaaagtatgaaggacttttgactgggatcctgtggtaaagcaatagttgtgctttactgtcacgccacgcctgtataacgtttacatatcatcgtgacatttttttcgattaacatatactcctatcaccgtgccgtgtttatgtaaaatggtggtgccataatccccttgctcgtgcctaacaacttggggaaagggactcttgacttctagttttagttttcttattaattccgaattttagttagttctaaattgtatatttgtatggactctagtatctttttcctgtattccctacttttaattctgattttttgttatttctaaattttatttctaaatggactctactttttatttttatccgattaatgtgagaatttatgagccgtgagagcgaacatggagactccttttctattaatttaataagttaatagattcatattggtcatccaaactataaaggacaaatttcaatttttattatgttgagtggggaaaattctcttgcacctcgctaacatgctttgcgaagacatgaaagttggtttagatagggttcttgttacttatgatcagacgagttttttttttttaaaaatgatcagacgagttagacaatgacttgtgagaccttggaagatcaactttgtataattgtaggtttccatccaggtcgaatttgtctcccataattaatatacagtttaataaaaaatgcttctgcttgtaaagttcggtttgtattagttcaaggcaaatatgtttggtttgtaggttacaatttttattattctcgtgactatcttattagcaacaatacaatagtccctccgttttttaatagatgacgccgttgactttttctcacatgtttaaccattcgtcttattcaaaacatttacgtaattataatttattttgttatgagttgttttatcactcatagtattttaagtgtgatttatatcttatacatttgcataaattttttgaataagatgaatggtcaaacatgtaagaaaaaaatcaacagcgttatctattaaaaaatggaggtagtattttttttcaaagtttattttcttgcctgagtatcgtgtttaccttatttgctcttttataaaaaaaatatatgttgtgatttgcattacagaacacagtcgttgcgttagaactgatgtattactagccttacaaagttctcgggtggtttaaggtatgcatagagttgcgaaagggcctgtagcctagtaatttaagagcctcagtagcacctgaggtcctgggttcgactctccatgggggagcaaatttttcaggatttaacggcgctgtgctttcagtggtaggccatgggagcgaatttttcagaatttaacggcgctgtgctttcagtggtaggcgaggtgcctgtggtgacttcgtcaatctctccagtatttgccggcccggtaggcgaggtacctgtggtgactaggggtgaaaacggagcggattcaaacggataatagctataccatatctatcctaaaccattttttttaagcggatgcggagcgggtgcggatgacgtgcggatgcgaatgcggagcggattatttcggacgtcggattcggtgcggagtcggttcggtaacggacaaaaaattgtcggatgtcaagtttgtattcaatccatacaacaagggggcagcaatacaattagcccggtctcaatataattcaaggtacatccatgatccataaaaaaaataatataagtgttcagttcaatagctcacttgtcactgagttgcttaaaatggaaaaataaaagtcatcactcatcagcgtgaggcaaggcatacaggcatacaacatagagcacatagagcagtagagcacgcagcatacagcagtactgcagtagtagtacagcacacaacaggcatacagcatacgacagacagcagtgaggactgcacgtgtgcacacaggcacacagcctcgtcgttggccatcacctcgtcggactggaacaggggaacaacagctggcgatggggattgcgcaggcgacggtgccgcctgggcgctggcggcctggcgccggcgacgggccgacgggccgacaattgggatggcgcggatggcgcgggcgactgtactggcactggcggcgacgccgaggagccgacgacgaccagcggcggcgccggctggagctgaggaggagcggccggcgcgctaggaggaatggaggatcggcggcggtgccaccagcctgcagtggcgttgcggtggcgcgtgtgggaaaagaggcgaagaggcgactcgagagagagatagatggcgcacggcattcggcagagagagagagagatttcgggaggagtggattaggtcacaatagatgggctaaatgggttacaatatatgggttgaaagactgaaagttgcggattatccgccaaatagtgcatcggataatccgatcaaaatatcggataatccgtatccgtcggatatcgttgataccacatttacatgataaaatccgcatccgcatccacatccggccgaatatctaaaaacttttaccatatcctcacatcggacggattcggagcggataatatccgctctattttcacccctagtggtgacttcgtcaggcgagatacctgtggtgacttcgtcaatctctccaggatttaccggcccggtcttcgaagatgctcataggggtaagtgcgcgtgtgttgtgagtgtctgtgttgtagtgtgtaattaaaaaaaaagatatgcatagagtttgcagtacatgtttcccaattaaaatcctggaagaagagcgagagctcgaccagccaatcgaaggtgtatgttgagtcaacttcaacgaatcgaacagcgatgcatgcacgcgttacgcgtaggccgctacatgggctgaagcgtaaagcctgcacgacactactgctctcaggtgcggcccagataatcaactgaaaatttacgcgcgcgagggccataggttatcttttgttcggcagtgcaggatgaaaaactatcccacgtgattaattaagtcttagctattttttttaaaaaaataattaatattatttttaaattaatttttatatagaaatttttttaaaaaaactcgtttagtagtttgaaaaatgcgcacgcgaaaaatgatagagatgggttggaaagatgggaatccggaacggaacagacgagtgcgcaggatgtcgtcgggcgtgggctggccggctgggttggcatcggagagctgggccgcttcccgccttcccgtgcgtgcccgtggccgactatgcaacgcatccgccacgcgtccagtccggatcgaattccatttcccgtacctacgtagtacaccgtgtaaaaaccgaatcggactcctcggccaaaaccgagcagtacgcgcacgccggctgcgccgataaataccatgagcgcccgctgccgccggacgaacagatacgaggcgcggcagcactagtggtacaatttccacaccatccgttgtactgaattcttgtttttcctcctcatggcatcaaacggcaccagcgtggcagaggtaactacactaagagcagcatttcctcgtcttccatgtgttcctatttatgtgtgtgttttttttacctttttttattatttatgagtattaaggtttggtttacatattcctcgagaaaagaaggaatgtttattccttatgagatattaatgtcacttatgagtgcctacaaaagtgcagaaatacttattatgtataatactaatgcagggtgacaaagctaatcaagaagacaggctcagtgcacttcccgacgacattttgattcatatattggatagactcaaaacacgtgatgctgtgaggactagtgtcctctcaagacggtggaggcatctccctggcgtcctgtctaagatcattctccatgttggatcatttaagcctaaggatggttccatgctagccaaagacgatttgagaataagaagcaacatctctgtcatcgaagcaacccaaagtattctagcacataaaagtcagtgcaaaattaattttttgagcgtgggattctatttgagggaggaatctatcagcatcgcccactccatcaatgatgccatggcaaatagagaaatcgtcagtacgaagtttatgattttgccagaaaaacatggaatacaacggatggaagatgacaagatcatatgtggaaaacgtttcatgtcattctcttatgcttgcccccgtgcatttggttgcctcaagcaactaatcttaacctgtgtgaggctaggtaactcagacttcactgatgtgcttagcacatgcaagaagctagaatacctccaactaataagctgtgactttcagccatcagtattgcaaatggaacacccgacgcttattaaaatggagcttgtggtgtgcacatttggaagtgtcgatcttaaatctcttccgaaactaagaacattgattgttgacacgtggatgggtttggaggaaatttatccgctatcatttggttatgttccacaactttcgaccctaaagctaacttataaaggcacaactcgggacaagaatatcaagctaagtgagtttcttggtaatgcggctataggcgcactgcatctggattttgaatgtggaagggtgagtttgaaacttttttttttgttaaaaaggaaattgttttaggttagaatatcatggtttgatcattagctgtatgttgcagatttggattcaaccggaacatccgaaactattggctcctgtgttgcggaatctgcagattgctagtcttacttgcattcatgaagagtgcaaccttacttggatattttttcttttagaagctgcgcctctattggaaaccatgcacataaaggtatgtgttcttaggaatacatcggtagctatgtaaataatataatggcataaactataacgtgttttccttatatcagaatgacataaatatgtcaccattcaaaagatattgattcataacaactgcaacctcaatttttttttgaaactaaactgcaacctcaattgtgttcttcaatactcttgttgacatacattggcagcaaatatagtttatttgatttcttaaaatattgtctattttttttgttaacttggtttctcctatacgcagatgtgggaccatgaatgcaaaacgagtgaggatgaggaactataccaaaaggaaggtgataaattattgaagtgggaatcatctcgtgattttaagcatcaaaatttgaatgttctcagaattgtgggctttcaagttgacgagaagtttatgacgtacataagacgggtaactgaaatagcaattaatttagaaacagtattactctttgaaagtgtttcttgcaaaggctgtcaatttcgcccctcgacgagatatccatacaccggtgaggaaaaggttatgacggtgaaacagatttgtgaggggagatctttgccgattaaatttcgtttcggtggccatgtaattgattaatagtattattctttgaaagtgtttcttgcaaaggctgtcaattttgtccctcgacgagatatccatacaccaattgaggaaaaggttatgacagtgaaacagatttgtgaggggagatatgacagtgaaaaggggagatctttgccgattaaattttgttttggccatgtaaggccatgtaattgattaatacagtttcattcagataagtgtgttgttttcttgttagcttaatgggtattacaaacccacggcggaaagatcttactactacccattttactacctacatccacaacgttgaaccggaaagatcttgctactacccattttactacctacgtccacaaccacaacgctgaaccagatagttactacccggtagtaatcctcttgttatcttttttttagcatattgtgaatgcccgttgtgccactccttgtactattcaagtttcttatgttctttcttaactagtctggtgctcgtgcgttgcaacaagtcttaaataacgtgaaacacaataaacttgagcattattgttctgtaaatatatttgtgaatacaataatagttactccaaaaaccttcaaatgttgtcaatcaactataacactatgaattggacaatctaaattacaaagcatatacaatcgatctaaagattaataatagactgtctttagggagcgaattatagaaagtatgcaattagaatataatcagattgtatggcaaacaccaaaattataggcggatatgtacacttaaaatggcagccaaacaagtactcgtattctttggagcagtctgtcattatacactcatgccagataaccaaatgtgttaatcaagattgccactagattgttcaccctgattatgcaaataacaacttatttgaagtaccgccataatctatgacccgcataataacaacttatggcatgcatgactccatcaacggtgtcacctctgttgcttctgttccttgaatgaaacacctcgaatgttgctcttgcatctgaaagtagcagcaaattcagcttttaatttcagatggtagtatcataccactcatcttgttgaattgatgaacataaaattggcaaatgactacaaacttgcaaaatactaataagatttcagtcaagtttttcaacacaagatcgtagccatttttctgaagtatgtgaagggccattcacatgaagaacccccccccccccccaagcccacacatcccctgagcattctaggagagtgcatagctatgctgtaataaaatcaaggaaaaatctcggtactcctgacctgaccatagaggcacatgacgacaaaaaatagagtaaatcatatctatttttgcagggacgtttatagcttccatgcgcaagaatataatgcataaaaattggagggctgcagg

SEQ ID NO: 1760 - DNA, 3617 bp, Oryza sativa
taaaattttatcacattttgaatgttagtggtataatattagtcaatgacttcttccaggtcaaaaaacctggattggagatggccaccgagcagagtgaacttgatctgtcatacgggatgcggtaccaaaacgtcaaaattccagaggcatacgagcgtctcatattggatacgtgcgtatcatccttctaattgttcaaaatatcttccgttaaaaagatcttttcaacttcacagataacgtaatccgaccatatgcatttgatttaatacccacatatctacaggatacgaggagaccaacagcacttcgttcgccgagatgagctgaaggtttgtcagttgtcaccctgcatacctaaaacctctgaagagaaacttgaattctgtttccaagccgtttcgtttccgttttctccctaacatatggcacatgtgtgtccaggctgcttggcagatcttcactcccctgctgcacgacatcgacgaaggcaaggtgaagtctattccataccagcctggcagccgaggccccaaggaagccgatgaactgagcgagagggttgggtatatgcagacccacggttacatatggataccacccacccttgcatagacagacagacagacagacagtagtattgtttagctaggaagagtgcctctaaactgttattattgcggatatattcgtttcatattttcacgataacgcctgactagtgactacctggcgttgtaataatgtgttgcttcgtaagtataactgctattgtgaaataaaagtgcatgtttcgatcgatgaacagtgtcaggttttgggcattgtagatacactgatgatgaatggatggctgccaacattgttgtttgatgccttatgtccactgcatttgcaagattagctggtagcaactagcaagataagtaaagttgccaagaaaagatgatgaaatgcatgctcaaaagcggcagagcaaaatgaaccataaactgaagggatgtgcttctagatgtgctgaattgtttaccactgcaacagctgcagcgcgaatatctgccaactttgcatgcggcaagaaaaactctaggcaaagttaggatcgcattacacacacacacacactcagcaagtaatagcactccatacggcagaaactactggcgtaacttcacggtcatgagtcacaccaccttctcacttcgtcttgaccagcttcttgattatgcttttaagagctggagcactagcactgcatttctgatcagtgaagcatgatcttccttcctctgccgccttgcagagctggggatccatgggaaccttgccaagaaaagggacctccatttcctggcacatcttctcagcaccacccttactgctatcaaacacctcactgcatgcgacaacagataaaagctctggggctttctccttgatgtagttcagcgcccactcggtggcatctgtttctcccgcctcacttggcttcacaaatttcatgtctgaaaatgcctgcctcaagccactcatgttctcgacaactcccaagacaggaacgccaaccttcttgcaaaagtttatctccttcttcacgtcgatcagagaaacttgctgcggagtggtcacaatgattgccccatcaattcctgcgatctggaggtactgtacaattgaaatatgttcatcagatgttcctggaggtgcatccaccacaagatagtcgatctccccccaatcgacatccttcaagaactgtttgatgagtccgttcttgcgaggacctctccatataacagcatcatctgggttgggcagcatgaagccaattgacatgacacctaggttggactcaacatacaccggcgaccagccaagattgctttgatgaatatcttggccttcaaggcctaacatttttgggatgctaggaccacaaatgtctatgtcgagaaggccaacttgatggtccatctcagcaagggcaaaagagagctgggctgaaaatgtactcttcccgacaccacccttcccagacagtaccagaatcttgtgtttcacggtattcattcgctcaatgatggcaagcagatctggaaataaaatgtccacttgtaagattgtttcgcaaagaacaaatactatatggataggcatagcaaattcacaataacttgggacagggatagtacatatggtaggacattcacttggataaaaacatttacaattaaaaatacagttgcttacgtgtaatggcgcctgaaagttcatacagcatcattcattaaggttcataaacagtggttcacttaacatgtagatatatggaaaatcttaagtgcgattataagttcttctaagcacttgatcatttaagaactagagaacttctatccattgatcaaattgacttggaatgcagatgttccaatatacatccatggttgcaacagttcataatcttcagaaataaaggaaccaactttgatgggccaacaaataggaatttgtcggagagctcatgttctttgcatacttcacaccggactgttttttttttcttttcatagctcacacaatctaaacttcttcaaattcatcaatgccacagccagttatactacagaaacttatacatgctggaagcatgcgactttgctatagatgagctaccgactaccaaactctgaaatttcctgcacacaactgacacgaggctctgcaaaaggatgctcatacaagcataggctgtatgctccactaaattcacactcgattgcagtaaaaccaaactaaaccaagcatcgaagcgacacgccgcggagcaaagcatcacatgctgcgatcaaacgccaaaacaacactggtcaaagggattagatgggaaacagaggtgagctatagatggcactgtagatttaccgggatcggggcccttgggcgcggtggcgcagatctgctggttggggcacccggcgcacgcgtccgccttccccgccgcctccgactgcgtccccgggcaatctgcggcggcgaaaccacaaaaaaacaattaaaaaaacgatcaaaaaacccgcaaaaatcctcgaacacgagaaaccctgaggaagcaagtggtttgcccctacggtcgttggcgttctccgggacgtcgccgccgccgttctccattgccgccgatggattgattgctccctcctcctctcgctgctgctcgtgaagtcgtgaggtttaggtgcggatttttcggttttcttttcggaggcgtggttaagcacagaaacccttgggctgacccggcagagcatcctagccgttcgtgctagatcggacggtgagatgcggtttccgaggagaattttgcaaccgcgtccttttggctcagggaccccagcgttactgcggaaatttaagcaattgcaaatgttaaaattttggatgaaatataagcaccttaaaaggaaaaacctaacccaacttatcactgctagtgaggaatatttgtacaaataaaaataatcatcaaccgtaccaagttcagagcctgcaaacaatatttttcaaacgcatggcttcgatattggtaccattggagggaaactcaactggca

SEQ ID NO: 1761 - DNA, 16947 bp, Oryza sativa
  unsure (1)..(16947): unsure at all n locations
aattaagggaataagtaacaacaaattgctaaaagaaatgttgatccgctggagcatgagcatatatatagtggcaaaataaacgcagcagcatggctaaaggaatgaaggattgatcgcaacgatcaagtatagcaactggactctggacaggagggcttgtggtcagcatgtcaatccactgcgatggtagaggaatcaggaatgaaggccgagtattcacctgattcatttagctagaggatggaatatatgtagtgcaagtgcagtggaagatggaaggcctgctgcgtgagccaatgaatgaatatccaacattttggtttcaatcaggagatgacctgtcaggaacagacagtttaactgttgaataggcccctttgtttttttagagggaacaattttttttttagagggaacccctttgttaattactgtcgtgcatgatgatcggaatttaaaaaaaaaaacgaagaggtgcatcccactatcgctctttacaccctcatctgcaatccagcgactaggtggaatctatctgcaatccaacggcttggtggaatagaggtgacgtggatcactcctagagcaggaaattagttttaattgcagttagtggggatcacctatatagactagtaatttgcccgtgctaacgctacggtgacatttaataacataattcaagcaacctgctaacgctatggtgacatttaataacacaattcaaacaaccaaaaatatatacaagactatattgcatagttataagatcaagcaaaaattaaaaaaactatcactatataaataagtcaatctgttctgtacaatctgttgtacgcacataaataagtccaaagtaggtagttctgtacaatatataaatactgtgcaggtaataactatcactacctttgaccagtagtgaaacacatattgtttgctacagatcaataacaaggcaacatattgcatacacaccatcacagttcgatcatcatcgatccattaaagcagtcatggtcagtgcaaggctagttttctgtaactcaagacattttgatcttcagaatatgtttgcacggcctcataaataaaggagaaggcatattcacaaatcttgaaatacaaaggaggtaaacgaaatttaatttgttctatgacagtaatctgaaatctataacactctaagtatgacatccaacaattatacgagtaggtagtcacaacttaaaccttgaagccgaaacccttcattttgcttgtcatcgtccaatgatatgaagagattccttttgcttgtcatcttatcctgcgaaggaagtgaaaaacatgtttgctccattgtacccgatgcacagagaacaattttggatcatagcaactacagttatgtttgctccaagtttatccttgtcaatgcaaacatagtgtatttacttaccaacaaagattgtttcttctttgatttcatattgacaaacagatcccttgaaagcttgctatttgaagaggatatatgcctcggtccattcttaaacagtgaataaatcgtaagggtaacatatataaaaggctataaatttgtcataattttattcttttgtctctatatgattcatgaatttgaagatatgattatccattgcactatctaatactctgtgaatcgcatttgacgatccaatactcatgtgttcccagttgagtaaacacatgatagttctgtatatacaggcatgttaggcctcaatgcatggtaggtctgaaattagtataacggcagaaaaaatgacaaaacattagtttgacaattagcctataaagacgacttctctaacccaacaattaagagttactacaaagcttttgttgaggtaaatatcctctgcatgaaatgactgacaagtagtacttgcattatacacataacataatttgaacataattccgttcaacagccaagatgtggaggcggcatcaggctctcctttgccgcatctcgccgcttaagcatccagcgggctggcctgctagggggatcggatgctactacgccaccgagccggagggcaggaagccaaagacggctcctttgcaggtaatttctggaatatgttatctctaggctaggctcggtgcttgctatcatggcaaatccctcccttttgagtaatgaatgcaggtcattgccgaaatacgtgtctcttaccttgagagttttggcgacgagttgtatatttgtacgaaatatttcggtcaggatatagacagtgagaacaacggactgaacacattatttaccactgcagctcaacagcataataagaatttctcataagcaagctatcgttttgcctgaattactactttcttacacacattccatagagatgctttgattttcagtggattttaacttttttttaatcgtcccaactacacttgtgagaaataacaaacttgcattatgtaaaagtttgacaatcggaatatactgaaaggcacccattctttggggtttcaagaaatccatgtcatcagacggatatagtaagaaacatccatactgaaatttgcagtcaaggggcatggtggataggttccgtttgcgtgccaaaggtggtgatggcagcaatggctgcatcagtcttcctcgctccaggtcaggatcgccaaggcaagcctgatggtttaacaactcccctgctgcacagcccatggaattgtcacatggtgctagcagtaatctttttgtgtatttgtttgtggtgtaataatgcctggtcgtgatcaacattagcctagatcttagtgaaaaggagtaagatctaggctaacttccttccccatctcacagattgctaattgcttacaaaataaaattcagcagcacctaagtagagtaaactatcagatgccctgtttttccacataatgcataacattaaatttatttctttctgaatagtctccagatcacaatgaatgcattggacaatatgtcggtatttaatcaatctaaatatcagttggccctaacacattgacctaacttaacacttacctatgatgagatcggatgacgagtgattgacgacgacctgatggctgcgcggtggagacaggacggtgagcgatccgatggcggaacgcggtcaacgcgagggtgcgctggcggcatctatctggaggcgggaatcgacggcggcgcgatggcgaccggatggagagcggacggcgatgggatcgagaaatccggatggacaacggacggcgatggagagaggggcggcgcgcggcgggagagagaggggcggctggggtcggcggcgacgtgaatcgcggcgggggcggcgtgatgttggagatcggtggcgggctggcggcgcgtgggagggagagaagagagattagggctggggaggcgtgggctgggatgggggagggggcgcggttgagaggtgcgaggtggagaggatctgagcgttggattttacacagagatgatccgaaccgttccacaaggaatgaaaaaaataagtgatgagtgatgagtgaaatcatttgttgaactatagcgtagatatataggattcggtgagacagatatgctcaccagtcaccaatagttttgattaaagcaaaagaattgagcaaattgcgttcatgaattactctgtttttgttatgaccttccatagccatgagagcatagaatttggatgatgttgtgaaacgttatcttgtcatcatgtctattatattatttatataacttttggtattaaggggttgtttggtttgctcccaaagtttgccagagcttgccacaccttatgttagacaagtttgatcaagttagcctattgtttgatttatagccacacttatggcaagattcattattatctattagagtcctacatgtcatcaactcaccaaagtgtggcaaaattcaattttgctagctaaggtgtggctcactttttgtaagccacaacttagtcaagtgtgacaaaaagtatggtgaatgatgacaaacttaggacagcatctaaacatcccctaacccttgtactagttccatagttcaacgattatagggataaaaaatcactagaagcagttgccaatccataataaaaattactactaaggttcgacatactaattatataattattagctaatataataaaaacagctagaatagaataatttatacgagtcccgtaacactgagaaagtacacttagactttgttcgggagcctcggcacacaaaataaaacagcattttagtgcgtgattaattaagttttagctatttttttaaaaaattgattaatatgatttttttaagcaactttcgtataaaaactttctgcaaaaaaaacgcaccatttaacagtttgaaaagcctgcgcccgaaaaataagaaagaggagttgggaacttgtactgccgcacggagccttagatatgcaccggcaacaagtgatgttgagaaggtttcgcagtgataaattatttgagaaaagttgtatgagcgtaaaaggccttcaccactggcatagttacggccatgggccatggctactacccaatgtacttcctccgttttacaatgtaaatcattctagcacttctcatattcatattaatgttaatgaatctagatagatatatatgtctagattcattaacatcaatatgaatgtggttaataaatctagatagatatatatgtctagattcattaacatcaatataaatatgagaaatgctagaataacttacattgtggaacggagggagtagctcttaccatgggctataaagttcaacaacagcagcagctgtggctagctcagccaagcacctcttaacttgatcacatagttttctctttctttttcctttcaattttaaatccttagatagcatccccgttagcttgtggggtttgggtgaggagccattttatttaccgagaagacattcaattagcatatgatttattaagtgttaagtattataaatttgaaaaaatgaacatgtttaaaattttaaaataaactttatatatatatatatatatatatatatatatatatatatatatatatatatataaaatattgtttagcagtctgaaaaataccacaacctaataagaacggagctttattacatttgacaaaaagaaaaacgtgtagcgttagatttaaaagcttttgttttgtagaagtgaaataatgaggagatggtggactagactggaaaaaaagcaagcaatcccatctcgtatagtcctacacttcctattcatccccaaacaaagcgccgcgctaaagccgtaacgtagaaaaaggggggacagaatgagagcggcggtaagcgcaccccctccccacagctgctactcccgccgcggcgccactctactggacgcgcgccatgtgctcgaccatatgccgcagaggcgcgagccgccccgggccgctggcctccgtgccccgccggcggccgcggccgcgtcctcccggaggacaccaccgctgcgcgtggccgggcgcgccgccgccgccgccgcctgtccggccgcttcaggtactagaagggatggagccttttttcttggttgttccctcatagccacaagacacgtcgtcctcgatggctctggggtgaacatttgcggccttttgtctggatatctgtgcctgggtgggcgctgcgtggttagatggggcttgagtatcgggagattgtggtttaggacaaagtcttttggtggtcactaggtggggaagtgaacgcttaataatggcatgaaagtcttgggggagcttgcaactacaaaacaaagtacggaatgaaaccaaacgattgctccattgaccattaggatacatagtacattttggttaactgaatcttgcaattggggacaaggacactcctagcgttgattttggagcgcatacaagttaattgagtattggtgccaaatgccaaagggattttgggagaaaaagaaggtatatgaagggataaggcctaaggggaaatgtgaaggcttataagatttcaatgctctcaatgagttgtaatttcgtttctgaaattcttacttgccttcagaaaattgttcaaaagtatcctgctaattcatataatgtgtatagctgtacttatcaattcttcagctttatcaggggtgtgacttaaatttagcttcacctcatcatcaggactgcacttgaatagattgtttcagtagtatacaattatacgtgaggcttggattcatgttaaatactgactgaagtatgctctgcctatataatttgataacacatagataaaagaggcaggagacaaatatcccttgatcgaactgtaaatggaatctttgttgtccggcataagaggttagagctatttgcaagttgtcgtttttcatcttcctggagtttgcttcattgtagtatatactccattgcttgagaatccgggatctcttagcccagacttttacttgccccaagcaagcctgcttcctaaaatcaagcaaggaataaacccttgctagttgcttgcattattcttgcaaaaagccaagcatgttcatcatataaaaataagtatagcttttcatgtatgccacattcagaggttaaccattcttgttgagcacttcctgcatgctttctcagctatgctatatttatccagactgcaccgtcatttagcatgatgtctaaccattgctcagttccttatttgttcaggatactcctgccaattccaacagcctttcgctcaacaactcgtgtgcggttgacctcacctgcattcttgccatcaagacgaaattttgaaggctatattcctcagagctgctcaggttcatcattgcagatctatagccggtcatccctgctatctctctcaccatcttcagctctcatggtgtcctcccagctgaactcttcggatgttgctcagcgatcagaggaatggtttgctctccgcaaggacaagctcaccacaagcaccttcagcactgccttgggcttctgggctggcaacagacggtcagagctgtggagtgagaaagtatttggatcaacagaaatcaagttggaggatgcggcgaggtctgctatgaactggggcacggtgaatgaaagtgtggccatagagcagtacacaagcatcaccggacggtcagtgggttcccttggcttcgcagtgcacacagaggccaactttgggtggctcggagcttcacctgatggcgttctagggtgtgacccagatggtgggatcctagaagtcaagtgcccgtacaacaagggtaagcctgagctcgctctgccatggcgtgctatgccatactactacatgccacaggtgcagggcctgatggagataatgggcagagattgggtcgagctctactgttggactcccaacggaagcagcctgttccgagtgccccgagatcgcgggtactgggagctcatccatgaagtcctgcgtgatttctggtgggggaatgtgatgccggcccgggagctggtgctgctggggaaggaggccgaagctagatcctttgaaccacagcccaagcaccggtcgacaaacctggtgatttttagaagcaggaagctagcttctgaagccaagttgttgtgcaaggatattggcggtcatgtagaattcttcccatgagtagctctgccaatggctgcacactgtattcagattatttattctttcaatcaaaaacattgaattgaatgactagttctcaaaccgttggtgtttttactgtggttttagagcgttataaaatgttccgtgatacgtcttgtcatagttccacatgttttttcggattttcatacttgaaacaggtggcaatgaatcaagcagacttgcagattagccaaacaggcacaaatgtaatttgcctttttttccctatgtgccatagcctaactcaacatgacgatctcaaactgaactttggtttttctttccttttcatttgccaaatgtaattgttgagttggccttctctttttctttccattgtacgccaagcagcagcaattcaatccgacaggtgttgcttgcttccaggatattcctatcctatcccgggagacaaaaaaaaaacgggttgcaactcgacatgccggttgcttctcagctctcacgacccctttgttcttaccttgcatgtgggacaagcaagcaagcctgaccatgatagatacacaactcaaggagcaggcaacaaggcaaaggtctggggctaacctggtcaagaccatttggtatctgacctattcatatcaggggcctaattgaccggtaacccgcgttctcagcactgctaattgcagccagttttctgattgtagtgctgtgaggtaacggccgatctgatgatgggtggtgtgaccgggcaaaccattgtggtgtcatgcaatggttttccgagttcttgtaacccaaaaaaagaaaaaaaaaaaaagagaagagacttggatgatttagcacaagtgtagggtccctatatttagagtactggacaacgagactccttttttctccatgcttgacagagtacaaaagatatgttcccattgccatggcggtctccatgaccaaatttcgtggcactcagcccacatgtcgaaacaaataccttcaagatataagaaaaaaaaggagcacgcacagcaaatcgcagagaaaaagaaggaaaacccaacgaggggaacaaacgttacataagtacataaccttttgcataccatcctgaccaagcgatcatgttaccacttaccaacgaggacggccattcaccatagtttgacaaaaagaaatgatgggataacaaaccaagccatagtaacttaacgtcctaacaagcgatcatgttaccaccgaggacggctattcaccatacttggcaaattgacatgatagcaagcgcaagtttggttagaagtcatttatttctctgcaagtagttgtaaattacatggtagtgtgacaaatgttctcagaactacaacaacattgtggcacgcatgtacaaggtaaattacagcagtcctctctttatttgctctggtgagaccgtgaaaggagtagagcagttcatcttcgatcttaacattccaagaacagcagcagctgctgcaatactgacgtaaagttcacgctgtacttccgctcttgaaccgcaatccctggaagcaaccccaaaccaaagataggaaatgagctctcacataagacttaattcaatgggatgtataacatcaaagcaatcaggaaaaactcacctctgaaatgtcaccagtcagacaatagtagcgaaacaatcttttttttcctttttttgctgaatcaaactaactactattttttgttctttttcttgcaagaagctaatgtagcatgtcaggatggctgcgccttcaagaataacaaactcttcgttttttttttgtctgttttctcagtagaaatgatatgttaagatggcttgcatgacagcattgcatgctgttctctgttagcggaggaagagtattcattgggggacaaacccctatttcattgggggagacagatccttcttctcttgacaattagggcaaacccagtccagagaaaatgactccttgaatgccaacttgtctacacaccttccacactcataacatctcagtatgcaaacagtacaacctttgcaattaccagatcttctgtcatcacatccttcatctgggcaatcataaacaagtttgtagttctgacaaatagggcacatctcaatatcaagagcatatccatcattgcaatctgataaaaaccgattagcatgaaggaatcttggcccccggttatgcacctcctgtgtcttgtcggtattcaacaaggataataactcttcgtactgctcctttcgtaaactgaagagtgttccaactctgaggtgcttaattccaaacaccgccttcgtattaaatgacttgagattggaaataaggccatccaaagttaaccgtgggcagcccaaaatgctcagctgtgtgaaatattttgtgttagataaaaattaatcaagaggaatttctattaagttagaaggcagaatagacaaatatgtatttacaattagaatgtcaaactgacaaacatgtaaatataaatatcaaaagtgttcacaaaactgatggcagaaggtttcttttgtgatgctcctactatgaaaaaaaaaacaatataacaacttaaacaaatcgcagtgctgaacttagctaggtgctcttcagcaactttgcaccatcatgttgcatgtcatataaaacaaagaatcgcatgcaaattgcggtcagctacaaagtattaatgcaaatatctgtaaccactattcagattcgcttttatgtattactcaaaaaacatctaatcaacagcacttgcaaaccatgcataattgtctcatctaattagtttcactttgagaatattatctagcaggcatacagataagtgaataatattagctaaaacaaaagaaagagcatagacagggcggtcactagagaaacaatggataacctaaacagtagtcatgcaccaaaaaggtatataagatagcaaaatagcctacactacatgcaaaactacaatgcagatttcctttcccattacagtaacaaactaagagtcctatggtaaacatttacattggattgatgggagtatgttaagatcaaacgtatattggtatgacaatgaacatttccaagcaaacttgttgatacagtataagtgcaatacttgaagaagtttgattaagttatactaacctttgttaatcttggattactttctaaaacagccttcagcccctggtctgtgatatttacgcagcacgcaatacttagacactgcaaagtatctgggcacttctgtgtcaggtgtagaagaccagcatcagaaattctctggcgcaaatccccttcaatgtggatggacttccacagtaagggctcatttctgacagccgaatgcaatgtcttacacactctctcaacagaaaggatgtcacgaaggccaaggtagtcaagggcaaacagcattccctcatgtggaactcctccctcctggacaggaacaacttcaactgcatcgccgcactccaatgcagcatttccagaggtaggaggggtctccacgaacccaaaagaatcatcagcatttcctgaggaagaagggttcttcatgaacccaaaagaatcaccttcaccagcagaaaggcctccaaaccccaaggggccttcaaaaacaccccgatagccaccaaactgaaactccggtgatagaacaaaagccttattcaagtaataactcaggtcggcaaaaacagcatcatcgcggctgtctccaaaacgcccagcactggacatgactgtgaggtcctcaatgcaactggcgatcgccgcggtgaacgtggtctccaggttcatgccgaaggggtcggtaggcaagaggtccacagggtcgaactcctcttcctcttccagctccagctcaaactccagctcatcccaccacagggagttcaccccaccggatgacagcggcgaggcctcctccgaccagcacccgcacccacacatcatgccagcgcagtcctcgttcatcaggaacgagctggtgagcgagcacgacgagtaattcagcgccatagcctccaaactctcctccactctccccctctctcttttttttcctctttctattttttttgggatttttttcaactaattttctgcacacagaaacgatacagaacaagcaaccctagatctccccaagagaaccctccattcctgatccgggccgataaaaaaaattcccctaggaccaaaaacttcaccgagcaatctcgatcatggatcccaatccaatccaatagcagagaaaaccagggcccctcgatacaccaccaccaccacctcaatctccctcccaaatcgaaacccccaactccccccaatcaacaaaaccaatccacggccccggcgcggcgaatcacgcctccagatcaccgagcaacacaaagctccaccccccaccgaaaccaagcggcggcggcggcgaggaaccaaggatcgatccccggaccagaggcacctcgagacgggaaggggagtcgttggcgggtaggcggggatcgatggatacacaccttcgaatgcggctgcggcggtgggaggatggggtactgggaggtgaggcggaggaggagggggaaaccctaggatgtgggtaataggtggaggcggaggatggggggaagaggaggaggaggaggaggatggtggtggcgtgggggttccgcggaaatctcgaagcctcctttgcttccccttggcttccgcgccgcgcgaggggaggagaggtgaagaagaggagaggaggaggaggagagagagtgcgtgtgcgtggcctgcctgctcgttgcgctgggtgggggcggctgggctggcttggctaaggtaaaggcgagatcgctcgcctcgcgtcgcctctccttttcgcttgcgttttcgttggggggtttggtttttttttctcttctccgagcgagagtacaggggctttccggcaaatacacgcctacctgcctaccggactgcctcgcctccctccatgcaaaacctcctttgaacggccgtgcggaattggcggccccttggaacggttggggcacaaagaattagttttaccgcttgacttggtaaacatatatcggatttgacatatgcttcgtgaataattgcatataatatgaaactagtggaggatagtaaccatgtacgatgggaaagtttataactgacgaaaaaaatatagtagtattcatgaggaatgataatatgttgtgatgttttagatttgtgatagtttatgacggttacataagttaagataagaatacgacttataactattacgtaagtgaagagaactagcgagataaaacttatgtttaggctattacttatgtagttttaaggtgattgaaagtatgaaaacaactcctgaaaattaaagaaaaaagaaatatactccctcccctccggttctagtttaattgatgttttagacagtattgcaaataccaatgagtaattaattaggatctacattttcaattatacccatattaaatacattcgaggatgaaaatgaagcagcagatgcatgcatctttactcctggagtaccagctgttggtcacagatggaaaccaagcaacaaatgtttgcctcgggagtgtattgtgtttgcatgcatgcaaggatagtgctgggaaactgagccttgagctaaaacgtcgatttttcccatacaaaagctattaagctataatgtcagttaaaaaagaactggagggtgtactattcttatctccacataatatgttatctatagacttaattacatttccatataggccaaaatttggcgtggctataacacctaagttaacgggaagaaagaaaatctaaataaagggggttatattccagacctataattggcgacggctccaaaatagttgggcccaacaaaaccgcacgcactaagatatgaggcttgtttggctacaaggtatggtgttgccttgcagctcgcctgacgtctacggcagcttcatttgctgcatggtgtaacagtcgactggctgcatggcagcgctacaccaggcagccgaccgagacaatgtaagtagttttattttggcgcgactattggcctaaaaacaaatatgggtatctattatatttctctatgtatataaaattcaacttttacaaactactctatgcgtctcaatataaatgtatctaggatgatctccgtggcacattaaaacactatagctacttatagcatgtattgtgaaggtttaatgcattatttctcttctatacgcaactccagctttcaacaataatcatgcggggattgctcttacgctgagtttgtgggtgagcgcacaatacgaagtgatggttagtgcatgattaattaaatattagcttctttaagaaaataattagtataagcaacttttttatattttttttataaaaaacatatagtttaatagtttgaaaagcgtatgcgtgaaaaataagagagatgggttggcaaagcaaggaaactaactcagcctaagcgtttctcatattacaaaggagcatttcctcagaaaccagggggtttattacaaaaacacgaagcagtttgcaccccacggaagcccaaggacacgaaaggatccatccatccactgacgaggcggggcctcggctgatgtaaccttcccacctctctctctctctctctctctctctctctctccatccctctcacgcgtgcaagcacacagcagcacatatccaagccgtggatcacgcaatagcagcaaagccaagcctccggccgcaacaagcaggagcaggcagggcattgattcgcgacgggtggatagattagagcaagtataatagtgagttataacaaaaaaaatcaagaatgttggctatcatgtaagagctagcttaatacaagtttctaggcaaatacattaaatgcataggtgagagatagagggaggagaagatagttgtagccaactttataactaatccattatatatgttagctttaagatgggctaatagtagtaagcgagctctcctgttatcttgctctaaatggatcagcggatggcaggacgagaggttgttggccgctccgccgctggccatctatacgcgtgtcccgccctccccgcggccccgcccacgcacgtggcgcccgccatgaccgcatcagccgcagccgccaccgtggcgtgcgggtgtggggggcgtcgcgccgagatgggccacgcgtcgtcatgcggtcatgcgcgcgggcgagccacgggctcacggcccacgtggtgggacgcgtcgatctacggctgtacctgtgcgcacgcacgcacgtcttgcgttggaccgacgggaccccaggataagctggatatggctgaatggctcagctgatcccttcccgtcattttttcttgctccggtgaaaattcggctttggtttaacggtatacatcagctcatcaaggcggagctacggatcatcaggtcgtggaaaacgtggtgcttttatgatatttttgttgagtagcataagccccaagatttgtatactacttctctgtttgcaggctacgtgcagcggtggataactggatatacgatacacatcatgtgatgcaagcatctcccgggcctattcttccccttgctcggtgcgcgcgcctagtggcggcaaccggagaggagagaagagaacccttcctacggtggatttccttcgtgccaaaagtacgcttcggcgagcaacttttcggcgcctctcaccatccgggtggtaagcgctgacgcaacgcgcgcgttcgggctgcttggccggcacgaaagctttcgctcgctggcacgcaggaggagcggccaggtcgcgtcgccgaggcgagcagctgacgggtgccgttttggcgggtactccaccgtctccgcgtcgagtgtcaaccagagggaggaacagatcaaaagaaagtcgtttctttaactccgatgctgaaccagctgctgcgcgcagcagctatttttggtgcgggcaaaggcatatgtgctgtgtggccgaagcttccagcacaaccggttatgtgtaactctccgtagtagtagatcagaacagaacgacgtttcgtgatcatttacacacgtttggtttatttaccaactttttttgtattttgtttcctcgaccgggtcgatcgaattgccgtgtatttctcagttcttgatgatcatatatcaatatgtgtatgccattccactatgagttggttaagagtgcttatgtttgtttagctttttaacgatatgtgaaacaatatgagtcattattgttgattatttaagtcttaaatattccaaactgaaaaatgtatttgtttgtttctatatgaaacaatttatatgaaaagtatttgaaaacaagtccttccgtcccaaaatatagtaacttagaaaatgttgcatacgccactaagttttttatattttgagacggaggtaatagtaatttggaaaatgcacaaatgataaatgggggagtagttatttcgagaaacattttagcgctcaacctaagtagttcttgatgaaaattaaaagaaagtttagttgtgcagttgtaatatacgacaactaatattcagctctcaaacttgtaaaattaattcaaaatgatatcattttttattatttgtttgaaaacaacatttgtaaggttgggaattttttatattttgcatttaactatttagtgacaactttaatacgatacaacataaattagaaaaactaagtttgaccgtaagaaacaatacaacttttttaaatggtatcggtacgatcgaaaattccagttgtcatcctcaaacggacggaaactatacatgtaccaccattgttctttctcgaacgtacaagccaccccacgttgggccaacttcacagccacggtctcaggcccaacaagctgacaaggtagctaaacacggaaaccaataagttaactttacatcacttaatttgtctgcgagtctaatattcacacaatttttgacaatttgatcatttgaaaaatctaattttataaataaactgtcgtcaaaacttatttcaaaaatgatcattctgtttagcgccaaatcgtgtgacgctgaattganacacctcagcgctacacaaca

SEQ ID NO: 1762 - DNA, 19335 bp, Oryza sativa
cacgatttggtgctgaacagaagggttttgaaataagttttggcgacggttcatttgtaaaatagttttttcaaatgatcaaattgtcaaaaattatggtaatattcatctctgaacccaactaccaaatatagccaatcccccgactcattcctgagtagaaaactggttggttttggctgacgtaaacccattctagttgtgagacaacttcaagagatctaaagtgaacttattccttttcgattcagtgacgacttccaagtaacaaaagtgaacttatttcttttcagctagggacaactttcaggctcataccatatgccattggatcttcatatggtgatttattttctctttttcggaacacttcgtataacttgctacgtcgctggcgtcacggttactccctccgtcccaaaaagaaggtaaactatggtttctgtgtccaactttaactgtccgtcttatataaattttttttataatttatatttttattattgttagatgataaaacatgattaatattttatgcgtgacttgtatttttttatataattttttcaaataaaacgaacggagttttatttttttttttgcacggagggagtacttcgcaagagcatagagatgaaacggagtgagacgagactcgagaggactgcaagcgctacgaggcgtgtgctttgagattgtggcgtgagacgtgtcgcacgcatacacagcagaaatttgcttcccacccaggcacccagccgagaggtttttcctatgtgtcattaaaaaagatggtgtaccactgaaaagttcgagcctctgcagaaatttgcttcccacccaggcacccagccgagaggtttttcctatgtgtcattaaaaaagatggtgtaccactaaaaagttcgagcctccctctaccatcgtcgaattttatcgtgccctccacaccaccattccgtcgcaatactgtttggatttagccatctggtagctctgacgtgtaggcccgggtagggaaaatgtcgctcttgccctttcactctctccgcggcgtgcgcgtccgcttcactctcagccggcgcccagccgagcgtggccgagccgctggacgcccgagccgccacgccggcctccccttccctcgtcgccgccgtctccgccgagccgagcggacggcgccgccggccacccctccaaccagcacccgccctccacctttgcccggcgctgctctggctcctccaccccgacggcctccgtcgccgccgcaccggccttcccccatcctcctcgccgccccggcctccttccccgacccgccctactcgcagcgaggaggacagtgacctcccgccgccgcggcagctggccgacccgccctactagctggggcgcaccatcctgggctacgacgtgcggcggtcggcgtggctggcagcgcacccggagttcccggcgcacgtggcgccccgaacccacctcgctcgccgcacgcccgccgcgtggagacggcgcgagagatcgatcgaccgattcgacccgaccgatggcgagctcgctgtcccgcgtgggtgcggcgctgccccgggcgcgcccgcgcgccgcgctccgatgttcggtgagcaagcttgatggttccagggcatttgattcgctttattagaggggagatgattgagagtccttggcggacttaggtgctctctgatgcgtttgcccatttgcacaacgcacacactcacggagtcatggttctgttgcctgctggtaatcgaatcgcatacttagattagaacaactaattaaactgcaaagttacatctattgatgaccccgagttctcctctgcatttcgtgtaaaatttgatgatattttaggagtatgtaattcgggatgcatacttggatattggggtattatgcttgtgtatccttcagatgccaaaacggcattaatgttttgttgtttggttttgtaattttttgtagtttatgtaactaattgcggtacgcggcgcacaacctcgttctccatggctgggaggccaaggtgttcgacgagaagagctggatcggcgtcaacaccggcagtggtcgctcgacctgctcgacgcgtgggccgaccggcgcccggccgccgcccagccggggcaccgcgccgccctcgccacggctcacgccgctgtcgcctcggcccggtcgctgttacgaaaatagatgcacaacggagacacgaattttacgtggaaaatccttgcgggaaaaaccatgggcaccgaccggcaatgatcactatagagaaattttgatacaaacgcatggaatacattgggctgtcgcaccctccccatgcggcttacaagggatatatatagcagaaatctaggagccctaataggaaactaatcatataaagtagagtcatattagataactaatccgaatatattatgggcccgaaattcggatcacatatttaacaatcttcaccttgagacgaatttcccttgtagcataaaaatcttcaatctccaaagaacctcgtgataataaaatcaatgtgcgccaaatagtcacttggactattgtcggtgacatgggaccgggagtatcatgacttagggcatccacaatgtaggggagaagtgggtattaggaattaaaatattcttactactaggtaagatacatcgtggaagtagtaaataactactaccaagccataagcttgctacaggttatagcactttgtggtgggtcctatctaatttttaattgtgacatggctcatgtttggggttctttttcagataggtcccaccttattacccactctacacatatatacattgtggtgcatcttcaatctactattaccatcttacatgggcccaccttactacctacttttgcaacatacattgaggatgcccttagagacttgaggcagacacgatcacccacgtggcctaaccccctcggggggggggggggtcgggcccgagggtgatacggccgcccttctctgtctccccgaggggtcggaccgctcccgtctcggccccgagggccgaggcgccccgaccccttgtgggttttgcgccgcgtatatggggtaggtgagcatagcggggctcacctaaccacatttattgcggtttggacgagcgcgtcacgccgcatgtaacgcagtgcagcgcgctcgtttatccggtcagtgaccagtcacagaccgatcagatcgtgggttaggtggcgacaggcggtctgacgcacgcctcgccccatcccgccaggatgagagcctccaagcactcgtccctagccggagccgacgtgttagctcctggagatggcacgttggtcccggtcagatatataccaggcttcatcctaaccattacaaacaagacattgtatgaagaggggcgaacatgcagattgataaactgacacgtggtggacaagaatgaccgatttgtgaccggtctgacactggtcatgtcgtcagcagacagccatgttcccacgtcgcgcctgcttccggcggaagtggaggtaggtatgggccgtcccatcagaaggtcattcggacggcaaccatacaagtctccgtctgtttataaaaagataggataagtccccacaaaaagagagagatggtgcatgtggtatccccttgaggtataaaaggaggaccttgcccacttagaaggggattgattttcggatccagaaggatcagagagggagagagtaagagctctctggttctccagctcttttgtagcttcttcatacatagatccacaaaaacacaggagtagggtattacgcttctcagcggcccgaacctgtatacatcgcccgtgtcttgtgtgtttccattctcgcgaaccttccacacacagactaggagcttagaatctcacccagggcccccggccgaaccggcaaaggggggcctgcgcggtctcccggtgaggagcccccacgctccgtcaactataattcataacacccttaatccagaagaggtagactacacttcaaactcgccattgggaacaaatcctgaatctgttggtatgacattgtggaacccagcagagatgcgaaactgatgcacaaacttcaaactcgccatgggaataaatcctgaatctgctggcattaatttctagaatccaaacagaaatgcgaaaaattcttgtgcacaaaaacgaagtacttagatcccctgataacctcctggtatgttgggtacaatggtagcaaaattcgccggacaatttgatcaccttgtgatctagacaggagcgaggctacctctcgacgacttgaatgtacttttttttttaatctcaggtgcatgacttatcctccttaaaacatgcgccaacttgcatcttcacttgccataacgagattgtatctcaatccagaagtcgtagatcaaacttctaactcgccttgggaataaaatcctgaatctgctggtacaatttgtcaaaccctaacagaaacgcgaaacactctgggtgcataaaacgaagttgatctccgtgcagaacctcctggtagactggcttgtgaatgtagcaatttggaacgtgaatttgtgttcccctgaacagaaccaaaacaatgcaaggcttaaatccctggtgcgaagggcgtgtgcacgtaataattccaacgtgaaatttaattcacatgaacagaaccgagaaggctactgaaggcttggacttttctccttcctcgggatgcgtgcggaatagatcaatggcttcaaccctgctgttgcttctgattttctcctgcgttgcttgatggacgtgattcagatcgatgtgttggagcacttgcttaaatcgatctggtcgacaccgcttcgggtttgcttcaccggtgattcaatctcaccgaattgatttctgcgacgatgacgacgcgttgctgttgcggccgattcttcgcgacgtgcgctgctgctccttccccggcggcgtcgatgacgaggtcaatcagatcgatatatactccgatccgaaaaatcacaccggtggctgtgtgattagtagatcgatctccaatgctttgataccacttgttatgaaaatagatgcacaacgaagacacgaattttacgtcgaaaatccttgcgggaaaaaaccatgggcgccgaccggcaatgatcactatagagaaattggatacaaacgcaggggatacattgggctgtcgcaccctccccgtgcggcttacaagggatatatatatagcagaaatctaggagcactaataggaaactaatcctataaagtagagtcctattagataattaatccgaatatattgtgggcccgaaattcggatcacatatttaacagtcgccggccgcgccgccgctgcaccggccgcgcccccgaatggctgccctctgaatggcacagaaggaaacaaatttcatcaaagggcaactaagtcatttggctataccgttacccaccgttaccatcaaaaatggacggaatggtgtggagggcacgataaaattcgacgatggcagagagggaggctcgaactttttagtggcacagaggcagacaccatcttttttaatggcatacagggaaaaacctccccagccgagcgtcccccactccccactcactcgccacccatcccgaaccccgaggtccccgacgcttgcacggagcgccgcaaggccccgcagcggcgcgcctgccgccccattcaacgtcgaccggcacccgcgcgcctgggcaccgcgattccgcaagacgaatccacgacccgtcgtttgcccgtttccgtcgctgcgtcgttggtcggtacggtaaggacagtaaggtttctaaattttgaatacgaatcaccattgtcgtcccaatagaggagagtcaagggacgacacagaaggggacgcagggagattataggattgatctcatctccccatagcgacgcgtgtgcgttgttgatgtgaagacgccgacgttgctcctatggacggaggtggtgatcatcgggctttatttggctatggctaatataaattgatctaatgctaatatcagtgaaatctgatctatggattatttgtggaggctaatagatgcggcgccccagggagattataggattgatctcatctccccagggcgacgtggggatcgaacgacgttggtctctaaggctctgataccatgtggaaaaaatccaatttgttgtattttgttgttttctcatctattacatcgactctctcatggggtatatatagtagtacataggggatagagacttggagtacaatataagtaagagtagatttatctctaggattctatctctaggatatatcttatctctatatttgcatttgactcttacctctaactaacaatagttctaacagtccctccttgccaccgcgggccggtcggcctgcctccaccgacggccgacggcatgatctggttcggggaattcaagccgcgtgaatcgattccaatctcgtgttgttcgtcttggtggatcagattggcaagcgagggcttttgatcactcgagatgtcgtcgtcgtcgtcgtcacctcgggcgccgggggacaggaagcgctgccgacgcgcctcgggccctgtgcctcgctgggcgtcgctgcccgaagatctggtggacctggtggcgtcgcgcttgcttgccggcggcgacctgctggactacgtccgcttccgagccgtctgcaccagctggcggtcgggcaccgcctccccgcgcggccgcggcgtcgccgaccggcgcttccacccgcgccgctggatgatgctcccggagggccacggcctctacccgggccacccgagcctgcgtgggtacgcccgattcctcaacctcgacacggggaccctggtccgcgcccggatcccgctcctccgcgatggctacgtcgccatcgactccgtcgacggcctcctcctgctgctgctggaccccgacccgaaccaggagggcgccgttcgcctcctccaccctttcaccggcgacaccgccgagctcccgccgctcgggacggtcctcccgcatctcggctcacggctgctggattgccccgcgccgtacaggatcaggagcctcgcgagggtcgtctgcgcttctgtctcctgcagcgccactggagctggagctggagccatcaccgtcttgcttgcactctccgtggtgtctcgtgtagccttcgctacttccctggaccggcaatggagcctgtcgacctacgaatgcgtgatactctcttcaccgatcgcatcccatggcaagatatacctgatgcacacagacagatcatgtggcgagaagatgcaccagattctccggattgatcacccacctgcagcagcgcaggatgggtcgggctcgggcgcaggtcgtgctctacaagagccaaagctggttgccacaatccctgcacgcaagctcgaccattttcaaggtctggtagaatgtggttcagagatcctggtgcttggttacaagaactggtctacgtcgcggatttcagttttcaaacttgcggaccttgtgctgcaaaggtttatgccaataaaaagcatcgggggccataccctgttcattggagaaaggaacataagtgtctcttctaagatactgcctacagtcaagggtgacaatcttgtctaccttaattcaggacttgtgaaataccacctcagtagtggcagcttgtcactggcaattgataattgcagcctgtatggccgtgcaccgggacctagtagcctcgtccactatatctacagctgctgcattcgtaatcggtggtattgactttattttcttactgctttatttctccctactgtcgattgtttttgtcctgggctagctattaatatttgcattatgtacttgtaggagcagaggactaatatgcagaaaggatgcaccagagtggttagtgcaagattgaagactagttcaataatgaggctagtccttcctcccttgttttctgtaccaatacgtgatgcaccggtcttgagctagaattttgctgataatcttttttggatcttgcggttatagatactttacatgccagatcttctgctactcacaagctatgttttgtatactgatgagtaagctgattgcgataatgattgacaagatgaatcagcacgctgttggaaaagggaacactaaaatatttagtagtgccaaaacaacaaaacatgtctggattttggcactacggatgttttggtatggcactgaaccaaacaaacccgaagagttaaactggaaccattctcttcttcttttttccattgatgaagtgtacctccaaatatccgacacgcaaacccccatcgtttggcttatcggaggaacaagcgaaacgacatgtttgcaaacgaaaaataatttatgagtaaaatttttatatacgtgttcttagcaatctaaaagcaaaggctgaaaaataaactttaattaagaaactctaaaattaactccaaatttaaagttaaaagttcaaattttaactgataaatataagtataagcgaaaagatgaggctggcagtcattcgcagcttcaaaagactaggaatcccctcatgcctatgggccattagtgaagttaaagcttgtacattttgatgggcctgacccactagtccatgcaggccatggccgggaactcgggccgggccgggccgaacgtccaccgcatcttccccgagtccccccggttctccccgtctccgctcccccactgctgccaccaccgctccggtcacctcccccatcgccggcttccccttcgcgcacggtgccactccccgagccccgccccgcccgccgcggccatgctcctctccgggccgtcgccgcagcagcccaccccgccgctgctcctcccggagagcagcggcgaggacggcggccacgactcctcctcccgcgcggcggcgtcgggcggcggcggcggccccaagaagcgcgcggagacgtgggtccaggacgagaccctctgcctcatcgcgctgcgccgggagatggactcccacttcaacacctccaagtccaacaagcacctctgggaggccatctcggccaggatgcgggagcaagggttcgaccgctccccgaccatgtgcaccgacaagtggaggaacctcctcaaggagttcaagaaggcgcgcagccacgcgcggggcgggggcggtggtggcgtgggcggcggcggtgcgggcaccggcggcgggaattgccccgccaagatggcgtgctacaaggagatcgacgacctgctcaagcgccgcgggaagccgacgggcggtggcggcgccgccgtggggagtggcgccgtcaagagccccacggtcacctccaagatcgactcctacctgcagttcgacaagggtatacctcttccagagtttacagtcttctgattaaaatgagcatgccttgcattgatggatcgaagagaggcacttcgaactacttgcattgtctgaagagcatgggacagcttacaactttggtatttgttcaatctcttgatgcacaactcataactcagcacagagccacagactaactgcaaatagaaccctaaacttaggcacttagcaatcagaattgagttttctttacaccatgtagctcagtaagcttgaacagatgaactaacagctgtaataattttttcaggtaatatgaataataaatctccagcctgtattcgtagtgcatccagccaaaaaccagaaaaatagaagagttgttggacaaaccccaacatgcttgaactgaagcagaacagtagaaaaagtctagaataagactctaaactggactaacagttatactaatgtatgtcactagtcactagtcagccaatgaactacgcagaaagtaattatgctatgctgtgtacttctgacagcttattagctagtaattcgcgttgaggggataaataaattgtcactataaaactatatccgcatcgtagtaaacctaaatagcccctccatgactctaccggttgtaccagtattatcaccaccagtagaaatgatctcaacaattgatttatgagttatatcagtagttgaggtggtagtataaattgatatgatccattgtattagaaaagatgaatggtttagattgattctacttaaagcagagatcattgtaaagtgtgcgggcatgattttcacaattgagggatgtaaaataaacagtattgaagttagggtggaaaaatgaaaattaaacataagcaatattttcagtcttcatgcttatacttgccttctacagttctgcttgtttaattcggttgttttctcattgactaatattatgacccttgtctaggttttgaagatgctagcattccgttcggccctgttgaaggtaccaaaatgtccacatgcaataatttcagatatgccatagtcgtttacttgcttggctaagttgttttgacatagtaaatttgatgcaaagtcatttgcggactagtcattttccctttttatggttgaccatccaaaaaagtgctccaaaacagtgagtttttagtgatgccatttttcttagtgtcatagaagagctttcagtcctagctcattaatttttctgatggcgtatgatttattgttctcaaaattttggatgaacctaacatttaatttgaattgctcgatgttgttgtggaattgttgaaattctcgctttctcatatgaagttacaatcaaggagaaaaaggcacctgttactagcacttataattagttgtttgaccagtaacaccaataaagtataatttcatttttaccatttttattatcagattcatgtgttttgtttatccaactcctgttatcaatgatactctgatgtaactgtggttatgaagacagaaccatgcatatcagtgcatcatatatagttttactctgattcttttgctcttttctgttttacagcaagtggtagatcattgctaagtgtcgaagatcgactagaacctgatagtcatccacttgcattaacagctgatgcagttgcaaccaatggtgtaaatccatggaactggagagacacctctaccaatggtactaatccaaatccaaacacactaaaagtgataataataatctggatatttatggcagaggaattggactggttggaaatattgctgcttgactgtgtacttatgaacttgattcaacttccattggataatatttattttgattgcatgaacttcctgttctgctgagaaatattatttcaaaatatttcataaaccactgaatttaactatttagtcatatctgtcattcctgaaatatggatgagctattggatacttttttctttctaactgttattgtttcaatttgtttctacgcatacggctaatatacaccatatactttatttttactaatgaagctataagttattaatttcagatggtactaaaactctataattcttatgttaattaattcgtggctccttgttttaatattctgtattaatcgggaaacgtgcctcatacaggtggagataatcaggttacttttggtgggagagtcattttagtcaagtggggtgattacactaaaagaataggcattgatggtactgcagacgcaattaaagaagccatcaaatcggcatttggtctaagaacaagacgggccttttggcttgaagatgaggatgaggttgtccgttccttagacagggatatgccggttggaacatacacccttcatctcgataccggtaatcggaaaacgttttctctgcttatggacaagactttgttttctccacaactaggaataccgtagtagattatttagatttgtaacagtattttctgtattgtggtgttgttgttgttgttgtgtgtggtggggggattattttggaacatatggcttttcagtttgtgacttggttggtgcagtagaccctaactaagaactgaaagcaagtggcaccacacagaagatttgcatccattaactttaaatgtgaatgccgatttcttgtttgagattcttcttgttgagctaactagttcatgttggtcatctgtacatctaactagaaagtatggtgctaactagaaatttcttttgggggtatttgtatactagtgatgtttgtcagtatttatgtttggatgctgccaatagtgaatgacactctcattaccaacaaactgtaaaaaatatcatgttttatcagttgtaatttacgtctcaatttacgatgctattttgcgtccaagttgcgcattgccaactaaaagatttagttttttttctgaagttttttttttcaaactctactgaaggatgttcatcaacactgctcccttttgttccaaatatagattactttagacttctcaacaatttccttagtaagtcatttaggaacttctaagcacttattcaaaaaaaattcctccatgattgtccttccaaaatagatgctccttctctcataaagaaatgatacatattttccaatgtaatataaatgaaggccaacaaggtcaatttgagttagtgcacagatctaaaacaacttattttggaatcagatagagttatattgattcaatcattgctgcattcaatgttcacaggaatgaccatcaaactatatatgttcgaaaatgatgaggtccggacagaagacaagacattctacactgaagaggacttccgagactttctctcgcggcgtggttggacactcctcagggagtattcaggctacagaatcgccgatactctggatgaccttcgtcctggtgtgatttatgaagggatgcgatcacttggtgattgatttggtgacattgcctgaccaaggcatataatatatccaaagtagatatggagcatactcctaccttttaatgcaatttgaagccaagcaaatcatgggttcctggttattgtaaatttagcttttggcatcttgacctaagctaattttaaatgtccatgcagccgaaggggaaaagttatactggatatacattggttacccgaagtaaatagccttggaagttggaacttgaaagttggaaatatgatcattcaagctctctgaagatccaaggtgctttggctgagtacaaagattacagcctaaatgaggacctgttagttgctgccaacaggtcctggggttcctctggtttatatgtaaatgtaaatgtagctctgtagcatcttggtgttagttagtttccaatgtgtttgttacccatgctgatactgggttttacatttgtcacaaatagtcttggaagctggaaacaaatacattcatcagaagtgtaatttgtccggacaacgaaggttgtctggcaaaatgtaagatttctgatggattgttgcaaacagccttggaagttccgaagctggaataaattcattcagcagaagtgcattttgtcttgagattgaagatggtacaaaattacttctaatttaatatgcaagttttgacaagaaaaacggtggtcgatataacataaactttgaggatacggctgtcttgagattgaagatggtacagaattacttttaatttaagtgcattttgttattcacagagcatatgacttcaaaacaccttgaatcttttgagattctgaagtgagaaacaacacatataattgaacaacacagtgaagaaatcgtggcacacgatcacgatgcattcaactccagtggtactttcaacccaggatttcaaaggctgaggaaaaaaaaatcatggtgaagcagcgatacacagtcgattctcccaaaatgcggtaaagaacaagaaaagggattctcccagagcacacgagttccgatagggctagggcgtgaatgaacgaacgattcacacaagcatcacgcctagcaagctaagctagctaaataagctagcagcaataaactagcaagggggtctcctcctcatggctccaacctccaccggcggcttctactcctcgtcccactcgtcgaccttgtaggagacgagcgtgtccaccttgtgaatctgccatggcaagaacacggcgctgtaacgtcagcaatctgggagaggcagcgaaaaaaaagaaacggagtcgattcagtgatattcaccttggtgtcgaaggaatgcagcttcaccatctgtggattctcgatgagcttggcgtcgctctccacccaggtgaagggcaccgcgacgtccatgtcggtgtacgccagcacgtcgaatatgcctgcaaaatcaatcaatcaatcaatcaatcaatcgacgaatgcggatgagctgggaggaattgggggggagagcagaggcgatgaacactgaacactgaagaagtagaggtggtggtaatggcgcttacatggctcgtcgaggcaggggaggtaggtgatgcaggaggcgacctggcgcatgatggcctggatctccctcatgatctccttgtcgctcttctccttgatgacacccttgtcgaccacctccgggtcggtctggatgctgaagttccaccgctccagcacctcggaggtggccttgctcatgatcaccagcacgatcctctgcagcttcccggcctccagccactctgcgcgcggcaacgcaggaaacacaggcaagatcaatcagcagcagcaaaagaaaaagaaaaaagaaaccaaatggagacaggcaggctagtgatccggtgagtgaggccagacgacctgagagctgggtgttgaggttggcgatgaaggtcttcaccccttcgtcctgcgtcagcagcatcgtgaggccgtacttcttcaccttggtgaagctctcctccgggtacaccccgcggttgtacaggatgctgcgccacgcacaaaccaagaacacaaaacaccccggatcagaaattaaccctgaatctgcagcaaccgttttttatattttttttctttcaaaggaaaccagcatcagcgcagcggcggccgtcgatcctggcacccgcaaccgcgcgaagcgcgcacctgttcgcggcgtagcctgccacacgagaaaaggcattcgatcaaacacctatcgggcgcgcgcacgcgtgagaggagccgagggcgaaaaaaaataaaagaaacggaagcggagatcggcttctaccgaagaactcgctgacgatggcggcggagccccgcagcgtgatgatgtccttggacgccgtcctcgacgccatctcctgatccgcctcaccttcttaactcctcctcttgcctcccgtgcggcggcggcggcggcggcggatggggggagaggaaagaggaaagggggggaaaagccgggcaaaggcaacggctagtgtggagcggatcggctgcgggctgcggcgcttgggaacttgggagcgttgtttgtcgatgggtcgtgttgggtcaggtgcgggggagagaaggtgtcggcgtgcgggtgggtttcgggagtttttaaaggtgggccggacctgcgctcccaacggtcgtgtgggcggtgggccagtgggcttcggttggcgcgattcgcccaagccgcgcgctctcttcgagtcctttacctcttgttgatgatgaattgtactggtaccagtagactactagtagaaccgtagaaacaccattttcttggagaaaatgctcctgggtggctgggtttttgaacttgttcggacggttggcctttagggcagtcccaacccataacactagacatagttttcataaactctacatcatcaagaaattagtactagacactactctttcaatataaacaccactattccatacttcaatttaatgcaatttatcttacatgatattttgtgtagaaaccatatctcatgcaagacatggtttccttctctttcctcatttatttacttgccacatcattttttatcctaggtggcaacttatataatgttatggacatcatcctagacattgggttgggaatacccttagaaacggagggaaggtatttgccctttgccgccaacaacccctatttgccctcatattcgtccgtttagcacagttataacttaccaaacaattttggtttcaccaaaaaaaatagagtaaagctggttagagtgttctcgcaaaatgagcgtcttaccaaacgagacatctgtttcttactgtttttctgggcttattcggccgaattgtaaatcgaaaagtttattcttcaccagactaaaaaaatacgcttattcattatattatcagagcatatcatttgattcacggtttggaaaattatgttttgaaaatacaaaaacttatactgtagtccttccatcacggcacaacaacttttttccatgtcttgtaatataaggtgtgtgtgcatgcatgcacattaactatcacctcttagtcctttaaatttggtttgttttaaaccatctaccatcaagcccccaatcacactgcttgcctgtacggatgtgatctaaccgatgcgataatcaaattatttctcggtcttttgcgttagaagtgatttagcctaacacccattttggcatgtagggagtattacttagaccactcattttagacatattttatcttaaaatattaaattaaccactataatcggttatataatggcgataataatatactcaataatctaaatatagtttttaatatatttgtgaactatgtgattctatactaaaaactacccctatgccttaaaagccactgactagcactgacattctgtttgccttttgtttgaaagttaatttggatgtatttaaaattcaagtaggattatattgtttcggtagagattatttttcaagagaaagtttcctttgattttttttggtgcaaccttttttctttacaaagggaacttttctaatgtttgttagaagttttggtatatagctaacttttttatttctcttgtagatttttttcctatgaaaaacctttatagttcttttggtgaaagttctatcaggccctgccatttttactggcacagcttaagaaatggagcactatgtttgattcattggccaatgtatgcacggtaaattgttaatgcatcgtatagcaaccaatatatacaactaccagttgtagaggagatatctcgtttcagtaaccgccattttttcaccaaccaagtcacgttttaataacattctaatcgaacattttcaatttataactaaaactaaaccagaggaaatgactgtattctaggacaaaatatacacggatcaaatcacgtcttattaagaaggaatatttctcagtatcggttcccttgctctaaatgatactgtatcaactattcataacaccgtttatatgtttcttgatcagcaggacgatagatcttcaacggctgattatcatcgatcttcttggggaggaagcctacctttgccattatcttttcgtgggcccaaatccagcagcggtccaacgtttctctccacccacaggaaccttctggaaacccacgccctctctatcccctctcccaatccagcgacgtggccgcatctcccaccgtccacttcccccctcccgattcaaaccaacggccccgatcccatccttgagccgcgggcacagagccctggatcccccggcggagccagttctatataaaggcgaggccgccccagctggcaccacccattcctcgcgtcgcatcgcacttgtagctctcgacccccgcatctcatccctcctctcgcttagttcagatcgaaatcgcaaatgggtaactccgccatctgatcccgcttcctccgatctcgatctggtctccccgttcccgttctgttctagtggagtgatttttttgcatttttttctgactttttgctggttggttttttggcttctgcagcgaagattaagatcgggatcaatggtgagttggaccttcgtctccagatctgtgttttgtgccggtgtttgcggggttttgggggtgggttttgattgttggatgtggattgtgtagggttcgggaggatcgggaggctcgtggccagggtggccctgcagagcgacgacgtcgagctcgtcgccgtcaacgaccccttcatcaccaccgactacatggtaaaccctcctgccttttgcttttatctcgttagctgcacagatttgtggatagatgcgaggggatgtttggtttgttttagatctactattccaggggctagtttgtgggtttaggtgttaggaggttacagtcccagtgtgctcttgactggcttgagcttgacccagcgtattgatttgcatacgcgagttagttttttgtggctgcttatcatattgttgtcctaattagatctgtgagtttggaatttggatatcagtgtgtcgacctgtcgatcaaatagtcattgatatgtcttcagatgcatttgcacatgcaaaatcacagattgtgccggttgctttaaaattccgcacagcgatatgctttgctgtggtactggcttctgagatatgtttgccacatccagctatttgtttccagtttgttttggtttgataatggcccttcttaaatatctgtgattttccttttcatctgaagtgtgaatccaatcatctagacaatgcggtgataacttttttttcaatttcctgcagacatacatgttcaagtatgacactgtgcacggccagtggaagcatcatgaggttaaggtgaaggactccaagacccttctcttcggtgagaaggaggtcaccgtgttcggctgcaggtttgctgtttttttccctctctgctgttgtctgatgatatcatgagcagtataccatatcgctcaaccttaatttctctgctcaggaaccctgaggagatcccatggggtgagactggcgctgagtttgttgtggagtccactggtgttttcactgacaaggacaaggccgctgctcacctgaaggtattttctgcgaaacccaacatgtcattgtttgattgtggtgtcataacaattcatatgaagaatgattctcatggtatcatatgcgtttcaatatagggtggtgctaagaaggtcgtcatctctgctcccagcaaggatgcccccatgtttgttgttggtgtcaatgagaaggagtacaagcctgacatcgacattgtgtccaatgctagctgcaccaccaactg

SEQ ID NO: 1763 - DNA, 1811 bp, Oryza sativa
ttgataatatacaggtaagctggtcaatagttggtacttagcagtaggcaacttataggttatgattcaagaagtccaacttttataaactgcagttaatgcatcatgtagaagaaatattttgtagtcctcttgtcagttgattgctgaacttctttctgttttttggtggagaactgctgtgttctactggtataatttatcattgtctgaatggactaattgaatctaagaaactaaaaatataggtatatttcatttgtactattttaacagtatattgccaacaatatggcatgccatagtagctgcaatttataatcaatacaatcctgcagattgtattcagggaggactttgggactgacgggcgtggtggatattttgatcaatatgggtatgtagaaacattacatttcattagcacttttcttaattaagttttctattataaaatcgtaaccttacaagtcaaaagtgtacatatgagtatattatctagagctaagtgttgataaattttggaaatatttaaattctttgttaattcttactgattaagaaaagcatactctgcatttcagtgtggaaatgaacattttgctttattgagtttgcaagccaacatggaaattataattttcagtaacagaagtgttcagtactgaattcgaagagagtgcattcgctttgtatatgcctttcctgctatgagttaactaaaccatttaaggataatgtatactggatcatagtcctctctttttgcataattgtttattgcttaaacatgttttacacctcccatcgtgtatctcgttgttcctcaagggagtatctaacgttactcttgttgctgcagaatcattcgtgacatcatccagaaccatttgttacaggaaagtattctcaatatgtgtcaacattccatatgatatgatttgcatcattgtagtaacccccaccctgtcctaacaaagaaaacttttagtactttagtgactaggaaagaaaagcctcttcttacattaatttgtttaaaatttatattcacagatagtttcatgctgaattatatatggtcaagtagtacatgataaattccttgatgagaacaatgtctttagcctttaggagttaactgttccaacaacaatttaatgaactgttgcttcttctgcaggttttctgtttggttgcaatggaaaagcctgtctctcttaagcctgagcacattagagatgagaaagtcaaggtactttacctttctctattctctacatgtcaatactatattgcagcttgccaatactataatactaagagtattatgttttagtccgtttctttagtactaaataaaaccagttccctgttaatgccaggttctgcagtccgtgaaccctataaagcatgatgaggttgtccttggacaatacgaggggtacaaggatgaccctacagtgccagatgactcaaacaccccaacttttgcatctgtcgtgcttcgggtacacaatgaaagatgggagggtatgtctctcatcagtatatatacacattagggttctggagaaggacaacattgattttcgttttcccttcagattgtctttcagtggaccataattcttcattttaactctgtaatattcatatcctgcaggtgttcctttcattcttaaagctggtaaagcactaagctcaaggaaagcagaagtccgtgtgcagttcaaagatgttcctggtgacatctttaaatgtatgtgctataattacgtgcagttcatatcatggtgtactcaaccctt

SEQ ID NO: 1764 - DNA, 794 bp, Oryza sativa
agaagaatgagatttgaaaaatatttgacaaaataaaattaatgggaaaagactatgattcaatagttacagctgcagtacagagacaccttttcattatagaaaagccaacaagacaccaaatgctggcaatgaattctcaaaaagtgcatgtgttgtcgtttgttcccagagtaacatgaacacaacatgtagaatggacattttacaaatataataaaatcttaccaactacgtttattctcggaaatgtagaatgcaactatatttctcggaaaaaggaagacgctggctgaaagaaggaaaaagataaactcttaccaactacgtttattcatgtcagcatcggacacaccttctgcagctggtgtcccagcaagtatttcaccttcctgccacgaaaatgaatcatgagataggaaaaatgatttaagagatatgagagagagagagagagagagagagagagaagggggaactctggtgaagaggttacctttgtcaagtataggttgcgtcgatcctccacctcattctttgacttctcaagttcctttttgtgagctgactccttgtccagcgctttcattatcttaagagccctgctctttataaagatccccaatccaggagcagcattggcagcagaaacggctgcatcagctgcctctgctgtagagaacttcagaaaaccagttcctctaggtctcctgaataacaccaaaaaaccatgcactaatgagtgtatatgcaaaactgcaaatgtcctctggttgatacaacaggaggaaata

SEQ ID NO: 1765 - DNA, 11812 bp, Oryza sativa
  unsure (1)..(11812): unsure at all n locations
tccgccgggccgctgccggtgtctccgtcctcgacctcgcccgcacgaagtcgccctctccttctcccacgtggccgccgccgccgatgccgacgccctcccttctacccgtcaccgcccccgtcgctgccgccgccacggggccgccctcctctctcgcctcgcgcccaacggccggcctagtcagaggcagagaagcgtgagaaagaggaggggagagagagagagaagggggaagagagaggaggctgatgtggattgtttgaaatgtggggcccacgtgggtcccacgctgactcagccgccacgtcggacaaaaccaccgagggacctaatgcgaacggttttgttagttgagggaggccagttatctggttttgcgattgggggacgattttgtatctcgatgacaagttgagggaccttggttgtactttttcctttttaaaatcggtcatgcctacataatccgattggaaagcaacggaagggatggtttatgggccttttttgggcagcaaaaggcgcatgtatatgggctgccagtccacacaatcgaagtgtcttactgggcctaatgcttatggcctcaaaacataagaaaatatcagaataagtccacctttaaaagtgacccgaatctaattcataaccctaaactgcaaaatctaattcataaccctaaactgtaaaaccggatgtcttgaccacccaaactgttgaaaccggtgcaatttgactcctttggtggttttggagggcggtttagctgacgtgacgcttatgtggtggtgttgatctagtcttcggggttgacgtggcgcttaggtggcatttgagttaaaaacgtatacgtgggacccgtttgtcattcacacacataaaaaattgtggggcccacagacatgtgggccccacatgtcatacttcttctccctgccactgacatgcggcgctgatggcattgaaaccaccggggcgtggcacgggacggaacacctgcccgccgcttccgcagctgccatggctgagctcgctacggttcaatcccgttgggctctcgggccgggggctcacgtacttgcacggttggttgatctcgccgccgtcgacgccggcgccgacctccatggtggtggcggtggcgagcttccgcttgagggaggagttctagtgattcttgacggtgttgttggtgcggccggggaggagccacgtgatggtggcccaccagttgccgaggcggtcaccgtccaattcctcgtcgtccaatccctcgccccatgccactccactagccgccacagcgcctcatcctcctcgggacttcatggcccctttatcctatcacactctccttccacccccatatccaaatgatttcctcctcctccttcctcgagctgctctaatggcggcgtgggtgattagcgatgtggatgtctcatactcgccatcaccactttagctcccgccgccgctgccgcttcaactcctgcccgtgctccctggctccccgcagccggccgaaggactgagaaagagaaagaaagagagaagggaggaagaggggatggaaggcccgcgcgacgagctattagctcagtggtagaagcggtggctctcccttgggaattcaaatttntggccngcgttcngngtntggngtnaccnnccantngnggnnnctgtgnanngggcttctcnnagccacatggatagttcaatgtgctcatcagcgcctgacacgaagatgtggatcatccaaggcacattagcatggcgtactcctcctgtttgaatcggagtttgaaaccaaacaaacttctcctcaggaggatagatggggcaattcaggtgagatcccatgtagatctaactttctattcactcgtgggttccgggcggtccgggggcactacggctcctctcttctcaagaatccatacatcccttatcagtgtatggagagctatctctcgagcacagattgagggttcgtccctcgatgggaaaatagagcacccaacaacgcatcttcacagaccaagaactacgagatcatgttggggaagaagaaagagatgatgacatgtggggccacatgtcagtgtgtcccacaattttttaatgtgtgtgaatgacacggatcccacgtatatgtttttaattcaaataccacctaagcgccacgttaactaaacatactaggtcaacaccgccatgtcagcgccacgtcagcgaaaccgccctccaaaaccacgaagggagtcaaactgcaccggtttcaatagttcggcgtcgaaatatctggttttgcggtttagggtcatggattagattcgggtcacttttaagggagtccaagtggacttattccgaaaatatctggtcatttagcccataaaaaacaggtccataagattctctcctaagctaagccacttatacttgagcacgtatcgtaaggaaaatccaccggtcgtcgcaagcccgcatcaacgagcaggagggatataaaaccctccgccccctcctcccccaaacccttccgccgccgccgtcgccgtcgcctgctccagcgcgctcgccgccggccgccctactcccgctccaggcccgtcaccgccgtcgccgatccaacatggggtaatggatcctctatactctgcatctaatcgccgtcgctctatcccttgcgatttctagcgttcgtcagctctgtaggaatagtgttttggggtattcaggtctacaagcgcgaagttaggagtcccatccaatttgtccaaccagaacggatttttccttctgttttatactatttcgttcatctaacgatgcgctgttgtgattttacttgtctgattccattccagagactttgtttgatgtagtttcaaataatttagtggcatattgagagatatacgtgtccatgagctataagatgcctcttgtggctggagctgatttagttgctgttcgaaattatgaattaccctccaggtctccctagtcattagcaatctatacatttttacgttttgctacggcagtgtacactatatgctgaaatatggatcataatctcatgggtgtagtaactctttctgatgaaatgctctcaattcactggcttaagcaatcagcatagcattcacccctaattcaatatttccatggctagactccactggagtgtaaatatagcaggcttgttaacattttctgtctgctggattgtgctctactgatttaagtagtagtcaccacaaccatatctagttgcatacatctgtttgctatgctattgccttgtaggagtattgcatagtggatgcatattagacgcatagtgtttcccttgggaaatgttttccaattggaggcgactataagaggtggtgggacatttgcgtttgcccttagcctgatcgaacttaaattgcactgtcgaatctcttttgctgctttccctttagcaaattggttgttcatgagtgatgcttgcagtaaactggttgttgagtcctcaaaattcgtctcatacttttgggtagttgaatcttcttcaatggagtgatctgtcagacagagttgtacctatgtacttttagaacaaaagcaattacactcatcttaatataccactgtgctaatatttctagttcctttgatgctcatgttgaaactgtttgacgtatagctttagaactttattgatgcacttggtgtttacatatatttcttggatgcaattgcagtaagacacgtggtatgggagctgggcgcaagctcaagacccacaggagaaaccagaggtgggccgacaaagcatacaagaagagccatcttggcaatgaatggaagaaaccctttgctggttcatctcatgcaaagggcattgtccttgaaaagatgtaagtgcaataaacgtagagcaattatttgctctgaagaacattcaataaccaacatgcattactttatctgcagtggcattgaagctaagcagccaaactctgctatccgtaagtgtgctcgtgttcagttggtgaagaatgggaagaagatagctgcctttgtgccgaacgatggttgcttgaacttcatcgaggaaaatgtatgttcaactgctgccatacagagctttcttgttgcttatcatgttcttaccattttccgttcgggatatgcaggacgaggtgctcatcgctgggtttggtcgtaagggacatgctgtgggagacattcccggtgtccgtttcaaggtggtgaaggtctccggcgtctctctcctcgccctcttcaaggagaagaaggagaagccaagatcttaaatcctattcccctccattgcaagcagctggagcggcatggcggctataagaagtacaattagctacattcagctaatgaattctggggccttccttttctgcttctggcagctaatctctctctgaaattcagactcgatgttgtggtgaacatgtcaatcgtatttttaccccccctaatcacctgaattcaaattccatatagaagtagcagcggatttggtttccttcagcgcgattttaaaattcaaacctggaatgtcgtggagtgaagtagtgtcatcatatgcttgtgaatctctgcaagttgcaagcagcctattttgttgttttcttgtggcgcggtttgaatcttgaatgaagtcatcattttgaaatctctccctctatgctgaaacggaacggatctgatctgatccacgtgcgggttcatctgagccgttggcggcgagatcggacggcccaagaaaggcctcgcggccgcaacgaaccggataaacccgggcctccgtccccattggacccggttgaaaaccccacgggccatcccgatctgtgccaggtcagcagcctatccgggcccacacgcataggacatagctccccctacccatcaactcacaccaatacttttacccaaccccacccacttccacgtgggtcccatgactcgcctcaggttgtgggcccaccatgtcagcctcatttcacctgccgggtagagccgcgagtcgggaccaaacaaaaccgggccccttttacatcggcccggtgtaataaagaagcgaaggaagcagccggaatccagttttctgtgtccggctcggctcgtcggcgacgcctcgcaccgtcgccgctcaccggcgctcctccgccgccgctcgccgccggaggagggatagagtgctcgtcggtgcggtttgatggaaatggcccccgcggcgcaggtggcgtcgaacccgcggacggtggaggacatcttcaaggattactcggcgcggcgcggcgcgctcgtccgcgcgctcacctcaggtaaggtctccccgcgtccgcgtccgcgtccgcctccgcctcctccagttcgtgcggcactgactccctgcgcagatctaacgctaggcttcgcgtctgtctgtctctcgtgtgctgccgtgcagatgtggacgagttcttcgggctctgcgacccaggtgagttgagtgagggggtggattcgatttccgctcgcggcgaggtgttcgtccgggtgcgtgtgggcggcggtggatccgggtggtggtggtggtgggggactgagcggatcggatttgccttttgtagataaggagaatttgtgcctgtacggcctcgccaacgggagctgggaggtggcgctgccggcggaggaggtgccgccggagctgcccgagccggcgctcggcatcaacttcgcccgcgacgggatgaaccgccgggactggctctccctcgtcgccgtccactccgactcgtggctcgtctccgtcgccttcttcttcgccgcgcggctcaacggaaacgaacggtactactcgctcgcatccgcaattccgcataccttccccgaattcaatttcttggctggaaaaaaaagaaagtcagtaaaattttcagtgtctctttcctgacagaaagatttgtgcagttcaaagctgcctttcggtacagtagtttgcttgattgttaggtgaaggaggattcgcgtgatcgatttcatggtctaatttttgtttcagttggcgcatgtgtctgcatgtgcacatgtatcccgtgctcttctttttgtttcctttctttgctttgagtgaattggagtcatgcgttctggatgtgctggctgtagtgtactggccgttctatgtgagttttacatccttacccttctttcatgatagaattatcaattcatactctagggttcatattgattcatggtagctgctcgtaagaatttagtgcctatcctatcccattttagtttttgaattgaaaaacttttccagaacttgatttaatgagtcgcagagtctagcaaatgcaggctttaaagattgaagtagcacctacaagactcttatattaaatgaagggccattcatttctgcatttttctggcatgtcaactgcgccacaacttactccatttcattgtggttggagaaggtgtacatttactagtactagttgatataggagtaatgtgtatacggagcaaatatgacaatacgtgtatatgcctacatagtactattcccgtcttaaaataagttcacttttatacataaatctagacacttattttgggacagaggtagcaagccattacttgattccttggtcaagtgctatgcaagtaggtctctattattctccttttagagcttttggcattttagctggcatgatatatcatatatgaccaaattattctaagattttcgtagcatttgttaccagaaattttagattagtagtggagtttagcacacaatgcatgccagaaaaatatgctttccatctacttatgtacttcatgatgtatctgtgctgaagttaaattttctttactaaggtgaataaatcaatgaggtcatgacaaaaggagtacttgatgctcgcatcgatgttaagcatcaaaatgccccttatttcagctttcttgttcatcccatcgttgttcatttgtctagagacagttgtagctaattgcgggtatgggatgttatatctagaacttaggagcacataatgacattttctgctagacataatcctaccacttttattccaatatagtctactgctggtatgtcgacaatgcaatcaaagggattaggcaacatatttaggctttacttattgttcaactctgcgcatatagtttgtggcagaggtgttctgttgataaaagcgataacttgtttcttcttagtttaagaagtctgcgtatgctatgtcctggtatgctattagggtcgtaatccagaatctcgtgttttccacatcaatgtatttctctgtactagtttagttttatgttattcatttttttcttcttatttttcaggattagatgtgtattttaactgaagaaatgatgtatagtatttctgtttatgctactgagctactctattatactacatgttagtcacttagtctcgtctttggcatgctatccatgatggtgtgttactattctcatgtacatgtatctgccccatcaccttaaaattcaatgtttgccaaaaaaaaaaaagttccgcaatgcttacgagtagtttctttgctgctgactgtatgttgactttaggctgttactgaatactctcccgggctaataatattagtcattttgaacaagggtaaagtcaaactttaaaatctttgactatctaaaatatttatcttaaaaatatggaaacatatgtgtagattagtcttaaaaaatacttcaataaaattatatatttgttgatatttctatatatattataatagaaaatagttgctaaagttactttttggagaccatgcgcttggagggagttacaatattgctccttttgtttctcaggaagcggctcttcaacatgatcaatgatctacctactgtatatgaagcattggttgacaggaagcacgtcagggataggtctggtgtcgatagcagcggaaaatccaaacattcaacaaaggttagtatttccctcccccaaaattcagaaacttcaaatgcagttacttcagattttgtaacctaagctacaatacacagagaacaggcgaagggcaggtaaagcgctccagggttgtcgcagaggagtacgaggacgacgacgaagaacacaacgagacattctgcggaacttgcggtggcctctacaacgcgaacgagttctggatcgggtgcgacatctgtgagcggtggttccacggcaaatgcgtcaggataaccccggctaaggcggagcacatcaagcactacaagtgccctgactgcagcagcagctcctccaagaaaaccaggctataggttaaattgtggtgtgtgcaatctcctctgaccaatctgatcaaacgacaatctgtcctgccactaggaaaaaaaagatggtgaagctgttcttcggtccaatgtcgtagcttagctagatgtgaagtcatctagacattgtgctgtgtggtagatgaggcaaaaaagagtgaactgaaaagacgggaaaaacgtattcgatctttagctttgttttataaatgttttcttcattgtcaccgatgtgctttgggttttttcagacttcagagcatgggtatcgttgttgaattgtagctgcatgcattgcatgatatatttgtcaagtgctcaacaactggagcattcccaatcatagcgtctctgcacatttccattattcataaacacagagtgcttgctgaaaatggcataataacacattaacacacgagtaatctactcaggcagaaggattaatgcatagaaggatcaagagatgaagcctctgctcttgaggctttccactgaatccctgatgatcttctccatgggactgaactgcaaacccagcgcgatcagcttcttcgacgcagcctctgctctcaccagcccaggctgcgtttccttgggtaatctgccacacaaaaaccaaaaataatttatcagttagtgatatttgcaattgcagctgcatcattcacagtttgatatagtcatggaagcatttggagatttatgtggtacgtctaaggtttttgccgggaaggccgaaggaggccatccgaatgtattaagaaggtacgtctaaggtttggcgtggcaacctttggctgcgaaccaaacaggccctacagtccactaaactcactttggcactttgtactcggggtagagctcggcgactttggaagcgaaatcgctccagtgagcaatggactgcacgcagaggtgcctcccggatgcagatgggttctcgtacagcagaatatgggcaagagcaacgtcttccacatggactggccccatgtaaaaatccgcatactcctctgtgcaacctgcattgtcacaatggtgagcatgtttaggtgtttccttgcagtagcaatcacagctggaagaggcaaccattcaatcaagaatttctaggcacacaaaattgccattctatccctcacactgaatcaaacaagagaagtttttgagtagcacatgcatggtcatttaggaatcaacggttctcttttatgccaactgaactgaagaagcctatttttcatgtcattacatcaagtgttgagggatagcaaaacatgcggtttcactctctggtgatactaatcactgtgacatattcagtgcagcactatcagcttcctagtattctcagtatttgtggtaattttttttttggaacaagtatttgtggtaatttacctagagcaatcaatcttaacatacttgatactttctgagggttataagttcctagtttgtgcaagcacatgaatcagtttccctcttccacacattaatcacattgattggaaacaatatcacttgtcctagaatagtactattcagacttaactatggttaagatcagctacatgattgatccaaaatgcataccttcgagtaggcgaacaagcatggccatgctagcattgatcgtcggtgggattaccaggcccatgacagttcctgggttaaccacaaccacatccaatccattctcctctgcaaacttccatgctgccttctctgccaatgtttttgaagcagggtaccaaacctatgcacaaccaaccaaagcgtgcctcagataccagcgaaaaggttcatataattgcagcgatgtgtgggctgcatgatgtaaattctgcagtccttttccatgttatcattgactgaattttgttcccattgggtctaggagaatcaaatgcagaaagcaacatgtaaaagaaattattgatatcattttcatctcaccaaacagcactggcatgcatggagagtgcagccttttcttgtcttgctagaaacttatttcccccctctaaactgataataataatagagtaaatttcagaaaactacaactattttgtcaaaagtatcaatttgctacaattttaattttagctaagcatttcagagaactgcaacaatagtgtccgattttatcatagaactataactttatttgctcgacaattttagacccgcatgccatacacacacgaggggataaagttgtagcattatgctaaaaatgtttgctattattgcagttttgtgaaacacgttgctaaagtcccagcaaaatgatagttttaaccaaacagttgcagttttgtgaaatttactcgttataatatcatcatcaatttgcacttcgcacactgtcaaataattccaatgagaatggaagaaaaatggagatgccaagacacaagactgctcaccccgttcttctcgcagtagtcaaggtcagtccagcagcgctcgtcgcgcacctcgccggccggccagccggggctgggcacgatggcggagatggacgaggtcaccaccacccgccgcactccgccggcgtccttggccgcgcgcagcacgttcagcgtcccctccaccgccggcaccatcagctgcgcctgcaaacaacgggaacacggccggaggcggtgagcctggagcccgccgacgccgacgccgacgaggccggtacggacgtcgagaggagaagagtcgccggccggtgtacctgggggtcgaggacgcggtccacgatgcagggggaggcgaggtggaagacgccggagcagccccgcgcggcggcgaggagggcggcgccgtcgaggaggtcgcccgggaacacgcggaggcggcggccctcgccgccgccggcggcggcgagcgcgtggaggtggtccgtctcggccttgtcatctgcacagcacaacaccattgtcttcatcacctcctccgccttgcaagcaaacaagcagcagtaatggcggtttcgcactgaccggggttgaggacggcggcgtggacggagtagccgcgggcgaggaggcggcgaacgagacacgagccgatgaagccgctcgcgccggtgaccagcaccgtctccccctcccctcctccgccgccgccgctcgccattgtcgccgacgagagagactcgagctctcgtgtgagagagctgtggcttgtgagcctggagcttttattgtcgatgtggctggtacctactagtagcactgtagcacagtacagtacaaagcttgactgacagaagcagaagcagatgcagaagcagccaactttttggatctttcacagcctcacaagtgacagtcacacggatgatttgtcatgattcatctcgaattggggatctcccaaatctggattgattgagctg

SEQ ID NO: 1766 - DNA, 1230 bp, Oryza sativa
atttttcctatctcatgattcattttcgtggcaggaaggtgaaatacttgctgggacaccagctgcagaaggtgtgtccgatgctgacatgaataaacgtagttggtaagagtttatctttttccttctttcagccagcgtcttcctttttccgagaaatatagttgcattctacatttccgagaataaacgtagttggtaagattttattatatttgtaaaatgtccattctacatgttgtgttcatgttactctgggaacaaacgacaacacatgcactttttgagaattcattgccagcatttggtgtcttgttggcttttctataatgaaaaggtgtctctgtactgcagctgtaactattgaatcatagtcttttcccattaattttattttgtcaaatatttttcaaatctcattcttctataatttgtatttagtttttctttagctgattgaacgttcagtactcttcttaagatggagtttgattatgctctcaatcatggtcaaaggatctcatgaataatgtttaaggaatcattgatcttgtcgtgcaggctagctagaagaaaagcagaaatgctccagtctccaaaatttcatgtgtccagaacaaggcttatcatctacaacctgccaaagactatgaccattaacgacgtaaagaagctttgtagagaagcagttatttctcgtgctcacaagcaaaatcccatcattcgaaaggtttcttgggttttctttattcaacctctgttttattctatttctaggtattcttttataatgcttatgcgtgtgcacttgtcttgaacaggtaaatatcctgaaaaatgaaaagaagagcaacagtactgcacagaaacattcccgtggtgtagccttcgttgattttcaagaacatgagcacgctcttgtggctctaagagtcctaaacaataaccctggtactgcctctataccaaatgcttctaaatattggtttgtaactgcctcggttgcaactttataatgtggaacatgtctttctccaagaagatttaatgtgttatattgcattgtgctgcatccctacattgcatggaatcaccgtatcacatgttcgtggcttcatgctacctatctgtattgtttcttgtcctgtcatgagcctgatgtgtcgtagtgctgctattagctgtaattttactttttttcctctatatttgcagattactacgatgtaa

SEQ ID NO: 1767 - DNA, 600 bp, Oryza sativa
agaatgaatgaaatagtcataatttcttgtaatttgtttaaactacagaagaagtaaaggattcaatgcaaaacatacccgttatcagacttctgtggaatggacacatcccatacaaatcctgctaaactgaacatatccatgatctcctttactgtaatctgcaataatgaaacaaacgcatataacctctgttatctgttttagataacaaagtttggaacaggtgaagttttgcatttcatgaagcaccttgaatggcagattccggactatcactctccattttctgatcttcgagccctgcatagcaataagcaagtttcaaacagctgcaggtaaatggggaaatggccaaacagagaaaatgatagtggttcgacaaagtactgttaaacaccatgcaacccttgtgcagaagacagacactcatcaaccaaaagtaaagattttaagtaatctcattctatctcctacccacctattagcacaacagctcaactagccatgcaagatagtggtgcattataagcagagctaaagctccagtatatctattgttccattcacagaataatattaggatctttcaaacggaaa
